(19) United States
(12) Patent Application Publication
(10) Pub. No.: US 2007/0032414 A1
(43) Pub. Date: Feb. 8, 2007

(54) Human secreted proteins

(76) Inventors: Craig A Rosen, Laytonsville, MD (US); Steven M. Ruben, Olney, MD (US)

Correspondence Address: HUMAN GENOME SCIENCES INC;INTELLECTUAL PROPERTY DEPT., 14200 SHADY GROVE ROAD, ROCKVILLE, MD, 20850, US

(21) Appl. No.: 10/472,964

(22) PCT Filed: Mar. 26, 2002
(86) PCT No.: PCT/US02/09922

§ 371 Date: Mar. 30, 2004

Related U.S. Application Data
(63) Continuation-in-part of application No. 09/950,082, filed on Sep. 12, 2001.
Application No. 09/950,082 is a continuation-in-part of application No. 60/278,650, filed on Mar. 27, 2001.
Application No. 09/950,082 is a continuation-in-part of application No. 09/833,245, filed on Apr. 12, 2001.
Application No. 09/950,082 is a continuation-in-part of application No. PCT/US01/11988, filed on Apr. 12, 2001.
Application No. 09/950,082 is a continuation-in-part of application No. PCT/US00/06043, filed on Mar. 9, 2000.
Application No. 09/950,082 is a continuation-in-part of application No. PCT/US00/06012, filed on Mar. 9, 2000.
Application No. 09/950,082 is a continuation-in-part of application No. PCT/US00/06058, filed on Mar. 9, 2000.
Application No. 09/950,082 is a continuation-in-part of application No. PCT/US00/06044, filed on Mar. 9, 2000.
Application No. 09/950,082 is a continuation-in-part of application No. PCT/US00/06059, filed on Mar. 9, 2000.
Application No. 09/950,082 is a continuation-in-part of application No. PCT/US00/06042, filed on Mar. 9, 2000.
Application No. 09/950,082 is a continuation-in-part of application No. PCT/US00/06014, filed on Mar. 9, 2000.
Application No. 09/950,082 is a continuation-in-part of application No. PCT/US00/06013, filed on Mar. 9, 2000.
Application No. 09/950,082 is a continuation of application No. PCT/US00/06049, filed on Mar. 9, 2000.
Application No. 09/950,082 is a continuation of application No. PCT/US00/06057, filed on Mar. 9, 2000.
Application No. 09/950,082 is a continuation-in-part of application No. PCT/US00/06824, filed on Mar. 16, 2000.
Application No. PCT/US00/06824 is a continuation-in-part of application No. 60/168,664, filed on Dec. 3, 1999.
Application No. 09/950,082 is a continuation-in-part of application No. PCT/US00/06765, filed on Mar. 16, 2000.
Application No. 09/950,082 is a continuation-in-part of application No. PCT/US00/06792, filed on Mar. 16, 2000.
Application No. 09/950,082 is a continuation-in-part of application No. PCT/US00/06830, filed on Mar. 16, 2000.
Application No. 09/950,082 is a continuation-in-part of application No. PCT/US00/06782, filed on Mar. 16, 2000.
Application No. 09/950,082 is a continuation-in-part of application No. PCT/US00/06822, filed on Mar. 16, 2000.
Application No. 09/950,082 is a continuation-in-part of application No. PCT/US00/06791, filed on Mar. 16, 2000.
Application No. 09/950,082 is a continuation-in-part of application No. PCT/US00/06828, filed on Mar. 16, 2000.
Application No. 09/950,082 is a continuation-in-part of application No. PCT/US00/06823, filed on Mar. 16, 2000.
Application No. 09/950,082 is a continuation-in-part of application No. PCT/US00/06781, filed on Mar. 16, 2000.
Application No. 09/950,082 is a continuation-in-part of application No. PCT/US00/07505, filed on Mar. 22, 2000.
Application No. 09/950,082 is a continuation-in-part of application No. PCT/US00/07440, filed on Mar. 22, 2000.
Application No. 09/950,082 is a continuation-in-part of application No. PCT/US00/07506, filed on Mar. 22, 2000.
Application No. 09/950,082 is a continuation-in-part of application No. PCT/US00/07507, filed on Mar. 22, 2000.
Application No. 09/950,082 is a continuation-in-part of application No. PCT/US00/07535, filed on Mar. 22, 2000.
Application No. 09/950,082 is a continuation-in-part of application No. PCT/US00/07525, filed on Mar. 22, 2000.
Application No. 09/950,082 is a continuation-in-part of application No. PCT/US00/07534, filed on Mar. 22, 2000.
Application No. 09/950,082 is a continuation-in-part of application No. PCT/US00/07483, filed on Mar. 22, 2000.
Application No. 09/950,082 is a continuation-in-part of application No. PCT/US00/07526, filed on Mar. 22, 2000.
Application No. 09/950,082 is a continuation-in-part of application No. PCT/US00/07527, filed on Mar. 22, 2000.
Application No. 09/950,082 is a continuation-in-part of application No. PCT/US00/07661, filed on Mar. 23, 2000.
Application No. 09/950,082 is a continuation-in-part of application No. PCT/US00/07579, filed on Mar. 23, 2000.
Application No. 09/950,082 is a continuation-in-part of application No. PCT/US00/07723, filed on Mar. 23, 2000.
(60) Provisional application No. 60/278,650, filed on Mar. 27, 2001.
(60) Provisional application No. 60/167,061, filed on Nov. 23, 1999.
(60) Provisional application No. 60/124,146, filed on Mar. 12, 1999.
(60) Provisional application No. 60/166,989, filed on Nov. 23, 1999.
(60) Provisional application No. 60/124,093, filed on Mar. 12, 1999.
(60) Provisional application No. 60/168,654, filed on Dec. 3, 1999.
(60) Provisional application No. 60/124,145, filed on Mar. 12, 1999.
(60) Provisional application No. 60/168,661, filed on Dec. 3, 1999.
(60) Provisional application No. 60/124,099, filed on Mar. 12, 1999.
(60) Provisional application No. 60/168,622, filed on Dec. 3, 1999.
(60) Provisional application No. 60/124,096, filed on Mar. 12, 1999.
(60) Provisional application No. 60/168,663, filed on Dec. 3, 1999.
(60) Provisional application No. 60/124,143, filed on Mar. 12, 1999.
(60) Provisional application No. 60/168,665, filed on Dec. 3, 1999.
(60) Provisional application No. 60/138,598, filed on Jun. 11, 1999.
(60) Provisional application No. 60/124,095, filed on Mar. 12, 1999.
(60) Provisional application No. 60/168,662, filed on Dec. 3, 1999.
(60) Provisional application No. 60/138,626, filed on Jun. 11, 1999.
(60) Provisional application No. 60/125,360, filed on Mar. 19, 1999.
(60) Provisional application No. 60/168,667, filed on Dec. 3, 1999.
(60) Provisional application No. 60/138,574, filed on Jun. 11, 1999.
(60) Provisional application No. 60/124,144, filed on Mar. 12, 1999.
(60) Provisional application No. 60/168,666, filed on Dec. 3, 1999.
(60) Provisional application No. 60/138,597, filed on Jun. 11, 1999.
(60) Provisional application No. 60/124,142, filed on Mar. 12, 1999.
(60) Provisional application No. 60/125,359, filed on Mar. 19, 1999.
(60) Provisional application No. 60/169,906, filed on Dec. 10, 1999.
(60) Provisional application No. 60/126,051, filed on Mar. 23, 1999.
(60) Provisional application No. 60/169,980, filed on Dec. 10, 1999.
(60) Provisional application No. 60/125,362, filed on Mar. 19, 1999.
(60) Provisional application No. 60/169,910, filed on Dec. 10, 1999.
(60) Provisional application No. 60/125,361, filed on Mar. 19, 1999.
(60) Provisional application No. 60/169,936, filed on Dec. 10, 1999.
(60) Provisional application No. 60/125,812, filed on Mar. 23, 1999.
(60) Provisional application No. 60/169,916, filed on Dec. 10, 1999.
(60) Provisional application No. 60/126,054, filed on Mar. 23, 1999.
(60) Provisional application No. 60/169,946, filed on Dec. 10, 1999.
(60) Provisional application No. 60/125,815, filed on Mar. 23, 1999.
(60) Provisional application No. 60/169,616, filed on Dec. 8, 1999.
(60) Provisional application No. 60/125,358, filed on Mar. 19, 1999.
(60) Provisional application No. 60/169,623, filed on Dec. 8, 1999.
(60) Provisional application No. 60/125,364, filed on Mar. 19, 1999.
(60) Provisional application No. 60/169,617, filed on Dec. 8, 1999.
(60) Provisional application No. 60/125,363, filed on Mar. 19, 1999.
(60) Provisional application No. 60/172,410, filed on Dec. 17, 1999.
(60) Provisional application No. 60/126,502, filed on Mar. 26, 1999.
(60) Provisional application No. 60/172,409, filed on Dec. 17, 1999.
(60) Provisional application No. 60/126,503, filed on Mar. 26, 1999.
(60) Provisional application No. 60/172,412, filed on Dec. 17, 1999.
(60) Provisional application No. 60/126,505, filed on Mar. 26, 1999.
(60) Provisional application No. 60/172,408, filed on Dec. 17, 1999.
(60) Provisional application No. 60/126,594, filed on Mar. 26, 1999.
(60) Provisional application No. 60/172,413, filed on Dec. 17, 1999.
(60) Provisional application No. 60/126,511, filed on Mar. 26, 1999.
(60) Provisional application No. 60/171,549, filed on Dec. 22, 1999.
(60) Provisional application No. 60/126,595, filed on Mar. 26, 1999.
(60) Provisional application No. 60/171,504, filed on Dec. 22, 1999.
(60) Provisional application No. 60/126,598, filed on Mar. 26, 1999.
(60) Provisional application No. 60/171,552, filed on Dec. 22, 1999.
(60) Provisional application No. 60/126,596, filed on Mar. 26, 1999.
(60) Provisional application No. 60/171,550, filed on Dec. 22, 1999.
(60) Provisional application No. 60/126,600, filed on Mar. 26, 1999.
(60) Provisional application No. 60/171,551, filed on Dec. 22, 1999.
(60) Provisional application No. 60/126,501, filed on Mar. 26, 1999.
(60) Provisional application No. 60/174,847, filed on Jan. 7, 2000.
(60) Provisional application No. 60/126,504, filed on Mar. 26, 1999.
(60) Provisional application No. 60/174,853, filed on Jan. 7, 2000.
(60) Provisional application No. 60/126,509, filed on Mar. 26, 1999.

(51) Int. Cl. C12Q 1/68; G01N 33/53; A61K 38/17

(52) U.S. Cl. 514/12; 435/7.1

(57) ABSTRACT

The present invention relates to human secreted polypeptides, and isolated nucleic acid molecules encoding said polypeptides, useful for diagnosing and treating cardiovascular diseases, disorders, and/or conditions related thereto. Antibodies that bind these polypeptides are also encompassed by the present invention. Also encompassed by the invention are vectors, host cells and recombinant and synthetic methods for producing said polynucleotides, polypeptides, and/or antibodies. The invention further encompasses screening methods for identifying agonists and antagonists of polynucleotides and polypeptides of the invention. The present invention further encompasses methods and compositions for inhibiting or enhancing the production and function of the polypeptides of the present invention.

### FIELD OF THE INVENTION

[0001] The present invention relates to human secreted proteins/polypeptides, and isolated nucleic acid molecules encoding said proteins/polypeptides, useful for detecting, preventing, diagnosing, prognosticating, treating, and/or ameliorating cardiovascular diseases, disorders, and/or conditions related thereto. Antibodies that bind these polypeptides are also encompassed by the present invention. Also encompassed by the invention are vectors, host cells, and recombinant and synthetic methods for producing said polynucleotides, polypeptides, and/or antibodies. The invention further encompasses screening methods for identifying agonists and antagonists of polynucleotides and polypeptides of the invention. The present invention further encompasses methods and compositions for inhibiting or enhancing the production and function of the polypeptides of the present invention.

### BACKGROUND OF THE INVENTION

[0002] The cardiovascular system is a component of a complex physiological network involved in maintaining the oxygen and nutrient supply to tissues of the body.

[0003] The heart is the anatomical and functional centerpiece of the cardiovascular system. Weighing only 250-350 grams (less than a pound), the heart is one of our strongest and hardest working organs. It is composed of innervated muscle tissue with unique properties; e.g., it can pace itself in contraction. The main center of rhythm regulation is the sinoatrial (SA) node. Certain cardiac cells repeatedly fire impulses that trigger heart contractions. These autorhythmic cells have two important functions. One is to act as a pacemaker (set the pace for the entire heart), and the other is to form a conduction system, the route for conducting impulses throughout the heart muscle. This conduction system controls the pattern of blood flow through the heart.

[0004] The heart pumps at least five quarts of blood through a full circuit of the body every minute. The heart consists of two pumps, side by side. The pump on the right side moves blood to the lungs, where waste gases, such as carbon dioxide, are removed and oxygen is added. Freshly oxygenated blood returns to the pump on the left side, which moves it out into the rest of the body.

[0005] Blood flows away from the heart to the lungs or to the rest of your body, though blood vessels called arteries. Arteries branch extensively, each branch become smaller, forming blood vessels called arterioles. Arterioles also become repeatedly smaller and smaller until they are tiny vessels called capillaries. Throughout the arteries and smaller vessels that stem from them, the blood delivers nutrients and oxygen to the tissues and picks up waste. This task is completed in the capillaries. As the blood moves on through the capillaries the blood vessels gradually become larger, eventually becoming veins. Veins ultimately carry blood back to the heart. The cycle then begins again.

[0006] Disorders of the cardiovascular system are many and varied, killing more Americans each year than any other category of disorders. For example, damage to the conduction system leads to arrhythmia, an irregular beating of the heart. If left untreated, the heart becomes unable to effectively pump blood, frequently leading to permanent heart damage and/or cardiac arrest.

[0007] One of the most prevalent conditions in industrialized countries today is atherosclerosis. Atherosclerosis is the buildup of fatty deposits in the intima of large and medium-sized arteries. The buildup of deposits narrowing of the arteries, reducing or potentially blocking the ability of blood to flow through the arteries. Untreated, atherosclerosis typically results in cardiac arrest and, frequently, death.

[0008] Clearly, the discovery of new human cardiovascular-associated polynucleotides, the polypeptides encoded by them, and antibodies that immunospecifically bind these polypeptides, satisfies a need in the art by providing new compositions which are useful in the diagnosis, treatment, prevention and/or prognosis of cardiovascular disorders.

[0009] Cardiovascular disorders include, but are not limited to, stroke, cardiovascular abnormalities, such as arterio-arterial fistula, arteriovenous fistula, cerebral arteriovenous malformations, congenital heart defects, pulmonary atresia, and Scimitar Syndrome. Congenital heart defects include, but are not limited to, aortic coarctation, cor triatriatum, coronary vessel anomalies, crisscross heart, dextrocardia, patent ductus arteriosus, Ebstein's anomaly, Eisenmenger complex, hypoplastic left heart syndrome, levocardia, tetralogy of fallot, transposition of great vessels, double outlet right ventricle, tricuspid atresia, persistent truncus arteriosus, and heart septal defects, such as aortopulmonary septal defect, endocardial cushion defects, Lutembacher's Syndrome, trilogy of Fallot, ventricular heart septal defects.

[0010] Cardiovascular disorders also include, but are not limited to, heart disease, such as arrhythmias, carcinoid heart disease, high cardiac output, low cardiac output, cardiac tamponade, endocarditis (including bacterial), heart aneurysm, cardiac arrest, congestive heart failure, congestive cardiomyopathy, paroxysmal dyspnea, cardiac edema, heart hypertrophy, congestive cardiomyopathy, left ventricular hypertrophy, right ventricular hypertrophy, post-infarction heart rupture, ventricular septal rupture, heart valve diseases, myocardial diseases, myocardial ischemia, pericardial effusion, pericarditis (including constrictive and tuberculous), pneumopericardium, postpericardiotomy syndrome, pulmonary heart disease, rheumatic heart disease, ventricular dysfunction, hyperemia, cardiovascular pregnancy complications, Scimitar Syndrome, cardiovascular syphilis, and cardiovascular tuberculosis.

[0011] Arrhythmias include, but are not limited to, sinus arrhythmia, atrial fibrillation, atrial flutter, bradycardia, extrasystole, Adams-Stokes Syndrome, bundle-branch block, sinoatrial block, long QT syndrome, parasystole, Lown-Ganong-Levine Syndrome, Mahaim-type pre-excitation syndrome, Wolff-Parkinson-White syndrome, sick sinus syndrome, tachycardias, and ventricular fibrillation. Tachycardias include paroxysmal tachycardia, supraventricular tachycardia, accelerated idioventricular rhythm, atrioventricular nodal reentry tachycardia, ectopic atrial tachycardia, ectopic junctional tachycardia, sinoatrial nodal reentry tachycardia, sinus tachycardia, Torsades de Pointes, and ventricular tachycardia.

[0012] Heart valve diseases include, but are not limited to, aortic valve insufficiency, aortic valve stenosis, hear murmurs, aortic valve prolapse, mitral valve prolapse, tricuspid valve prolapse, mitral valve insufficiency, mitral valve stenosis, pulmonary atresia, pulmonary valve insufficiency, pulmonary valve stenosis, tricuspid atresia, tricuspid valve insufficiency, and tricuspid valve stenosis.

[0013] Myocardial diseases include, but are not limited to, alcoholic cardiomyopathy, congestive cardiomyopathy, hypertrophic cardiomyopathy, aortic subvalvular stenosis, pulmonary subvalvular stenosis, restrictive cardiomyopathy, Chagas cardiomyopathy, endocardial fibroelastosis, endomyocardial fibrosis, Keams Syndrome, myocardial reperfusion injury, and myocarditis.

[0014] Myocardial ischemias include, but are not limited to, coronary disease, such as angina pectoris, coronary aneurysm, coronary arteriosclerosis, coronary thrombosis, coronary vasospasm, myocardial infarction and myocardial stunning.

[0015] Cardiovascular diseases also include vascular diseases such as aneurysms, angiodysplasia, angiomatosis, bacillary angiomatosis, Hippel-Lindau Disease, Klippel-Trenaunay-Weber Syndrome, Sturge-Weber Syndrome, angioneurotic edema, aortic diseases, Takayasu's Arteritis, aortitis, Leriche's Syndrome, arterial occlusive diseases, arteritis, enarteritis, polyarteritis nodosa, cerebrovascular disorders, diabetic angiopathies, diabetic retinopathy, embolisms, thrombosis, erythromelalgia, hemorrhoids, hepatic veno-occlusive disease, hypertension, hypotension, ischemia, peripheral vascular diseases, phlebitis, pulmonary veno-occlusive disease, Raynaud's disease, CREST syndrome, retinal vein occlusion, Scimitar syndrome, superior vena cava syndrome, telangiectasia, atacia telangiectasia, hereditary hemorrhagic telangiectasia, varicocele, varicose veins, varicose ulcer, vasculitis, and venous insufficiency.

[0016] Aneurysms include, but are not limited to, dissecting aneurysms, false aneurysms, infected aneurysms, ruptured aneurysms, aortic aneurysms, cerebral aneurysms, coronary aneurysms, heart aneurysms, and iliac aneurysms.

[0017] Arterial occlusive diseases include, but are not limited to, arteriosclerosis, intermittent claudication, carotid stenosis, fibromuscular dysplasias, mesenteric vascular occlusion, Moyamoya disease, renal artery obstruction, retinal artery occlusion, and thromboangiitis obliterans.

[0018] Cerebrovascular disorders include, but are not limited to, carotid artery diseases, cerebral amyloid angiopathy, cerebral aneurysm, cerebral anoxia, cerebral arteriosclerosis, cerebral arteriovenous malformation, cerebral artery diseases, cerebral embolism and thrombosis, carotid artery thrombosis, sinus thrombosis, Wallenberg's syndrome, cerebral hemorrhage, epidural hematoma, subdural hematoma, subaraxhnoid hemorrhage, cerebral infarction, cerebral ischemia (including transient), subclavian steal syndrome, periventricular leukomalacia, vascular headache, cluster headache, migraine, and vertebrobasilar insufficiency.

[0019] Embolisms include, but are not limited to, air embolisms, amniotic fluid embolisms, cholesterol embolisms, blue toe syndrome, fat embolisms, pulmonary embolisms, and thromoboembolisms. Thrombosis include, but are not limited to, coronary thrombosis, hepatic vein thrombosis, retinal vein occlusion, carotid artery thrombosis, sinus thrombosis, Wallenberg's syndrome, and thrombophlebitis.

[0020] Ischemic disorders include, but are not limited to, cerebral ischemia, ischemic colitis, compartment syndromes, anterior compartment syndrome, myocardial ischemia, reperfusion injuries, and peripheral limb ischemia. Vasculitis includes, but is not limited to, aortitis, arteritis, Behcet's Syndrome, Churg-Strauss Syndrome, mucocutaneous lymph node syndrome, thromboangiitis obliterans, hypersensitivity vasculitis, Schoenlein-Henoch purpura, allergic cutaneous vasculitis, and Wegener's granulomatosis.

### SUMMARY OF THE INVENTION

[0021] The present invention encompasses human secreted proteins/polypeptides; and isolated nucleic acid molecules encoding said proteins/polypeptides, useful for detecting, preventing, diagnosing, prognosticating, treating, and/or ameliorating cardiovascular diseases and disorders. Antibodies that bind these polypeptides are also encompassed by the present invention; as are vectors, host cells, and recombinant and synthetic methods for producing said polynucleotides, polypeptides, and/or antibodies. The invention further encompasses screening methods for identifying agonists and antagonists of polynucleotides and polypeptides of the invention. The present invention also encompasses methods and compositions for inhibiting or enhancing the production and function of the polypeptides of the present invention.

### DETAILED DESCRIPTION

Polynucleotides and Polypeptides of the Invention

Description of Table 1A

[0022] Table 1A summarizes information concerning certain polynucleotides and polypeptides of the invention. The first column provides the gene number in the application for each clone identifier. The second column provides a unique clone identifier, “Clone ID:”, for a cDNA clone related to each contig sequence disclosed in Table 1A. Third column, the cDNA Clones identified in the second column were deposited as indicated in the third column (i.e. by ATCC Deposit No:Z and deposit date). Some of the deposits contain multiple different clones corresponding to the same gene. In the fourth column, “Vector” refers to the type of vector contained in the corresponding cDNA Clone identified in the second column. In the fifth column, the nucleotide sequence identified as “NT SEQ ID NO:X” was assembled from partially homologous (“overlapping”) sequences obtained from the corresponding cDNA clone identified in the second column and, in some cases, from additional related cDNA clones. The overlapping sequences were assembled into a single contiguous sequence of high redundancy (usually three to five overlapping sequences at each nucleotide position), resulting in a final sequence identified as SEQ ID NO:X. In the sixth column, “Total NT Seq.” refers to the total number of nucleotides in the contig sequence identified as SEQ ID NO:X.” The deposited clone may contain all or most of these sequences, reflected by the nucleotide position indicated as “5′ NT of Clone Seq.” (seventh column) and the “3′ NT of Clone Seq.” (eighth column) of SEQ ID NO:X. In the ninth column, the nucleotide position of SEQ ID NO:X of the putative start codon (methionine) is identified as “5′ NT of Start Codon.” Similarly, in column ten, the nucleotide position of SEQ ID NO:X of the predicted signal sequence is identified as “5′ NT of First AA of Signal Pep.” In the eleventh column, the translated amino acid sequence, beginning with the methionine, is identified as “AA SEQ ID NO:Y,” although other reading frames can also be routinely translated using known molecular biology techniques. The polypeptides produced by these alternative open reading frames are specifically contemplated by the present invention.

[0023] In the twelfth and thirteenth columns of Table 1A, the first and last amino acid position of SEQ ID NO:Y of the predicted signal peptide is identified as “First AA of Sig Pep” and “Last AA of Sig Pep.” In the fourteenth column, the predicted first amino acid position of SEQ ID NO:Y of the secreted portion is identified as “Predicted First AA of Secreted Portion”. The amino acid position of SEQ ID NO:Y of the last amino acid encoded by the open reading frame is identified in the fifteenth column as “Last AA of ORF”.

[0024] SEQ ID NO:X (where X may be any of the polynucleotide sequences disclosed in the sequence listing) and the translated SEQ ID NO:Y (where Y may be any of the polypeptide sequences disclosed in the sequence listing) are sufficiently accurate and otherwise suitable for a variety of uses well known in the art and described further below. For instance, SEQ ID NO:X is useful for designing nucleic acid hybridization probes that will detect nucleic acid sequences contained in SEQ ID NO:X or the cDNA contained in the deposited clone. These probes will also hybridize to nucleic acid molecules in biological samples, thereby enabling a variety of forensic and diagnostic methods of the invention. Similarly, polypeptides identified from SEQ ID NO:Y may be used, for example, to generate antibodies which bind specifically to proteins containing the polypeptides and the secreted proteins encoded by the cDNA clones identified in Table 1A and/or elsewhere herein

[0025] Nevertheless, DNA sequences generated by sequencing reactions can contain sequencing errors. The errors exist as misidentified nucleotides, or as insertions or deletions of nucleotides in the generated DNA sequence. The erroneously inserted or deleted nucleotides cause frame shifts in the reading frames of the predicted amino acid sequence. In these cases, the predicted amino acid sequence diverges from the actual amino acid sequence, even though the generated DNA sequence may be greater than 99.9% identical to the actual DNA sequence (for example, one base insertion or deletion in an open reading frame of over 1000 bases).

[0026] Accordingly, for those applications requiring precision in the nucleotide sequence or the amino acid sequence, the present invention provides not only the generated nucleotide sequence identified as SEQ ID NO:X, and the predicted translated amino acid sequence identified as SEQ ID NO:Y, but also a sample of plasmid DNA containing a human cDNA of the invention deposited with the ATCC, as set forth in Table 1A. The nucleotide sequence of each deposited plasmid can readily be determined by sequencing the deposited plasmid in accordance with known methods

[0027] The predicted amino acid sequence can then be verified from such deposits. Moreover, the amino acid sequence of the protein encoded by a particular plasmid can also be directly determined by peptide sequencing or by expressing the protein in a suitable host cell containing the deposited human cDNA, collecting the protein, and determining its sequence.

[0028] Also provided in Table 1A is the name of the vector which contains the cDNA plasmid. Each vector is routinely used in the art. The following additional information is provided for convenience.

[0029] Vectors Lambda Zap (U.S. Pat. Nos. 5,128,256 and 5,286,636), Uni-Zap XR (U.S. Pat. Nos. 5,128,256 and 5,286,636), Zap Express (U.S. Pat. Nos. 5,128,256 and 5,286,636), pBluescript (pBS) (Short, J. M. et al., Nucleic Acids Res. 16:7583-7600 (1988); Alting-Mees, M. A. and Short, J. M., Nucleic Acids Res. 17:9494 (1989)) and pBK (Alting-Mees, M. A. et al., Strategies 5:58-61 (1992)) are commercially available from Stratagene Cloning Systems, Inc., 11011 N. Torrey Pines Road, La Jolla, Calif., 92037. pBS contains an ampicillin resistance gene and pBK contains a neomycin resistance gene. Phagemid pBS may be excised from the Lambda Zap and Uni-Zap XR vectors, and phagemid pBK may be excised from the Zap Express vector. Both phagemids may be transformed into E. coli strain XL-1 Blue, also available from Stratagene

[0030] Vectors pSport1, pCMVSport 1.0, pCMVSport 2.0 and pCMVSport 3.0, were obtained from Life Technologies, Inc., P.O. Box 6009, Gaithersburg, Md. 20897. All Sport vectors contain an ampicillin resistance gene and may be transformed into E. coli strain DH10B, also available from Life Technologies. See, for instance, Gruber, C. E., et al., Focus 15:59 (1993). Vector lafmid BA (Bento Soares, Columbia University, New York, N.Y.) contains an ampicillin resistance gene and can be transformed into E. coli strain XL-1 Blue. Vector pCR@2.1, which is available from Invitrogen, 1600 Faraday Avenue, Carlsbad, Calif. 92008, contains an ampicillin resistance gene and may be transformed into E. coli strain DH10B, available from Life Technologies. See, for instance, Clark, J. M., Nuc. Acids Res. 16:9677-9686 (1988) and Mead, D. et al., Bio/Technology 9: (1991).

[0031] The present invention also relates to the genes corresponding to SEQ ID NO:X, SEQ ID NO:Y, and/or a deposited cDNA (cDNA Clone ID). The corresponding gene can be isolated in accordance with known methods using the sequence information disclosed herein. Such methods include, but are not limited to, preparing probes or primers from the disclosed sequence and identifying or amplifying the corresponding gene from appropriate sources of genomic material.

[0032] Also provided in the present invention are allelic variants, orthologs, and/or species homologs. Procedures known in the art can be used to obtain full-length genes, allelic variants, splice variants, full-length coding portions, orthologs, and/or species homologs of genes corresponding to SEQ ID NO:X and SEQ ID NO:Y using information from the sequences disclosed herein or the clones deposited with the ATCC. For example, allelic variants and/or species homologs may be isolated and identified by making suitable probes or primers from the sequences provided herein and screening a suitable nucleic acid source for allelic variants and/or the desired homologue.

[0033] The present invention provides a polynucleotide comprising, or alternatively consisting of, the nucleic acid sequence of SEQ ID NO:X and/or a cDNA contained in ATCC Deposit No.Z. The present invention also provides a polypeptide comprising, or alternatively, consisting of, the polypeptide sequence of SEQ ID NO:Y, a polypeptide encoded by SEQ ID NO:X, and/or a polypeptide encoded by a cDNA contained in ATCC deposit No.Z. Polynucleotides encoding a polypeptide comprising, or alternatively consisting of the polypeptide sequence of SEQ ID NO:Y, a polypeptide encoded by SEQ ID NO:X and/or a polypeptide encoded by the cDNA contained in ATCC Deposit No.Z, are also encompassed by the invention. The present invention further encompasses a polynucleotide comprising, or alternatively consisting of the complement of the nucleic acid sequence of SEQ ID NO:X, and/or the complement of the coding strand of the cDNA contained in ATCC Deposit No.Z.

Description of Table 1B (Comprised of Tables 1B.1 and 1B.2)

[0034] Table 1B.1 and Table 1B.2 summarize some of the polynucleotides encompassed by the invention (including cDNA clones related to the sequences (Clone ID:), contig sequences (contig identifier (Contig ID:) and contig nucleotide sequence identifiers (SEQ ID NO:X)) and further summarizes certain characteristics of these polynucleotides and the polypeptides encoded thereby. The first column of Tables 1B.1 and 1B.2 provide the gene numbers in the application for each clone identifier. The second column of Tables 1B.1 and 1B.2 provide unique clone identifiers, “Clone ID:”, for cDNA clones related to each contig sequence disclosed in Table 1A and/or Table 1B. The third column of Tables 1B.1 and 1B.2 provide unique contig identifiers, “Contig ID:” for each of the contig sequences disclosed in these tables. The fourth column of Tables 1B.1 and 1B.2 provide the sequence identifiers, “SEQ ID NO:X”, for each of the contig sequences disclosed in Table 1A and/or 1B.

[0035] Table 1B.1

[0036] The fifth column of Table 1B.1, “ORF (From-To)”, provides the location (i.e., nucleotide position numbers) within the polynucleotide sequence of SEQ ID NO:X that delineates the preferred open reading frame (ORF) that encodes the amino acid sequence shown in the sequence listing and referenced in Table 1B.1 as SEQ ID NO:Y (column 6). Column 7 of Table 1B.1 lists residues comprising predicted epitopes contained in the polypeptides encoded by each of the preferred ORFs (SEQ ID NO:Y). Identification of potential immunogenic regions was performed according to the method of Jameson and Wolf (CABIOS, 4; 181-186 (1988)); specifically, the Genetics Computer Group (GCG) implementation of this algorithm, embodied in the program PEPTIDESTRUCTURE (Wisconsin Package v10.0, Genetics Computer Group (GCG), Madison, Wis.). This method returns a measure of the probability that a given residue is found on the surface of the protein. Regions where the antigenic index score is greater than 0.9 over at least 6 amino acids are indicated in Table 1B.1 as “Predicted Epitopes”. In particular embodiments, polypeptides of the invention comprise, or alternatively consist of, one, two, three, four, five or more of the predicted epitopes described in Table 1B.1. It will be appreciated that depending on the analytical criteria used to predict antigenic determinants, the exact address of the determinant may vary slightly. Column 8 of Table 1B.1 (“Cytologic Band”) provides the chromosomal location of polynucleotides corresponding to SEQ ID NO:X. Chromosomal location was determined by finding exact matches to EST and cDNA sequences contained in the NCBI (National Center for Biotechnology Information) UniGene database. Given a presumptive chromosomal location, disease locus association was determined by comparison with the Morbid Map, derived from Online Mendelian Inheritance in Man (Online Mendelian Inheritance in Man, OMIM™. McKusick-Nathans Institute for Genetic Medicine, Johns Hopkins University (Baltimore, Md.) and National Center for Biotechnology Information, National Library of Medicine (Bethesda, Md.) 2000. World Wide Web URL: http://www.ncbi.nlm.nih.gov/omim/). If the putative chromosomal location of the Query overlaps with the chromosomal location of a Morbid Map entry, an OMIM identification number is disclosed in Table 1B.1, column 9 labeled “OMIM Disease Reference(s)”. A key to the OMIM reference identification numbers is provided in Table 5.

[0037] Table 1B.2

[0038] Column 5 of Table 1B.2, “Tissue Distribution” shows the expression profile of tissue, cells, and/or cell line libraries which express the polynucleotides of the invention. The first code number shown in Table 1B.2 column 5 (preceding the colon), represents the tissue/cell source identifier code corresponding to the key provided in Table 4. Expression of these polynucleotides was not observed in the other tissues and/or cell libraries tested. The second number in column 5 (following the colon), represents the number of times a sequence corresponding to the reference polynucleotide sequence (e.g., SEQ ID NO:X) was identified in the corresponding tissue/cell source. Those tissue/cell source identifier codes in which the first two letters are “AR” designate information generated using DNA array technology. Utilizing this technology, cDNAs were amplified by PCR and then transferred, in duplicate, onto the array. Gene expression was assayed through hybridization of first strand cDNA probes to the DNA array. cDNA probes were generated from total RNA extracted from a variety of different tissues and cell lines. Probe synthesis was performed in the presence of ³³P dCTP, using oligo(dT) to prime reverse transcription. After hybridization, high stringency washing conditions were employed to remove non-specific hybrids from the array. The remaining signal, emanating from each gene target, was measured using a Phosphorimager. Gene expression was reported as Phosphor Stimulating Luminescence (PSL) which reflects the level of phosphor signal generated from the probe hybridized to each of the gene targets represented on the array. A local background signal subtraction was performed before the total signal generated from each array was used to normalize gene expression between the different hybridizations. The value presented after “[array code]:” represents the mean of the duplicate values, following background subtraction and probe normalization. One of skill in the art could routinely use this information to identify normal and/or diseased tissue(s) which show a predominant expression pattern of the corresponding polynucleotide of the invention or to identify polynucleotides which show predominant and/or specific tissue and/or cell expression.

Description of Table 1C

[0039] Table 1C summarizes additional polynucleotides encompassed by the invention (including cDNA clones related to the sequences (Clone ID:), contig sequences (contig identifier (Contig ID:) contig nucleotide sequence identifiers (SEQ ID NO:X)), and genomic sequences (SEQ ID NO:B). The first column provides a unique clone identifier, “Clone ID:”, for a cDNA clone related to each contig sequence. The second column provides the sequence identifier, “SEQ ID NO:X”, for each contig sequence. The third column provides a unique contig identifier, “Contig ID:” for each contig sequence. The fourth column, provides a BAC identifier “BAC ID NO:A” for the BAC clone referenced in the corresponding row of the table. The fifth column provides the nucleotide sequence identifier, “SEQ ID NO:B” for a fragment of the BAC clone identified in column four of the corresponding row of the table. The sixth column, “Exon From-To”, provides the location (i.e., nucleotide position numbers) within the polynucleotide sequence of SEQ ID NO:B which delineate certain polynucleotides of the invention that are also exemplary members of polynucleotide sequences that encode polypeptides of the invention (e.g., polypeptides containing amino acid sequences encoded by the polynucleotide sequences delineated in column six, and fragments and variants thereof).

Description of Table 1D

[0040] Table 1D: In preferred embodiments, the present invention encompasses a method of detecting, preventing, diagnosing, prognosticating, treating, and/or ameliorating cardiovascular diseases or disorders; comprising administering to a patient in which such treatment, prevention, or amelioration is desired a protein, nucleic acid, or antibody of the invention (or fragment or variant thereof) represented by Table 1A, Table 1B, and Table 1C, in an amount effective to detect, prevent, diagnose, prognosticate, treat, and/or ameliorate the disease or disorder.

[0041] As indicated in Table 1D, the polynucleotides, polypeptides, agonists, or antagonists of the present invention (including antibodies) can be used in assays to test for one or more biological activities. If these polynucleotides and polypeptides do exhibit activity in a particular assay, it is likely that these molecules may be involved in the diseases associated with the biological activity. Thus, the polynucleotides or polypeptides, or agonists or antagonists thereof (including antibodies) could be used to treat the associated disease.

[0042] Table 1D provides information related to biological activities for polynucleotides and polypeptides of the invention (including antibodies, agonists, and/or antagonists thereof). Table 1D also provides information related to assays which may be used to test polynucleotides and polypeptides of the invention (including antibodies, agonists, and/or antagonists thereof) for the corresponding biological activities. The first column (“Gene No.”) provides the gene number in the application for each clone identifier. The second column (“cDNA Clone ID:”) provides the unique clone identifier for each clone as previously described and indicated in Tables 1A, 1B, and 1C. The third column (“AA SEQ ID NO:Y”) indicates the Sequence Listing SEQ ID Number for polypeptide sequences encoded by the corresponding cDNA clones (also as indicated in Tables 1A, 1B, and 2). The fourth column (“Biological Activity”) indicates a biological activity corresponding to the indicated polypeptides (or polynucleotides encoding said polypeptides). The fifth column (“Exemplary Activity Assay”) further describes the corresponding biological activity and provides information pertaining to the various types of assays which may be performed to test, demonstrate, or quantify the corresponding biological activity. Table 1D describes the use of FMAT technology, inter alia, for testing or demonstrating various biological activities. Fluorometric microvolume assay technology (FMAT) is a fluorescence-based system which provides a means to perform nonradioactive cell- and bead-based assays to detect activation of cell signal transduction pathways. This technology was designed specifically for ligand binding and immunological assays. Using this technology, fluorescent cells or beads at the bottom of the well are detected as localized areas of concentrated fluorescence using a data processing system. Unbound flurophore comprising the background signal is ignored, allowing for a wide variety of homogeneous assays. FMAT technology may be used for peptide ligand binding assays, immunofluorescence, apoptosis, cytotoxicity, and bead-based immunocapture assays. See, Miraglia S et. al., “Homogeneous cell and bead based assays for highthroughput screening using flourometric microvolume assay technology,” Journal of Biomolecular Screening; 4:193-204 (1999). In particular, FMAT technology may be used to test, confirm, and/or identify the ability of polypeptides (including polypeptide fragments and variants) to activate signal transduction pathways. For example, FMAT technology may be used to test, confirm, and/or identify the ability of polypeptides to upregulate production of immunomodulatory proteins (such as, for example, interleukins, GM-CSF, Rantes, and Tumor Necrosis factors, as well as other cellular regulators (e.g. insulin)).

[0043] Table 1D also describes the use of kinase assays for testing, demonstrating, or quantifying biological activity. In this regard, the phosphorylation and de-phosphorylation of specific amino acid residues (e.g. Tyrosine, Serine, Threonine) on cell-signal transduction proteins provides a fast, reversible means for activation and de-activation of cellular signal transduction pathways. Moreover, cell signal transduction via phosphorylation/de-phosphorylation is crucial to the regulation of a wide variety of cellular processes (e.g. proliferation, differentiation, migration, apoptosis, etc.). Accordingly, kinase assays provide a powerful tool useful for testing, confirming, and/or identifying polypeptides (including polypeptide fragments and variants) that mediate cell signal transduction events via protein phosphorylation. See e.g., Forrer, P., Tamaskovic R., and Jaussi, R. “Enzyme-Linked Immunosorbent Assay for Measurement of JNK, ERK, and p38 Kinase Activities” Biol. Chem. 379(8-9): 1101-1110 (1998).

Description of Table 1E

[0044] Table 1E: Polynucleotides encoding polypeptides of the present invention can be used in assays to test for one or more biological activities. One such biological activity which may be tested includes the ability of polynucleotides and polypeptides of the invention to stimulate up-regulation or down-regulation of expression of particular genes and proteins. Hence, if polynucleotides and polypeptides of the present invention exhibit activity in altering particular gene and protein expression patterns, it is likely that these polynucleotides and polypeptides of the present invention may be involved in, or capable of effecting changes in, diseases associated with the altered gene and protein expression profiles. Hence, polynucleotides, polypeptides, or antibodies of the present invention could be used to treat said associated diseases.

[0045] TaqMan® assays may be performed to assess the ability of polynucleotides (and polypeptides they encode) to alter the expression pattern of particular “target” genes. TaqMan® reactions are performed to evaluate the ability of a test agent to induce or repress expression of specific genes in different cell types. TaqMan® gene expression quantification assays (“TaqMan® assays”) are well known to, and routinely performed by, those of ordinary skill in the art. TaqMan® assays are performed in a two step reverse transcription/polymerase chain reaction (RT-PCR). In the first (RT) step, cDNA is reverse transcribed from total RNA samples using random hexamer primers. In the second (PCR) step, PCR products are synthesized from the cDNA using gene specific primers.

[0046] To quantify gene expression the Taqman® PCR reaction exploits the 5′ nuclease activity of AmpliTaq Golds DNA Polymerase to cleave a Taqman® probe (distinct from the primers) during PCR. The Taqman® probe contains a reporter dye at the 5′-end of the probe and a quencher dye at the 3′ end of the probe. When the probe is intact, the proximity of the reporter dye to the quencher dye results in suppression of the reporter fluorescence. During PCR, if the target of interest is present, the probe specifically anneals between the forward and reverse primer sites. AmpliTaq Fold DNA Polymerase then cleaves the probe between the reporter and quencher when the probe hybridizes to the target, resulting in increased fluorescence of the reporter (see FIG. 2). Accumulation of PCR products is detected directly by monitoring the increase in fluorescence of the reporter dye.

[0047] After the probe fragments are displaced from the target, polymerization of the strand continues. The 3′-end of the probe is blocked to prevent extension of the probe during PCR. This process occurs in every cycle and does not interfere with the exponential accumulation of product. The increase in fluorescence signal is detected only if the target sequence is complementary to the probe and is amplified during PCR. Because of these requirements, any nonspecific amplification is not detected.

[0048] For test sample preparation, vector controls or constructs containing the coding sequence for the gene of interest are transfected into cells, such as for example 293T cells, and supernatants collected after 48 hours. For cell treatment and RNA isolation, multiple primary human cells or human cell lines are used; such cells may include but are not limited to, Normal Human Dermal Fibroblasts, Aortic Smooth Muscle, Human Umbilical Vein Endothelial Cells, HepG2, Daudi, Jurkat, U937, Caco, and THP-1 cell lines. Cells are plated in growth media and growth is arrested by culturing without media change for 3 days, or by switching cells to low serum media and incubating overnight. Cells are treated for 1, 6, or 24 hours with either vector control supernatant or sample supernatant (or purified/partially purified protein preparations in buffer). Total RNA is isolated; for example, by using Trizol extraction or by using the Ambion RNAqueous(TM)₄PCR RNA isolation system. Expression levels of multiple genes are analyzed using TAQMAN, and expression in the test sample is compared to control vector samples to identify genes induced or repressed. Each of the above described techniques are well known to, and routinely performed by, those of ordinary skill in the art.

[0049] Table 1E indicates particular disease classes and preferred indications for which polynucleotides, polypeptides, or antibodies of the present invention may be used in detecting, diagnosing, preventing, treating and/or ameliorating said diseases and disorders based on “target” gene expression patterns which may be up- or down-regulated by polynucleotides (and the encoded polypeptides) corresponding to each indicated cDNA Clone ID (shown in Table 1E, Column 2).

[0050] Thus, in preferred embodiments, the present invention encompasses a method of detecting, diagnosing, preventing, treating, and/or ameliorating a disease or disorder listed in the “Disease Class” and/or “Preferred Indication” columns of Table 1E; comprising administering to a patient in which such detection, diagnosis, prevention, or treatment is desired a protein, nucleic acid, or antibody of the invention (or fragment or variant thereof) in an amount effective to detect, diagnose, prevent, treat, or ameliorate the disease or disorder. The first and second columns of Table 1D show the “Gene No.” and “cDNA Clone ID No.”, respectively, indicating certain nucleic acids and proteins (or antibodies against the same) of the invention (including polynucleotide, polypeptide, and antibody fragments or variants thereof) that may be used in detecting, diagnosing, preventing, treating, or ameliorating the disease(s) or disorder(s) indicated in the corresponding row in the “Disease Class” or “Preferred Indication” Columns of Table 1E.

[0051] In another embodiment, the present invention also encompasses methods of detecting, diagnosing, preventing, treating, or ameliorating a disease or disorder listed in the “Disease Class” or “Preferred Indication” Columns of Table 1E; comprising administering to a patient combinations of the proteins, nucleic acids, or antibodies of the invention (or fragments or variants thereof), sharing similar indications as shown in the corresponding rows in the “Disease Class” or “Preferred Indication” Columns of Table 1E.

[0052] The “Disease Class” Column of Table 1E provides a categorized descriptive heading for diseases, disorders, and/or conditions (more fully described below) that may be detected, diagnosed, prevented, treated, or ameliorated by a protein, nucleic acid, or antibody of the invention (or fragment or variant thereof).

[0053] The “Preferred Indication” Column of Table 1E describes diseases, disorders, and/or conditions that may be detected, diagnosed, prevented, treated, or ameliorated by a protein, nucleic acid, or antibody of the invention (or fragment or variant thereof).

[0054] The “Cell Line” and “Exemplary Targets” Columns of Table 1E indicate particular cell lines and target genes, respectively, which may show altered gene expression patterns (i.e., up- or down-regulation of the indicated target gene) in Taqman assays, performed as described above, utilizing polynucleotides of the cDNA Clone ID shown in the corresponding row. Alteration of expression patterns of the indicated “Exemplary Target” genes is correlated with a particular “Disease Class” and/or “Preferred Indication” as shown in the corresponding row under the respective column headings.

[0055] The “Exemplary Accessions” Column indicates GenBank Accessions (available online through the National Center for Biotechnology Information (NCBI) at http://www.ncbi.nlm.nih.gov/) which correspond to the “Exemplary Targets” shown in the adjacent row.

[0056] The recitation of “Cancer” in the “Disease Class” Column indicates that the corresponding nucleic acid and protein, or antibody against the same, of the invention (or fragment or variant thereof) may be used for example, to detect, diagnose, prevent, treat, and/or ameliorate neoplastic diseases and/or disorders (e.g., leukemias, cancers, etc., as described below under “Hyperproliferative Disorders”).

[0057] The recitation of “Immune” in the “Disease Class” column indicates that the corresponding nucleic acid and protein, or antibody against the same, of the invention (or fragment or variant thereof), may be used for example, to detect, diagnose, prevent, treat, and/or ameliorate diseases and/or disorders relating to neoplastic diseases (e.g., as described below under “Hyperproliferative Disorders”), blood disorders (e.g., as described below under “Immune Activity” “Cardiovascular Disorders” and/or “Blood-Related Disorders”), and infections (e.g., as described below under “Infectious Disease”).

[0058] The recitation of “Angiogenesis” in the “Disease Class” column indicates that the corresponding nucleic acid and protein, or antibody against the same, of the invention (or fragment or variant thereof), may be used for example, to detect, diagnose, treat, prevent, and/or ameliorate diseases and/or disorders relating to neoplastic diseases (e.g., as described below under “Hyperproliferative Disorders”), diseases and/or disorders of the cardiovascular system (e.g., as described below under “Cardiovascular Disorders”), diseases and/or disorders involving cellular and genetic abnormalities (e.g., as described below under “Diseases at the Cellular Level”), diseases and/or disorders involving angiogenesis (e.g., as described below under “Anti-Angiogenesis Activity”), to promote or inhibit cell or tissue regeneration (e.g., as described below under “Regeneration”), or to promote wound healing (e.g., as described below under “Wound Healing and Epithelial Cell Proliferation”).

[0059] The recitation of “Diabetes” in the “Disease Class” column indicates that the corresponding nucleic acid and protein, or antibody against the same, of the invention (or fragment or variant thereof), may be used for example, to detect, diagnose, treat, prevent, and/or ameliorate diabetes (including diabetes mellitus types I and II), as well as diseases and/or disorders associated with, or consequential to, diabetes (e.g. as described below under “Endocrine Disorders,” “Renal Disorders,” and “Gastrointestinal Disorders”).

Description of Table 2

[0060] Table 2 summarizes homology and features of some of the polypeptides of the invention. The first column provides a unique clone identifier, “Clone ID:”, corresponding to a cDNA clone disclosed in Table 1A or Table 1B. The second column provides the unique contig identifier, “Contig ID:” corresponding to contigs in Table 1B and allowing for correlation with the information in Table 1B. The third column provides the sequence identifier, “SEQ ID NO:X”, for the contig polynucleotide sequence. The fourth column provides the analysis method by which the homology/identity disclosed in the Table was determined. Comparisons were made between polypeptides encoded by the polynucleotides of the invention and either a non-redundant protein database (herein referred to as “NR”), or a database of protein families (herein referred to as “PFAM”) as further described below. The fifth column provides a description of the PFAM/NR hit having a significant match to a polypeptide of the invention. Column six provides the accession number of the PFAM/NR hit disclosed in the fifth column. Column seven, “Score/Percent Identity”, provides a quality score or the percent identity, of the hit disclosed in columns five and six. Columns 8 and 9, “NT From” and “NT To” respectively, delineate the polynucleotides in “SEQ ID NO:X” that encode a polypeptide having a significant match to the PFAM/NR database as disclosed in the fifth and sixth columns. In specific embodiments polypeptides of the invention comprise, or alternatively consist of, an amino acid sequence encoded by a polynucleotide in SEQ ID NO:X as delineated in columns 8 and 9, or fragments or variants thereof.

Description of Table 3

[0061] Table 3 provides polynucleotide sequences that may be disclaimed according to certain embodiments of the invention. The first column provides a unique clone identifier, “Clone ID”, for a cDNA clone related to contig sequences disclosed in Table 1B. The second column provides the sequence identifier, “SEQ ID NO:X”, for contig sequences disclosed in Table 1A and/or Table 1B. The third column provides the unique contig identifier, “Contig ID:”, for contigs disclosed in Table 1B. The fourth column provides a unique integer ‘a’ where ‘a’ is any integer between 1 and the final nucleotide minus 15 of SEQ ID NO:X, and the fifth column provides a unique integer ‘b’ where ‘b’ is any integer between 15 and the final nucleotide of SEQ ID NO:X, where both a and b correspond to the positions of nucleotide residues shown in SEQ ID NO:X, and where b is greater than or equal to a +14. For each of the polynucleotides shown as SEQ ID NO:X, the uniquely defined integers can be substituted into the general formula of a-b, and used to describe polynucleotides which may be preferably excluded from the invention. In certain embodiments, preferably excluded from the invention are at least one, two, three, four, five, ten, or more of the polynucleotide sequence(s) having the accession number(s) disclosed in the sixth column of this Table (including for example, published sequence in connection with a particular BAC clone). In further embodiments, preferably excluded from the invention are the specific polynucleotide sequence(s) contained in the clones corresponding to at least one, two, three, four, five, ten, or more of the available material having the accession numbers identified in the sixth column of this Table (including for example, the actual sequence contained in an identified BAC clone).

Description of Table 4

[0062] Table 4 provides a key to the tissue/cell source identifier code disclosed in Table 1B.2, column 5. Column 1 provides the tissue/cell source identifier code disclosed in Table 1B.2, Column 5. Columns 2-5 provide a description of the tissue or cell source. Note that “Description” and “Tissue” sources (i.e. columns 2 and 3) having the prefix “a_” indicates organs, tissues, or cells derived from “adult” sources. Codes corresponding to diseased tissues are indicated in column 6 with the word “disease.” The use of the word “disease” in column 6 is non-limiting. The tissue or cell source may be specific (e.g. a neoplasm), or may be disease-associated (e.g., a tissue sample from a normal portion of a diseased organ). Furthermore, tissues and/or cells lacking the “disease” designation may still be derived from sources directly or indirectly involved in a disease state or disorder, and therefore may have a further utility in that disease state or disorder. In numerous cases where the tissue/cell source is a library, column 7 identifies the vector used to generate the library.

Description of Table 5

[0063] Table 5 provides a key to the OMIM reference identification numbers disclosed in Table 1B.1. OMIM reference identification numbers (Column 1) were derived from Online Mendelian Inheritance in Man (Online Mendelian Inheritance in Man, OMIM. McKusick-Nathans Institute for Genetic Medicine, Johns Hopkins University (Baltimore, Md.) and National Center for Biotechnology Information, National Library of Medicine, (Bethesda, Md.) 2000. World Wide Web URL: http://www.ncbi.nlm.nih.gov/omim/). Column 2 provides diseases associated with the cytologic band disclosed in Table 1B. 1, as determined using the Morbid Map database.

Description of Table 6

[0064] Table 6 summarizes some of the ATCC Deposits, Deposit dates, and ATCC designation numbers of deposits made with the ATCC in connection with the present application. These deposits were made in addition to those described in the Table 1A.

Description of Table 7

[0065] Table 7 shows the cDNA libraries sequenced, and ATCC designation numbers and vector information relating to these cDNA libraries.

[0066] The first column shows the first four letters indicating the Library from which each library clone was derived. The second column indicates the catalogued tissue description for the corresponding libraries. The third column indicates the vector containing the corresponding clones. The fourth column shows the ATCC deposit designation for each library clone as indicated by the deposit information in Table 6.

Definitions

[0067] The following definitions are provided to facilitate understanding of certain terms used throughout this specification.

[0068] In the present invention, “isolated” refers to material removed from its original environment (e.g., the natural environment if it is naturally occurring), and thus is altered “by the hand of man” from its natural state. For example, an isolated polynucleotide could be part of a vector or a composition of matter, or could be contained within a cell, and still be “isolated” because that vector, composition of matter, or particular cell is not the original environment of the polynucleotide. The term “isolated” does not refer to genomic or cDNA libraries, whole cell total or mRNA preparations, genomic DNA preparations (including those separated by electrophoresis and transferred onto blots), sheared whole cell genomic DNA preparations or other compositions where the art demonstrates no distinguishing features of the polynucleotide/sequences of the present invention.

[0069] In the present invention, a “secreted” protein refers to those proteins capable of being directed to the ER, secretory vesicles, or the extracellular space as a result of a signal sequence, as well as those proteins released into the extracellular space without necessarily containing a signal sequence. If the secreted protein is released into the extracellular space, the secreted protein can undergo extracellular processing to produce a “mature” protein. Release into the extracellular space can occur by many mechanisms, including exocytosis and proteolytic cleavage.

[0070] As used herein, a “polynucleotide” refers to a molecule having a nucleic acid sequence encoding SEQ ID NO:Y or a fragment or variant thereof (e.g., the polypeptide delinated in columns fourteen and fifteen of Table 1A); a nucleic acid sequence contained in SEQ ID NO:X (as described in column 5 of Table 1A and/or Table 1B) or the complement thereof; a cDNA sequence contained in Clone ID: (as described in column 2 of Table 1A and/or Table 1B and contained within a library deposited with the ATCC); a nucleotide sequence encoding the polypeptide encoded by a nucleotide sequence in SEQ ID NO:B as defined in column 6 (EXON From-To) of Table 1C or a fragment or variant thereof; or a nucleotide coding sequence in SEQ ID NO:B as defined in column 6 of Table 1C or the complement thereof. For example, the polynucleotide can contain the nucleotide sequence of the full length cDNA sequence, including the 5′ and 3′ untranslated sequences, the coding region, as well as fragments, epitopes, domains, and variants of the nucleic acid sequence. Moreover, as used herein, a “polypeptide” refers to a molecule having an amino acid sequence encoded by a pblynucleotide of the invention as broadly defined (obviously excluding poly-Phenylalanine or poly-Lysine peptide sequences which result from translation of a polyA tail of a sequence corresponding to a cDNA).

[0071] In the present invention, “SEQ ID NO:X” was often generated by overlapping sequences contained in multiple clones (contig analysis). A representative clone containing all or most of the sequence for SEQ ID NO:X is deposited at Human Genome Sciences, Inc. (HGS) in a catalogued and archived library. As shown, for example, in Table 1B, each clone is identified by a cDNA Clone ID (identifier generally referred to herein as Clone ID:). Each Clone ID is unique to an individual clone and the Clone ID is all the information needed to retrieve a given clone from the HGS library. Table 7 provides a list of the deposited cDNA libraries. One can use the Clone ID: to determine the library source by reference to Tables 6 and 7. Table 7 lists the deposited cDNA libraries by name and links each library to an ATCC Deposit. Library names contain four characters, for example, “HTWE.” The name of a cDNA clone (Clone ID) isolated from that library begins with the same four characters, for example “HTWEP07”. As mentioned below, Table 1A and/or Table 1B correlates the Clone ID names with SEQ ID NO:X. Thus, starting with an SEQ ID NO:X, one can use Tables 1A, 1B, 6, 7, and 9 to determine the corresponding Clone ID, which library it came from and which ATCC deposit the library is contained in. Furthermore, it is possible to retrieve a given cDNA clone from the source library by techniques known in the art and described elsewhere herein. The ATCC is located at 10801 University Boulevard, Manassas, Va. 20110-2209, USA. The ATCC deposits were made pursuant to the terms of the Budapest Treaty on the international recognition of the deposit of microorganisms for the purposes of patent procedure.

[0072] In specific embodiments, the polynucleotides of the invention are at least 15, at least 30, at least 50, at least 100, at least 125, at least 500, or at least 1000 continuous nucleotides but are less than or equal to 300 kb, 200 kb, 100 kb, 50 kb, 15 kb, 10 kb, 7.5 kb, 5 kb, 2.5 kb, 2.0 kb, or 1 kb, in length. In a further embodiment, polynucleotides of the invention comprise a portion of the coding sequences, as disclosed herein, but do not comprise all or a portion of any intron. In another embodiment, the polynucleotides comprising coding sequences do not contain coding sequences of a genomic flanking gene (i.e., 5′ or 3′ to the gene of interest in the genome). In other embodiments, the polynucleotides of the invention do not contain the coding sequence of more than 1000, 500, 250, 100, 50, 25, 20, 15, 10, 5, 4, 3, 2, or 1 genomic flanking gene(s).

[0073] A “polynucleotide” of the present invention also includes those polynucleotides capable of hybridizing, under stringent hybridization conditions, to sequences contained in SEQ ID NO:X, or the complement thereof (e.g., the complement of any one, two, three, four, or more of the polynucleotide fragments described herein), the polynucleotide sequence delineated in columns 7 and 8 of Table 1A or the complement thereof, the polynucleotide sequence delineated in columns 8 and 9 of Table 2 or the complement thereof, and/or cDNA sequences contained in Clone ID: (e.g., the complement of any one, two, three, four, or more of the polynucleotide fragments, or the cDNA clone within the pool of cDNA clones deposited with the ATCC, described herein), and/or the polynucleotide sequence delineated in column 6 of Table 1C or the complement thereof. “Stringent hybridization conditions” refers to an overnight incubation at 42 degree C. in a solution comprising 50% formamide, 5×SSC (750 mM NaCl, 75 mM trisodium citrate), 50 mM sodium phosphate (pH 7.6), 5× Denhardt's solution, 10% dextran sulfate, and 20 μg/ml denatured, sheared salmon sperm DNA, followed by washing the filters in 0.1×SSC at about 65 degree C.

[0074] Also contemplated are nucleic acid molecules that hybridize to the polynucleotides of the present invention at lower stringency hybridization conditions. Changes in the stringency of hybridization and signal detection are primarily accomplished through the manipulation of formamide concentration (lower percentages of formamide result in lowered stringency); salt conditions, or temperature. For example, lower stringency conditions include an overnight incubation at 37 degree C. in a solution comprising 6×SSPE (20×SSPE=3M NaCl; 0.2M NaH₂PO₄; 0.02M EDTA, pH 7.4), 0.5% SDS, 30% formamide, 100 ug/ml salmon sperm blocking DNA; followed by washes at 50 degree C. with 1×SSPE, 0.1% SDS. In addition, to achieve even lower stringency, washes performed following stringent hybridization can be done at higher salt concentrations (e.g. 5×SSC).

[0075] Note that variations in the above conditions may be accomplished through the inclusion and/or substitution of alternate blocking reagents used to suppress background in hybridization experiments. Typical blocking reagents include Denhardt's reagent, BLOTTO, heparin, denatured salmon sperm DNA, and commercially available proprietary formulations. The inclusion of specific blocking reagents may require modification of the hybridization conditions described above, due to problems with compatibility.

[0076] Of course, a polynucleotide which hybridizes only to polyA+ sequences (such as any 3′ terminal polyA+ tract of a cDNA shown in the sequence listing), or to a complementary stretch of T (or U) residues, would not be included in the definition of “polynucleotide,” since such a polynucleotide would hybridize to any nucleic acid molecule containing a poly (A) stretch or the complement thereof (e.g., practically any double-stranded cDNA clone generated using oligo dT as a primer).

[0077] The polynucleotide of the present invention can be composed of any polyribonucleotide or polydeoxribonucleotide, which may be unmodified RNA or DNA or modified RNA or DNA. For example, polynucleotides can be composed of single- and double-stranded DNA, DNA that is a mixture of single- and double-stranded regions, single- and double-stranded RNA, and RNA that is mixture of single- and double-stranded regions, hybrid molecules comprising DNA and RNA that may be single-stranded or, more typically, double-stranded or a mixture of single- and double-stranded regions. In addition, the polynucleotide can be composed of triple-stranded regions comprising RNA or DNA or both RNA and DNA. A polynucleotide may also contain one or more modified bases or DNA or RNA backbones modified for stability or for other reasons. “Modified” bases include, for example, tritylated bases and unusual bases such as inosine. A variety of modifications can be made to DNA and RNA; thus, “polynucleotide” embraces chemically, enzymatically, or metabolically modified forms.

[0078] In specific embodiments, the polynucleotides of the invention are at least 15, at least 30, at least 50, at least 100, at least 125, at least 500, or at least 1000 continuous nucleotides but are less than or equal to 300 kb, 200 kb, 100 kb, 50 kb, 15 kb, 10 kb, 7.5 kb, 5 kb, 2.5 kb, 2.0 kb, or 1 kb, in length. In a further embodiment, polynucleotides of the invention comprise a portion of the coding sequences, as disclosed herein, but do not comprise all or a portion of any intron. In another embodiment, the polynucleotides comprising coding sequences do not contain coding sequences of a genomic flanking gene (i.e., 5′ or 3′ to the gene of interest in the genome). In other embodiments, the polynucleotides of the invention do not contain the coding sequence of more than 1000, 500, 250, 100, 50; 25, 20, 15, 10, 5, 4, 3, 2, or 1 genomic flanking gene(s).

[0079] “SEQ ID NO:X” refers to a polynucleotide sequence described in column 5 of Table 1A, while “SEQ ID NO:Y” refers to a polypeptide sequence described in column 10 of Table 1A. SEQ ID NO:X is identified by an integer specified in column 6 of Table 1A. The polypeptide sequence SEQ ID NO:Y is a translated open reading frame (ORF) encoded by polynucleotide SEQ ID NO:X. The polynucleotide sequences are shown in the sequence listing immediately followed by all of the polypeptide sequences. Thus, a polypeptide sequence corresponding to polynucleotide sequence SEQ ID NO:2 is the first polypeptide sequence shown in the sequence listing. The second polypeptide sequence corresponds to the polynucleotide sequence shown as SEQ ID NO:3, and so on.

[0080] The polypeptide of the present invention can be composed of amino acids joined to each other by peptide bonds or modified peptide bonds, i.e., peptide isosteres, and may contain amino acids other than the 20 gene-encoded amino acids. The polypeptides may be modified by either natural processes, such as posttranslational processing, or by chemical modification techniques which are well known in the art. Such modifications are well described in basic texts and in more detailed monographs, as well as in a voluminous research literature. Modifications can occur anywhere in a polypeptide, including the peptide backbone, the amino acid side-chains and the amino or carboxyl termini. It will be appreciated that the same type of modification may be present in the same or varying degrees at several sites in a given polypeptide. Also, a given polypeptide may contain many types of modifications. Polypeptides may be branched, for example, as a result of ubiquitination, and they may be cyclic, with or without branching. Cyclic, branched, and branched cyclic polypeptides may result from posttranslation natural processes or may be made by synthetic methods. Modifications include acetylation, acylation, ADP-ribosylation, amidation, covalent attachment of flavin, covalent attachment of a heme moiety, covalent attachment of a nucleotide or nucleotide derivative, covalent attachment of a lipid or lipid derivative, covalent attachment of phosphotidylinositol, cross-linking, cyclization, disulfide bond formation, demethylation, formation of covalent cross-links, formation of cysteine, formation of pyroglutamate, formylation, gamma-carboxylation, glycosylation, GPI anchor formation, hydroxylation, iodination, methylation, myristoylation, oxidation, pegylation, proteolytic processing, phosphorylation, prenylation, racemization, selenoylation, sulfation, transfer-RNA mediated addition of amino acids to proteins such as arginylation, and ubiquitination. (See, for instance, PROTEINS—STRUCTURE AND MOLECULAR PROPERTIES, 2nd Ed., T. E. Creighton, W. H. Freeman and Company, New York (1993); POSTTRANSLATIONAL COVALENT MODIFICATION OF PROTEINS, B. C. Johnson, Ed., Academic Press, New York, pgs. 1-12 (1983); Seifter et al., Meth. Enzymol. 182:626-646 (1990); Rattan et al., Ann. N.Y. Acad. Sci. 663:48-62 (1992)).

[0081] “SEQ ID NO:X” refers to a polynucleotide sequence described, for example, in Tables 1A, Table 1B, or Table 2, while “SEQ ID NO:Y” refers to a polypeptide sequence described in column 11 of Table 1A and or Table 1B. SEQ ID NO:X is identified by an integer specified in Table 1B. The polypeptide sequence SEQ ID NO:Y is a translated open reading frame (ORE) encoded by polynucleotide SEQ ID NO:X. “Clone ID:” refers to a cDNA clone described in column 2 of Table IA and/or Table 1B.

[0082] “A polypeptide having functional activity” refers to a polypeptide capable of displaying one or more known functional activities associated with a full-length (complete) protein. Such functional activities include, but are not limited to, biological activity (e.g. activity useful in treating, preventing and/or ameliorating cardiovascular diseases and disorders), antigenicity (ability to bind [or compete with a polypeptide for binding] to an anti-polypeptide antibody), immunogenicity (ability to generate antibody which binds to a specific polypeptide of the invention), ability to form multimers with polypeptides of the invention, and ability to bind to a receptor or ligand for a polypeptide.

[0083] The polypeptides of the invention can be assayed for functional activity (e.g. biological activity) using or routinely modifying assays known in the art, as well as assays described herein. Specifically, one of skill in the art may routinely assay secreted polypeptides (including fragments and variants) of the invention for activity using assays as described in the examples section below.

[0084] “A polypeptide having biological activity” refers to a polypeptide exhibiting activity similar to, but not necessarily identical to, an activity of a polypeptide of the present invention, including mature forms, as measured in a particular biological assay, with or without dose dependency. In the case where dose dependency does exist, it need not be identical to that of the polypeptide, but rather substantially similar to the dose-dependence in a given activity as compared to the polypeptide of the present invention (i.e., the candidate polypeptide will exhibit greater activity or not more than about 25-fold less and, preferably, not more than about tenfold less activity, and most preferably, not more than about three-fold less activity relative to the polypeptide of the present invention).

Tables

Table 1A

[0085] Table 1A summarizes information concerning certain polypnucleotides and polypeptides of the invention. The first column provides the gene number in the application for each clone identifier. The second column provides a unique clone identifier, “Clone ID:”, for a cDNA clone related to each contig sequence disclosed in Table 1A. Third column, the cDNA Clones identified in the second column were deposited as indicated in the third column (i.e. by ATCC Deposit No:Z and deposit date). Some of the deposits contain multiple different clones corresponding to the same gene. In the fourth column, “Vector” refers to the type of vector contained in the corresponding cDNA Clone identified in the second column. In the fifth column, the nucleotide sequence identified as “NT SEQ ID NO:X” was assembled from partially homologous (“overlapping”) sequences obtained from the corresponding cDNA clone identified in the second column and, in some cases, from additional related cDNA clones. The overlapping sequences were assembled into a single contiguous sequence of high redundancy (usually three to five overlapping sequences at each nucleotide position), resulting in a final sequence identified as SEQ ID NO:X. In the sixth column, “Total NT Seq.” refers to the total number of nucleotides in the contig sequence identified as SEQ ID NO:X.” The deposited clone may contain all or most of these sequences, reflected by the nucleotide position indicated as “5′ NT of Clone Seq.” (seventh column) and the “3′ NT of Clone Seq.” (eighth column) of SEQ ID NO:X. In the ninth column, the nucleotide position of SEQ ID NO:X of the putative start codon (methionine) is identified as “5′ NT of Start Codon.” Similarly, in column ten, the nucleotide position of SEQ ID NO:X of the predicted signal sequence is identified as “5′ NT of First AA of Signal Pep.” In the eleventh column, the translated amino acid sequence, beginning with the methionine, is identified as “AA SEQ ID NO:Y,” although other reading frames can also be routinely translated using known molecular biology techniques. The polypeptides produced by these alternative open reading frames are specifically contemplated by the present invention.

[0086] In the twelfth and thirteenth columns of Table 1A, the first and last amino acid position of SEQ ID NO:Y of the predicted signal peptide is identified as “First AA of Sig Pep” and “Last AA of Sig Pep.” In the fourteenth column, the predicted first amino acid position of SEQ ID NO:Y of the secreted portion is identified as “Predicted First AA of Secreted Portion”. The amino acid position of SEQ ID NO:Y of the last amino acid encoded by the open reading frame is identified in the fifteenth column as “Last AA of ORF”.

[0087] SEQ ID NO:X (where X may be any of the polynucleotide sequences disclosed in the sequence listing) and the translated SEQ ID NO:Y (where Y may be any of the polypeptide sequences disclosed in the sequence listing) are sufficiently accurate and otherwise suitable for a variety of uses well known in the art and described further below. For instance, SEQ ID NO:X is useful for designing nucleic acid hybridization probes that will detect nucleic acid sequences contained in SEQ ID NO:X or the cDNA contained in the deposited clone. These probes will also hybridize to nucleic acid molecules in biological samples, thereby enabling a variety of forensic and diagnostic methods of the invention. Similarly, polypeptides identified from SEQ ID NO:Y may be used, for example, to generate antibodies which bind specifically to proteins containing the polypeptides and the secreted proteins encoded by the cDNA clones identified in Table 1A and/or elsewhere herein

[0088] Nevertheless, DNA sequences generated by sequencing reactions can contain sequencing errors. The errors exist as misidentified nucleotides, or as insertions or deletions of nucleotides in the generated DNA sequence. The erroneously inserted or deleted nucleotides cause frame shifts in the reading frames of the predicted amino acid sequence. In these cases, the predicted amino acid sequence diverges from the actual amino acid sequence, even though the generated DNA sequence may be greater than 99.9% identical to the actual DNA sequence (for example, one base insertion or deletion in an open reading frame of over 1000 bases).

[0089] Accordingly, for those applications requiring precision in the nucleotide sequence or the amino acid sequence, the present invention provides not only the generated nucleotide sequence identified as SEQ ID NO:X, and the predicted translated amino acid sequence identified as SEQ ID NO:Y, but also a sample of plasmid DNA containing a human cDNA of the invention deposited with the ATCC, as set forth in Table 1A. The nucleotide sequence of each deposited plasmid can readily be determined by sequencing the deposited plasmid in accordance with known methods

[0090] The predicted amino acid sequence can then be verified from such deposits. Moreover, the amino acid sequence of the protein encoded by a particular plasmid can also be directly determined by peptide sequencing or by expressing the protein in a suitable host cell containing the deposited human cDNA, collecting the protein, and determining its sequence.

[0091] Also provided in Table 1A is the name of the vector which contains the cDNA plasmid. Each vector is routinely used in the art. The following additional information is provided for convenience.

[0092] Vectors Lambda Zap (U.S. Pat. Nos. 5,128,256 and 5,286,636), Uni-Zap XR (U.S. Pat. Nos. 5,128,256 and 5,286,636), Zap Express (U.S. Pat. Nos. 5,128,256 and 5,286,636), pBluescript (pBS) (Short, J. M. et al., Nucleic Acids Res. 16:7583-7600 (1988); Alting-Mees, M. A. and Short, J. M., Nucleic Acids Res. 17:9494 (1989)) and pBK (Alting-Mees, M. A. et al., Strategies 5:58-61 (1992)) are commercially available from Stratagene Cloning Systems, Inc., 11011 N. Torrey Pines Road, La Jolla, Calif., 92037. pBS contains an ampicillin resistance gene and pBK contains a neomycin resistance gene. Phagemid pBS may be excised from the Lambda Zap and Uni-Zap XR vectors, and phagemid pBK may be excised from the Zap Express vector. Both phagemids may be transformed into E. coli strain XL-1 Blue, also available from Stratagene

[0093] Vectors pSport1, pCMVSport 1.0, pCMVSport 2.0 and pCMVSport 3.0, were obtained from Life Technologies, Inc., P.O. Box 6009, Gaithersburg, Md. 20897. All Sport vectors contain an ampicillin resistance gene and may be transformed into E. coli strain DH10B, also available from Life Technologies. See, for instance, Gruber, C. E., et al., Focus 15:59 (1993). Vector lafinid BA (Bento Soares, Columbia University, New York, N.Y.) contains an ampicillin resistance gene and can be transformed into E. coli strain XL-1 Blue. Vector pCR®2.1, which is available from Invitrogen, 1600 Faraday Avenue, Carlsbad, Calif. 92008, contains an ampicillin resistance gene and may be transformed into E. coli strain DH10B, available from Life Technologies. See, for instance, Clark, J. M., Nuc. Acids Res. 16:9677-9686 (1988) and Mead, D. et al., Bio/Technology 9: (1991).

[0094] The present invention also relates to the genes corresponding to SEQ ID NO:X, SEQ ID NO:Y, and/or a deposited cDNA (cDNA Clone ID). The corresponding gene can be isolated in accordance with known methods using the sequence information disclosed herein. Such methods include, but are not limited to, preparing probes or primers from the disclosed sequence and identifying or amplifying the corresponding gene from appropriate sources of genomic material.

[0095] Also provided in the present invention are allelic variants, orthologs, and/or species homologs. Procedures known in the art can be used to obtain full-length genes, allelic variants, splice variants, full-length coding portions, orthologs, and/or species homologs of genes corresponding to SEQ ID NO:X and SEQ ID NO:Y using information from the sequences disclosed herein or the clones deposited with the ATCC. For example, allelic variants and/or species homologs may be isolated and identified by making suitable probes or primers from the sequences provided herein and screening a suitable nucleic acid source for allelic variants and/or the desired homologue.

[0096] The present invention provides a polynucleotide comprising, or alternatively consisting of, the nucleic acid sequence of SEQ ID NO:X and/or a cDNA contained in ATCC Deposit No.Z. The present invention also provides a polypeptide comprising, or alternatively, consisting of, the polypeptide sequence of SEQ ID NO:Y, a polypeptide encoded by SEQ ID NO:X, and/or a polypeptide encoded by a cDNA contained in ATCC deposit No.Z. Polynucleotides encoding a polypeptide comprising, or alternatively consisting of the polypeptide sequence of SEQ ID NO:Y, a polypeptide encoded by SEQ ID NO:X and/or a polypeptide encoded by the cDNA contained in ATCC Deposit No.Z, are also encompassed by the invention. The present invention further encompasses a polynucleotide comprising, or alternatively consisting of the complement of the nucleic acid sequence of SEQ ID NO:X, and/or the complement of the coding strand of the cDNA contained in ATCC Deposit No.Z.

TABLE 1A

| | | | | | | | | | 5′ NT | | First | Last | | |
|---|---|---|---|---|---|---|---|---|---|---|---|---|---|---|
| | | ATCC | | NT | | 5′ NT | 3′ NT | | of First | AA | AA | AA | First AA | Last |
| | | Deposit | | SEQ | Total | of | of | 5′ NT | AA of | SEQ | of | of | of | AA |
| Gene | cDNA | No: Z and | | ID | NT | Clone | Clone | of Start | Signal | ID | Sig | Sig | Secreted | of |
| No. | Clone ID | Date | Vector | NO: X | Seq. | Seq. | Seq. | Codon | Pep | NO: Y | Pep | Pep | Portion | ORF |
| 1 | H6BSF56 | 203917 | Uni-ZAP XR | 11 | 605 | 44 | 605 | | 83 | 264 | 1 | 6 | 7 | 141 |
| | | Apr. 08, 1999 | | | | | | | | | | | | |
| 2 | H6EDM64 | 203959 | Uni-ZAP XR | 12 | 2610 | 1275 | 2377 | 1448 | 1448 | 265 | 1 | | | 6 |
| | | Apr. 26, 1999 | | | | | | | | | | | | |
| 3 | H6EEC72 | PTA-793 | Uni-ZAP XR | 13 | 1493 | 1 | 1493 | | 263 | 266 | 1 | 13 | 14 | 18 |
| | | Sep. 27, 1999 | | | | | | | | | | | | |
| 4 | H6EEU40 | 203917 | Uni-ZAP XR | 14 | 951 | 1 | 951 | 175 | 175 | 267 | 1 | 27 | 28 | 47 |
| | | Apr. 08, 1999 | | | | | | | | | | | | |
| 5 | HACAB68 | 203917 | Uni-ZAP XR | 15 | 1300 | 1 | 1300 | 135 | 135 | 268 | 1 | 26 | 27 | 78 |
| | | Apr. 08, 1999 | | | | | | | | | | | | |
| 6 | HACBJ56 | 203979 | Uni-ZAP XR | 16 | 888 | 1 | 888 | | 250 | 269 | 1 | 9 | 10 | 25 |
| | | Apr. 29, 1999 | | | | | | | | | | | | |
| 7 | HADMB15 | 203979 | pBluescript | 17 | 330 | 1 | 330 | | 238 | 270 | 1 | 11 | 12 | 20 |
| | | Apr. 29, 1999 | | | | | | | | | | | | |
| 8 | HAGFS57 | 203979 | Uni-ZAP XR | 18 | 874 | 1 | 874 | 241 | 241 | 271 | 1 | 26 | 27 | 54 |
| | | Apr. 29, 1999 | | | | | | | | | | | | |
| 9 | HAGHN57 | 203917 | Uni-ZAP XR | 19 | 2440 | 843 | 2440 | 900 | 900 | 272 | 1 | | | 10 |
| | | Apr. 08, 1999 | | | | | | | | | | | | |
| 10 | HAJAA47 | 203917 | pCMVSport | 20 | 1237 | 1 | 1237 | | 192 | 273 | 1 | 15 | 16 | 38 |
| | | Apr. 08, 1999 | 3.0 | | | | | | | | | | | |
| 11 | HAJAY92 | 203959 | pCMVSport | 21 | 2345 | 1 | 2345 | 12 | 12 | 274 | 1 | 20 | 21 | 94 |
| | | Apr. 26, 1999 | 3.0 | | | | | | | | | | | |
| 12 | HAJBV67 | PTA-181 | pCMVSport | 22 | 2536 | 1 | 2536 | 605 | 605 | 275 | 1 | 19 | 20 | 359 |
| | | Jun. 07, 1999 | 3.0 | | | | | | | | | | | |
| 13 | HATCD80 | 203917 | Uni-ZAP XR | 23 | 1809 | 95 | 1809 | 296 | 296 | 276 | 1 | 23 | 24 | 37 |
| | | Apr. 08, 1999 | | | | | | | | | | | | |
| 14 | HATEH20 | 203917 | Uni-ZAP XR | 24 | 850 | 1 | 850 | 93 | 93 | 277 | 1 | 19 | 20 | 42 |
| | | Apr. 08, 1999 | | | | | | | | | | | | |
| 15 | HBAGD86 | 203917 | pSport1 | 25 | 1713 | 293 | 1596 | 521 | 521 | 278 | 1 | 18 | 19 | 19 |
| | | Apr. 08, 1999 | | | | | | | | | | | | |
| 16 | HBGBC29 | 203917 | Uni-ZAP XR | 26 | 1856 | 764 | 1829 | | 1016 | 279 | 1 | | | 2 |
| | | Apr. 08, 1999 | | | | | | | | | | | | |
| 17 | HBGNC72 | PTA-793 | Uni-ZAP XR | 27 | 802 | 1 | 802 | | 550 | 280 | 1 | 8 | 9 | 76 |
| | | Sep. 27, 1999 | | | | | | | | | | | | |
| 18 | HBHAA05 | 203917 | Uni-ZAP XR | 28 | 690 | 1 | 690 | | 110 | 281 | 1 | 16 | 17 | 58 |
| | | Apr. 08, 1999 | | | | | | | | | | | | |
| 19 | HBHAA81 | 203959 | Uni-ZAP XR | 29 | 1647 | 1 | 1647 | 28 | 28 | 282 | 1 | 24 | 25 | 203 |
| | | Apr. 26, 1999 | | | | | | | | | | | | |
| 20 | HBIAC29 | 203917 | Uni-ZAP XR | 30 | 1782 | 808 | 1545 | 1036 | 1036 | 283 | 1 | 24 | 25 | 29 |
| | | Apr. 08, 1999 | | | | | | | | | | | | |
| 21 | HBJAB02 | 203917 | Uni-ZAP XR | 31 | 1693 | 1 | 1665 | 84 | 84 | 284 | 1 | 27 | 28 | 34 |
| | | Apr. 08, 1999 | | | | | | | | | | | | |
| 22 | HBJAC40 | 203979 | Uni-ZAP XR | 32 | 1767 | 184 | 1729 | | 329 | 285 | 1 | | | 13 |
| | | Apr. 29, 1999 | | | | | | | | | | | | |
| 23 | HBJCR46 | 203917 | Uni-ZAP XR | 33 | 3208 | 2270 | 3202 | 589 | 589 | 286 | 1 | 1 | 2 | 733 |
| | | Apr. 08, 1999 | | | | | | | | | | | | |
| 24 | HBJDW56 | 203917 | Uni-ZAP XR | 34 | 637 | 1 | 637 | | 121 | 287 | 1 | | | 8 |
| | | Apr. 08, 1999 | | | | | | | | | | | | |
| 25 | HBJEL16 | 203979 | Uni-ZAP XR | 35 | 750 | 1 | 750 | 115 | 115 | 288 | 1 | 24 | 25 | 36 |
| | | Apr. 29, 1999 | | | | | | | | | | | | |
| 26 | HBJKD16 | 203979 | Uni-ZAP XR | 36 | 1629 | 1 | 1629 | 78 | 78 | 289 | 1 | 18 | 19 | 31 |
| | | Apr. 29, 1999 | | | | | | | | | | | | |
| 27 | HBMBM96 | 203917 | pBluescript | 37 | 1076 | 1 | 1076 | | 170 | 290 | 1 | | | 4 |
| | | Apr. 08, 1999 | | | | | | | | | | | | |
| 28 | HBMTM11 | 203917 | Uni-ZAP XR | 38 | 1639 | 1 | 1639 | 125 | 125 | 291 | 1 | 19 | 20 | 31 |
| | | Apr. 08, 1999 | | | | | | | | | | | | |
| 29 | HBMUH74 | PTA-181 | Uni-ZAP XR | 39 | 726 | 1 | 726 | 344 | 344 | 292 | 1 | 13 | 14 | 28 |
| | | Jun. 07, 1999 | | | | | | | | | | | | |
| 30 | HBQAB79 | 203917 | Lambda ZAP | 40 | 1331 | 1 | 1331 | 190 | 190 | 293 | 1 | | | 11 |
| | | Apr. 08, 1999 | II | | | | | | | | | | | |
| 31 | HBSAK32 | PTA-181 | Uni-ZAP XR | 41 | 592 | 129 | 592 | 447 | 447 | 294 | 1 | 27 | 28 | 48 |
| | | Jun. 07, 1999 | | | | | | | | | | | | |
| 32 | HBXCX15 | 203917 | ZAP Express | 42 | 1219 | 1 | 1219 | | 1148 | 295 | 1 | | | 1 |
| | | Apr. 08, 1999 | | | | | | | | | | | | |
| 33 | HCDCY76 | 203917 | Uni-ZAP XR | 43 | 1392 | 628 | 1392 | | 860 | 296 | 1 | 17 | 18 | 35 |
| | | Apr. 08, 1999 | | | | | | | | | | | | |
| 34 | HCDDL48 | 203917 | Uni-ZAP XR | 44 | 813 | 1 | 813 | 333 | 333 | 297 | 1 | 12 | 13 | 40 |
| | | Apr. 08, 1999 | | | | | | | | | | | | |
| 35 | HCE1G78 | 203917 | Uni-ZAP XR | 45 | 1896 | 1 | 1896 | 77 | 77 | 298 | 1 | 17 | 18 | 254 |
| | | Apr. 08, 1999 | | | | | | | | | | | | |
| 36 | HCE5F78 | 203917 | Uni-ZAP XR | 46 | 1732 | 282 | 1732 | | 566 | 299 | 1 | 8 | 9 | 32 |
| | | Apr. 08, 1999 | | | | | | | | | | | | |
| 37 | HCEDR26 | 203917 | Uni-ZAP XR | 47 | 1419 | 1 | 1419 | 177 | 177 | 300 | 1 | 26 | 27 | 55 |
| | | Apr. 08, 1999 | | | | | | | | | | | | |
| 38 | HCEEQ25 | 203917 | Uni-ZAP XR | 48 | 992 | 1 | 992 | | 111 | 301 | 1 | 15 | 16 | 23 |
| | | Apr. 08, 1999 | | | | | | | | | | | | |
| 39 | HCEEU18 | 203917 | Uni-ZAP XR | 49 | 1229 | 1 | 1229 | 209 | 209 | 302 | 1 | 30 | 31 | 43 |
| | | Apr. 08, 1999 | | | | | | | | | | | | |
| 40 | HCEGG08 | 203979 | Uni-ZAP XR | 50 | 2534 | 979 | 2025 | 1114 | 1114 | 303 | 1 | 15 | 16 | 27 |
| | | Apr. 29, 1999 | | | | | | | | | | | | |
| 41 | HCFLN88 | 203917 | pSport1 | 51 | 1434 | 1 | 1434 | 101 | 101 | 304 | 1 | 16 | 17 | 25 |
| | | Apr. 08, 1999 | | | | | | | | | | | | |
| 42 | HCHAB84 | 203979 | pSport1 | 52 | 1359 | 62 | 1359 | | 304 | 305 | 1 | 23 | 24 | 147 |
| | | Apr. 29, 1999 | | | | | | | | | | | | |
| 43 | HCMSX51 | 203917 | Uni-ZAP XR | 53 | 2253 | 334 | 2190 | | 539 | 306 | 1 | 31 | 32 | 80 |
| | | Apr. 08, 1999 | | | | | | | | | | | | |
| 44 | HCNCO11 | 203917 | Lambda ZAP | 54 | 746 | 1 | 746 | 101 | 101 | 307 | 1 | | | 14 |
| | | Apr. 08, 1999 | II | | | | | | | | | | | |
| 45 | HCNSD29 | PTA-181 | pBluescript | 55 | 1728 | 1031 | 1633 | 1145 | 1145 | 308 | 1 | 19 | 20 | 31 |
| | | Jun. 07, 1999 | | | | | | | | | | | | |
| 46 | HCQBH72 | 203917 | Lambda ZAP | 56 | 1796 | 776 | 1796 | 31 | 31 | 309 | 1 | 25 | 26 | 47 |
| | | Apr. 08, 1999 | II | | | | | | | | | | | |
| 47 | HCQCC96 | 203979 | Lambda ZAP | 57 | 2166 | 632 | 1455 | 782 | 782 | 310 | 1 | 20 | 21 | 45 |
| | | Apr. 29, 1999 | II | | | | | | | | | | | |
| 48 | HCUCF89 | 203917 | ZAP Express | 58 | 530 | 1 | 530 | 189 | 189 | 311 | 1 | 18 | 19 | 29 |
| | | Apr. 08, 1999 | | | | | | | | | | | | |
| 49 | HCUCK44 | 203957 | ZAP Express | 59 | 1143 | 578 | 1136 | 598 | 598 | 312 | 1 | 30 | 31 | 60 |
| | | Apr. 26, 1999 | | | | | | | | | | | | |
| 50 | HCUDD64 | 203917 | ZAP Express | 60 | 402 | 150 | 389 | 256 | 256 | 313 | 1 | 35 | 36 | 49 |
| | | Apr. 08, 1999 | | | | | | | | | | | | |
| 51 | HCWAE64 | 203917 | ZAP Express | 61 | 471 | 1 | 471 | | 410 | 314 | 1 | | | 5 |
| | | Apr. 08, 1999 | | | | | | | | | | | | |
| 52 | HDPDI72 | PTA-794 | pCMVSport | 62 | 1550 | 1 | 1550 | 23 | 23 | 315 | 1 | 17 | 18 | 120 |
| | | Sep. 27, 1999 | 3.0 | | | | | | | | | | | |
| 53 | HDPGE24 | 203960 | pCMVSport | 63 | 2625 | 1 | 2625 | 173 | 173 | 316 | 1 | 11 | 12 | 73 |
| | | Apr. 26, 1999 | 3.0 | | | | | | | | | | | |
| 54 | HDPIU94 | 203960 | pCMVSport | 64 | 2196 | 21 | 2196 | 208 | 208 | 317 | 1 | 21 | 22 | 23 |
| | | Apr. 26, 1999 | 3.0 | | | | | | | | | | | |
| 55 | HDPIY31 | PTA-793 | pCMVSport | 65 | 1978 | 1 | 1978 | 268 | 268 | 318 | 1 | 16 | 17 | 35 |
| | | Sep. 27, 1999 | 3.0 | | | | | | | | | | | |
| 56 | HDPOC24 | 203960 | pCMVSport | 66 | 1777 | 302 | 1725 | 418 | 418 | 319 | 1 | 23 | 24 | 133 |
| | | Apr. 26, 1999 | 3.0 | | | | | | | | | | | |
| 57 | HDPOL37 | 203960 | pCMVSport | 67 | 1489 | 1 | 1489 | 189 | 189 | 320 | 1 | 32 | 33 | 62 |
| | | Apr. 26, 1999 | 3.0 | | | | | | | | | | | |
| 58 | HDPOO76 | 203960 | pCMVSport | 68 | 645 | 1 | 645 | | 109 | 321 | 1 | 15 | 16 | 16 |
| | | Apr. 26, 1999 | 3.0 | | | | | | | | | | | |
| 59 | HDPPQ30 | 203960 | pCMVSport | 69 | 1063 | 1 | 1063 | 220 | 220 | 322 | 1 | 22 | 23 | 38 |
| | | Apr. 26, 1999 | 3.0 | | | | | | | | | | | |
| 60 | HDQHM36 | PTA-181 | pCMVSport | 70 | 1547 | 1 | 1547 | 129 | 129 | 323 | 1 | 18 | 19 | 48 |
| | | Jun. 07, 1999 | 3.0 | | | | | | | | | | | |
| 61 | HE2CM39 | 203960 | Uni-ZAP XR | 71 | 566 | 1 | 566 | | 10 | 324 | 1 | | | 13 |
| | | Apr. 26, 1999 | | | | | | | | | | | | |
| 62 | HE2PO93 | 203960 | Uni-ZAP XR | 72 | 1323 | 638 | 1323 | 770 | 770 | 325 | 1 | 27 | 28 | 42 |
| | | Apr. 26, 1999 | | | | | | | | | | | | |
| 63 | HE6FU11 | 203979 | Uni-ZAP XR | 73 | 2000 | 1 | 1994 | 145 | 145 | 326 | 1 | 26 | 27 | 226 |
| | | Apr. 29, 1999 | | | | | | | | | | | | |
| 64 | HE6FV29 | 203960 | Uni-ZAP XR | 74 | 1526 | 1 | 1526 | 210 | 210 | 327 | 1 | 18 | 19 | 33 |
| | | Apr. 26, 1999 | | | | | | | | | | | | |
| 65 | HE9EA10 | 203960 | Uni-ZAP XR | 75 | 2114 | 1 | 2111 | | 212 | 328 | 1 | 28 | 29 | 78 |
| | | Apr. 26, 1999 | | | | | | | | | | | | |
| 66 | HEBCY54 | 203960 | Uni-ZAP XR | 76 | 1189 | 1 | 1189 | 172 | 172 | 329 | 1 | 24 | 25 | 118 |
| | | Apr. 26, 1999 | | | | | | | | | | | | |
| 67 | HEBDF77 | 203960 | Uni-ZAP XR | 77 | 1820 | 1 | 1820 | 681 | 681 | 330 | 1 | 29 | 30 | 36 |
| | | Apr. 26, 1999 | | | | | | | | | | | | |
| 68 | HEBDQ91 | 203960 | Uni-ZAP XR | 78 | 1573 | 1007 | 1573 | | 1211 | 331 | 1 | 29 | 30 | 41 |
| | | Apr. 26, 1999 | | | | | | | | | | | | |
| 69 | HEBFR46 | 203979 | Uni-ZAP XR | 79 | 1304 | 1 | 1304 | 200 | 200 | 332 | 1 | 26 | 27 | 29 |
| | | Apr. 29, 1999 | | | | | | | | | | | | |
| 70 | HEBGE07 | 203960 | Uni-ZAP XR | 80 | 1867 | 1 | 1867 | 106 | 106 | 333 | 1 | 25 | 26 | 42 |
| | | Apr. 26, 1999 | | | | | | | | | | | | |
| 71 | HEGAU15 | 203960 | Uni-ZAP XR | 81 | 1125 | 1 | 1125 | 59 | 59 | 334 | 1 | 30 | 31 | 34 |
| | | Apr. 26, 1999 | | | | | | | | | | | | |
| 72 | HEQBF89 | 203960 | pCMVSport | 82 | 859 | 1 | 859 | 306 | 306 | 335 | 1 | 18 | 19 | 50 |
| | | Apr. 26, 1999 | 3.0 | | | | | | | | | | | |
| 73 | HFCEI04 | 203960 | Uni-ZAP XR | 83 | 887 | 1 | 887 | | 136 | 336 | 1 | 17 | 18 | 42 |
| | | Apr. 26, 1999 | | | | | | | | | | | | |
| 74 | HFEAY59 | 203960 | Uni-ZAP XR | 84 | 1153 | 1 | 1153 | 154 | 154 | 337 | 1 | 24 | 25 | 40 |
| | | Apr. 26, 1999 | | | | | | | | | | | | |
| 75 | HFIJA68 | 203979 | pSport1 | 85 | 1157 | 1 | 1157 | 283 | 283 | 338 | 1 | 22 | 23 | 43 |
| | | Apr. 29, 1999 | | | | | | | | | | | | |
| 76 | HFKEU12 | 203960 | Uni-ZAP XR | 86 | 1031 | 1 | 1031 | 6 | 6 | 339 | 1 | 16 | 17 | 55 |
| | | Apr. 26, 1999 | | | | | | | | | | | | |
| 77 | HFPCZ55 | 203960 | Uni-ZAP XR | 87 | 2735 | 341 | 2735 | 676 | 676 | 340 | 1 | 24 | 25 | 44 |
| | | Apr. 26, 1999 | | | | | | | | | | | | |
| 78 | HFTBM38 | 203960 | Uni-ZAP XR | 88 | 1941 | 322 | 1941 | 577 | 577 | 341 | 1 | 18 | 19 | 30 |
| | | Apr. 26, 1999 | | | | | | | | | | | | |
| 79 | HFTDH56 | PTA-181 | Uni-ZAP XR | 89 | 820 | 1 | 820 | 67 | 67 | 342 | 1 | | | 10 |
| | | Jun. 07, 1999 | | | | | | | | | | | | |
| 80 | HFVHW43 | 203960 | pBluescript | 90 | 1233 | 1 | 1233 | 92 | 92 | 343 | 1 | 30 | 31 | 39 |
| | | Apr. 26, 1999 | | | | | | | | | | | | |
| 81 | HGBHP91 | 203960 | Uni-ZAP XR | 91 | 1054 | 1 | 1054 | | 50 | 344 | 1 | 14 | 15 | 52 |
| | | Apr. 26, 1999 | | | | | | | | | | | | |
| 82 | HHEAK45 | 203960 | pCMVSport | 92 | 2014 | 87 | 1935 | | 813 | 345 | 1 | | | 3 |
| | | Apr. 26, 1999 | 3.0 | | | | | | | | | | | |
| 83 | HHEGS55 | PTA-181 | pCMVSport | 93 | 594 | 2 | 594 | 159 | 159 | 346 | 1 | 16 | 17 | 36 |
| | | Jun. 07, 1999 | 3.0 | | | | | | | | | | | |
| 84 | HHEOW19 | PTA-793 | pCMVSport | 94 | 1589 | 1 | 1589 | 183 | 183 | 347 | 1 | 18 | 19 | 64 |
| | | Sep. 27, 1999 | 3.0 | | | | | | | | | | | |
| 85 | HHFFL34 | 203960 | Uni-ZAP XR | 95 | 2632 | 1 | 2632 | 42 | 42 | 348 | 1 | 21 | 22 | 223 |
| | | Apr. 26, 1999 | | | | | | | | | | | | |
| 86 | HHFFS40 | 203960 | Uni-ZAP XR | 96 | 1816 | 1 | 1816 | 37 | 37 | 349 | 1 | 18 | 19 | 47 |
| | | Apr. 26, 1999 | | | | | | | | | | | | |
| 87 | HHGCS78 | 203960 | Lambda ZAP | 97 | 575 | 46 | 575 | 290 | 290 | 350 | 1 | 17 | 18 | 24 |
| | | Apr. 26, 1999 | II | | | | | | | | | | | |
| 88 | HHGDT26 | 203960 | Lambda ZAP | 98 | 1584 | 1 | 1584 | 181 | 181 | 351 | 1 | | | 8 |
| | | Apr. 26, 1999 | II | | | | | | | | | | | |
| 89 | HHPFU28 | 203960 | Uni-ZAP XR | 99 | 1838 | 1 | 1838 | | 156 | 352 | 1 | 18 | 19 | 27 |
| | | Apr. 26, 1999 | | | | | | | | | | | | |
| 90 | HHSBI06 | 203959 | Uni-ZAP XR | 100 | 1049 | 27 | 803 | | 690 | 353 | 1 | | | 5 |
| | | Apr. 26, 1999 | | | | | | | | | | | | |
| 91 | HHSBI65 | 203917 | Uni-ZAP XR | 101 | 1444 | 1 | 1431 | 62 | 62 | 354 | 1 | 17 | 18 | 55 |
| | | Apr. 08, 1999 | | | | | | | | | | | | |
| 92 | HHSDI53 | PTA-181 | Uni-ZAP XR | 102 | 1277 | 1 | 1277 | 221 | 221 | 355 | 1 | 14 | 15 | 24 |
| | | Jun. 07, 1999 | | | | | | | | | | | | |
| 93 | HISAT67 | 203959 | pSport1 | 103 | 2154 | 1061 | 2142 | 1239 | 1239 | 356 | 1 | 35 | 36 | 56 |
| | | Apr. 26, 1999 | | | | | | | | | | | | |
| 94 | HJBCU75 | 203957 | pBluescript | 104 | 1009 | 1 | 1009 | 61 | 61 | 357 | 1 | | | 5 |
| | | Apr. 26, 1999 | SK− | | | | | | | | | | | |
| 95 | HJMAA03 | 203957 | pCMVSport | 105 | 665 | 1 | 665 | | 527 | 358 | 1 | | | 9 |
| | | Apr. 26, 1999 | 3.0 | | | | | | | | | | | |
| 96 | HJMAV41 | PTA-181 | pCMVSport | 106 | 1017 | 1 | 1017 | 207 | 207 | 359 | 1 | | | 27 |
| | | Jun. 07, 1999 | 3.0 | | | | | | | | | | | |
| 97 | HJMAY90 | 203959 | pCMVSport | 107 | 2886 | 2233 | 2886 | | 2492 | 360 | 1 | 22 | 23 | 34 |
| | | Apr. 26, 1999 | 3.0 | | | | | | | | | | | |
| 98 | HJPBE39 | 203957 | Uni-ZAP XR | 108 | 1298 | 69 | 1298 | | 170 | 361 | 1 | | | 18 |
| | | Apr. 26, 1999 | | | | | | | | | | | | |
| 99 | HJPCH08 | 203959 | Uni-ZAP XR | 109 | 879 | 1 | 879 | | 374 | 362 | 1 | 10 | 11 | 117 |
| | | Apr. 26, 1999 | | | | | | | | | | | | |
| 100 | HKGBF25 | 203957 | pSport1 | 110 | 2007 | 1 | 2007 | 261 | 261 | 363 | 1 | 18 | 19 | 36 |
| | | Apr. 26, 1999 | | | | | | | | | | | | |
| 101 | HKIXC44 | 203957 | pBluescript | 111 | 788 | 343 | 750 | 572 | 572 | 364 | 1 | 26 | 27 | 36 |
| | | Apr. 26, 1999 | | | | | | | | | | | | |
| 102 | HKTAB41 | 203957 | Uni-ZAP XR | 112 | 797 | 1 | 797 | 172 | 172 | 365 | 1 | | | 10 |
| | | Apr. 26, 1999 | | | | | | | | | | | | |
| 103 | HLDBG17 | PTA-181 | pCMVSport | 113 | 652 | 1 | 652 | 184 | 184 | 366 | 1 | 23 | 24 | 41 |
| | | Jun. 07, 1999 | 3.0 | | | | | | | | | | | |
| 104 | HLDQU79 | 203959 | pCMVSport | 114 | 1488 | 1 | 1488 | 99 | 99 | 367 | 1 | 23 | 24 | 348 |
| | | Apr. 26, 1999 | 3.0 | | | | | | | | | | | |
| 104 | HLDQU79 | 203959 | pCMVSport | 253 | 3179 | 163 | 1474 | 75 | 75 | 506 | 1 | 29 | 30 | 348 |
| | | Apr. 26, 1999 | 3.0 | | | | | | | | | | | |
| 105 | HLDRT09 | 203957 | pCMVSport | 115 | 721 | 254 | 665 | 522 | 522 | 368 | 1 | 20 | 21 | 66 |
| | | Apr. 26, 1999 | 3.0 | | | | | | | | | | | |
| 106 | HLHAP05 | 203957 | Uni-ZAP XR | 116 | 1842 | 12 | 1842 | 45 | 45 | 369 | 1 | | | 14 |
| | | Apr. 26, 1999 | | | | | | | | | | | | |
| 107 | HLHCS23 | 203957 | Uni-ZAP XR | 117 | 1427 | 1 | 1427 | 25 | 25 | 370 | 1 | 24 | 25 | 34 |
| | | Apr. 26, 1999 | | | | | | | | | | | | |
| 108 | HLIBO72 | PTA-792 | pCMVSport 1 | 118 | 1768 | 1 | 1768 | 167 | 167 | 371 | 1 | 46 | 47 | 127 |
| | | Sep. 27, 1999 | | | | | | | | | | | | |
| 109 | HLICE88 | 203957 | pCMVSport 1 | 119 | 840 | 401 | 824 | | 708 | 372 | 1 | | | 2 |
| | | Apr. 26, 1999 | | | | | | | | | | | | |
| 110 | HLICO10 | 203957 | pCMVSport 1 | 120 | 903 | 1 | 903 | 441 | 441 | 373 | 1 | 23 | 24 | 72 |
| | | Apr. 26, 1999 | | | | | | | | | | | | |
| 111 | HLJBS28 | 203957 | pCMVSport 1 | 121 | 976 | 1 | 976 | 359 | 359 | 374 | 1 | | | 17 |
| | | Apr. 26, 1999 | | | | | | | | | | | | |
| 112 | HLMJB64 | 203957 | Lambda ZAP | 122 | 804 | 1 | 804 | 12 | 12 | 375 | 1 | 29 | 30 | 49 |
| | | Apr. 26, 1999 | II | | | | | | | | | | | |
| 113 | HLWAV47 | PTA-795 | pCMVSport | 123 | 2062 | 1 | 2062 | 200 | 200 | 376 | 1 | 29 | 30 | 32 |
| | | Sep. 27, 1999 | 3.0 | | | | | | | | | | | |
| 114 | HLYDF73 | 203957 | pSport1 | 124 | 626 | 1 | 626 | | 363 | 377 | 1 | 11 | 12 | 23 |
| | | Apr. 26, 1999 | | | | | | | | | | | | |
| 115 | HLYGE16 | 203957 | pSport1 | 125 | 752 | 1 | 752 | 406 | 406 | 378 | 1 | 17 | 18 | 73 |
| | | Apr. 26, 1999 | | | | | | | | | | | | |
| 116 | HLYGY91 | 203957 | pSport1 | 126 | 640 | 1 | 640 | 211 | 211 | 379 | 1 | 20 | 21 | 42 |
| | | Apr. 26, 1999 | | | | | | | | | | | | |
| 117 | HMCFH60 | 203957 | Uni-ZAP XR | 127 | 443 | 1 | 443 | 211 | 211 | 380 | 1 | 17 | 18 | 48 |
| | | Apr. 26, 1999 | | | | | | | | | | | | |
| 118 | HMDAB29 | 203957 | Uni-ZAP XR | 128 | 1190 | 1 | 1190 | 97 | 97 | 381 | 1 | 17 | 18 | 26 |
| | | Apr. 26, 1999 | | | | | | | | | | | | |
| 119 | HMDAD44 | 203957 | Uni-ZAP XR | 129 | 1204 | 1 | 1204 | 135 | 135 | 382 | 1 | | | 8 |
| | | Apr. 26, 1999 | | | | | | | | | | | | |
| 120 | HMEDI90 | 203957 | Lambda ZAP | 130 | 2276 | 362 | 2219 | | 622 | 383 | 1 | 12 | 13 | 17 |
| | | Apr. 26, 1999 | II | | | | | | | | | | | |
| 121 | HMIAK10 | 203957 | Uni-ZAP XR | 131 | 1064 | 1 | 1064 | 195 | 195 | 384 | 1 | 22 | 23 | 31 |
| | | Apr. 26, 1999 | | | | | | | | | | | | |
| 122 | HMIBF07 | 203957 | Uni-ZAP XR | 132 | 1738 | 1 | 1738 | 229 | 229 | 385 | 1 | | | 6 |
| | | Apr. 26, 1999 | | | | | | | | | | | | |
| 123 | HMICI80 | 203957 | Uni-ZAP XR | 133 | 1772 | 1 | 1772 | | 1149 | 386 | 1 | 10 | 11 | 32 |
| | | Apr. 26, 1999 | | | | | | | | | | | | |
| 124 | HMJAK70 | 203957 | pSport1 | 134 | 799 | 1 | 799 | 273 | 273 | 387 | 1 | | | 10 |
| | | Apr. 26, 1999 | | | | | | | | | | | | |
| 125 | HMTAB77 | 203979 | pCMVSport | 135 | 3839 | 1 | 3839 | 769 | 769 | 388 | 1 | 24 | 25 | 48 |
| | | Apr. 29, 1999 | 3.0 | | | | | | | | | | | |
| 126 | HMUAE26 | 203957 | pCMVSport | 136 | 2000 | 660 | 2000 | 710 | 710 | 389 | 1 | 20 | 21 | 30 |
| | | Apr. 26, 1999 | 3.0 | | | | | | | | | | | |
| 127 | HMUAN45 | 203918 | pCMVSport | 137 | 2709 | 1 | 2709 | 239 | 239 | 390 | 1 | 25 | 26 | 227 |
| | | Apr. 08, 1999 | 3.0 | | | | | | | | | | | |
| 128 | HMVBC31 | 203957 | pSport1 | 138 | 2556 | 1327 | 2546 | 1437 | 1437 | 391 | 1 | 32 | 33 | 40 |
| | | Apr. 26, 1999 | | | | | | | | | | | | |
| 129 | HMWBL03 | 203957 | Uni-ZAP XR | 139 | 2596 | 80 | 2596 | 137 | 137 | 392 | 1 | 1 | 2 | 397 |
| | | Apr. 26, 1999 | | | | | | | | | | | | |
| 130 | HMWCG28 | 203979 | Uni-ZAP XR | 140 | 893 | 1 | 893 | 78 | 78 | 393 | 1 | 30 | 31 | 40 |
| | | Apr. 29, 1999 | | | | | | | | | | | | |
| 131 | HNECW49 | 203957 | Uni-ZAP XR | 141 | 489 | 1 | 463 | 316 | 316 | 394 | 1 | 20 | 21 | 58 |
| | | Apr. 26, 1999 | | | | | | | | | | | | |
| 132 | HNFCY57 | PTA-791 | Uni-ZAP XR | 142 | 2847 | 1 | 2847 | 317 | 317 | 395 | 1 | 10 | 11 | 629 |
| | | Sep. 27, 1999 | | | | | | | | | | | | |
| 133 | HNFGR08 | 203957 | Uni-ZAP XR | 143 | 1436 | 1 | 1436 | | 314 | 396 | 1 | 17 | 18 | 43 |
| | | Apr. 26, 1999 | | | | | | | | | | | | |
| 134 | HNGAK51 | 203957 | Uni-ZAP XR | 144 | 915 | 1 | 915 | 248 | 248 | 397 | 1 | 23 | 24 | 32 |
| | | Apr. 26, 1999 | | | | | | | | | | | | |
| 135 | HNGAM58 | 203957 | Uni-ZAP XR | 145 | 1156 | 1 | 1156 | | 68 | 398 | 1 | 27 | 28 | 114 |
| | | Apr. 26, 1999 | | | | | | | | | | | | |
| 136 | HNGDX18 | PTA-181 | Uni-ZAP XR | 146 | 1425 | 1 | 1425 | 237 | 237 | 399 | 1 | 30 | 31 | 243 |
| | | Jun. 07, 1999 | | | | | | | | | | | | |
| 136 | HNGDX18 | PTA-181 | Uni-ZAP XR | 254 | 1411 | 1 | 1411 | 231 | 231 | 507 | 1 | 18 | 19 | 132 |
| | | Jun. 07, 1999 | | | | | | | | | | | | |
| 137 | HNGEQ75 | 203957 | Uni-ZAP XR | 147 | 1029 | 1 | 1029 | | 30 | 400 | 1 | 21 | 22 | 22 |
| | | Apr. 26, 1999 | | | | | | | | | | | | |
| 138 | HNGFR54 | 203957 | Uni-ZAP XR | 148 | 495 | 1 | 495 | | 73 | 401 | 1 | 36 | 37 | 52 |
| | | Apr. 26, 1999 | | | | | | | | | | | | |
| 139 | HNGGA68 | 203957 | Uni-ZAP XR | 149 | 585 | 1 | 585 | 184 | 184 | 402 | 1 | | | 32 |
| | | Apr. 26, 1999 | | | | | | | | | | | | |
| 140 | HNGHZ69 | PTA-795 | Uni-ZAP XR | 150 | 1195 | 1 | 1195 | | 25 | 403 | 1 | | | 9 |
| | | Sep. 27, 1999 | | | | | | | | | | | | |
| 141 | HNGKT41 | 203959 | Uni-ZAP XR | 151 | 1048 | 1 | 1048 | 415 | 415 | 404 | 1 | 17 | 18 | 45 |
| | | Apr. 26, 1999 | | | | | | | | | | | | |
| 142 | HNGMW45 | 203959 | Uni-ZAP XR | 152 | 1530 | 1 | 1530 | 452 | 452 | 405 | 1 | 26 | 27 | 43 |
| | | Apr. 26, 1999 | | | | | | | | | | | | |
| 143 | HNGNO53 | 203959 | Uni-ZAP XR | 153 | 825 | 1 | 825 | 467 | 467 | 406 | 1 | 15 | 16 | 34 |
| | | Apr. 26, 1999 | | | | | | | | | | | | |
| 144 | HNGPJ25 | 203959 | Uni-ZAP XR | 154 | 853 | 129 | 853 | 544 | 544 | 407 | 1 | 20 | 21 | 25 |
| | | Apr. 26, 1999 | | | | | | | | | | | | |
| 145 | HNHFE71 | 203959 | Uni-ZAP XR | 155 | 903 | 1 | 903 | 598 | 598 | 408 | 1 | | | 21 |
| | | Apr. 26, 1999 | | | | | | | | | | | | |
| 146 | HNHGK22 | 203918 | Uni-ZAP XR | 156 | 909 | 1 | 909 | 239 | 239 | 409 | 1 | 26 | 27 | 64 |
| | | Apr. 08, 1999 | | | | | | | | | | | | |
| 147 | HNHKS19 | 203959 | Uni-ZAP XR | 157 | 790 | 1 | 790 | 192 | 192 | 410 | 1 | 26 | 27 | 41 |
| | | Apr. 26, 1999 | | | | | | | | | | | | |
| 148 | HNHKV56 | 203959 | Uni-ZAP XR | 158 | 1653 | 1 | 1653 | 294 | 294 | 411 | 1 | 31 | 32 | 66 |
| | | Apr. 26, 1999 | | | | | | | | | | | | |
| 149 | HOACG07 | 203959 | Uni-ZAP XR | 159 | 1298 | 772 | 1249 | 778 | 778 | 412 | 1 | 21 | 22 | 123 |
| | | Apr. 26, 1999 | | | | | | | | | | | | |
| 150 | HODBB70 | 203918 | Uni-ZAP XR | 160 | 604 | 1 | 604 | | 173 | 413 | 1 | 7 | 8 | 27 |
| | | Apr. 08, 1999 | | | | | | | | | | | | |
| 151 | HOEBK60 | 203959 | Uni-ZAP XR | 161 | 2218 | 1449 | 2216 | 1714 | 1714 | 414 | 1 | 39 | 40 | 43 |
| | | Apr. 26, 1999 | | | | | | | | | | | | |
| 152 | HOFNB74 | 203959 | pCMVSport | 162 | 1036 | 1 | 1036 | 138 | 138 | 415 | 1 | 24 | 25 | 39 |
| | | Apr. 26, 1999 | 2.0 | | | | | | | | | | | |
| 153 | HOSDO75 | PTA-181 | Uni-ZAP XR | 163 | 902 | 1 | 902 | 88 | 88 | 416 | 1 | | | 28 |
| | | Jun. 07, 1999 | | | | | | | | | | | | |
| 154 | HOSEI81 | 203918 | Uni-ZAP XR | 164 | 897 | 1 | 897 | 203 | 203 | 417 | 1 | 22 | 23 | 83 |
| | | Apr. 08, 1999 | | | | | | | | | | | | |
| 155 | HOUDE92 | 203918 | Uni-ZAP XR | 165 | 1284 | 1 | 1282 | | 70 | 418 | 1 | 6 | 7 | 88 |
| | | Apr. 08, 1999 | | | | | | | | | | | | |
| 156 | HOVBD85 | 203918 | pSport1 | 166 | 1129 | 1 | 1129 | 252 | 252 | 419 | 1 | 19 | 20 | 26 |
| | | Apr. 08, 1999 | | | | | | | | | | | | |
| 157 | HPCAB41 | 203918 | Uni-ZAP XR | 167 | 2587 | 1 | 2587 | 184 | 184 | 420 | 1 | | | 25 |
| | | Apr. 08, 1999 | | | | | | | | | | | | |
| 158 | HPEAD23 | 203959 | Uni-ZAP XR | 168 | 582 | 1 | 582 | 188 | 188 | 421 | 1 | 13 | 14 | 93 |
| | | Apr. 26, 1999 | | | | | | | | | | | | |
| 159 | HPFCI36 | PTA-181 | Uni-ZAP XR | 169 | 879 | 1 | 879 | 94 | 94 | 422 | 1 | 17 | 18 | 19 |
| | | Jun. 07, 1999 | | | | | | | | | | | | |
| 160 | HPFDI37 | PTA-181 | Uni-ZAP XR | 170 | 352 | 1 | 352 | 38 | 38 | 423 | 1 | | | 17 |
| | | Jun. 07, 1999 | | | | | | | | | | | | |
| 161 | HPIAA80 | 203959 | Uni-ZAP XR | 171 | 919 | 312 | 919 | | 314 | 424 | 1 | 13 | 14 | 37 |
| | | Apr. 26, 1999 | | | | | | | | | | | | |
| 162 | HPJCW58 | 203918 | Uni-ZAP XR | 172 | 1165 | 1 | 1165 | 177 | 177 | 425 | 1 | 19 | 20 | 28 |
| | | Apr. 08, 1999 | | | | | | | | | | | | |
| 163 | HPMFH77 | 203918 | Uni-ZAP XR | 173 | 1891 | 1 | 1891 | | 251 | 426 | 1 | 11 | 12 | 35 |
| | | Apr. 08, 1999 | | | | | | | | | | | | |
| 164 | HPQCB83 | 203918 | Lambda ZAP | 174 | 2267 | 1 | 2267 | 85 | 85 | 427 | 1 | 30 | 31 | 34 |
| | | Apr. 08, 1999 | II | | | | | | | | | | | |
| 165 | HPRBH85 | 203959 | Uni-ZAP XR | 175 | 1673 | 558 | 1648 | 684 | 684 | 428 | 1 | 18 | 19 | 134 |
| | | Apr. 26, 1999 | | | | | | | | | | | | |
| 166 | HPRCD35 | PTA-181 | Uni-ZAP XR | 176 | 709 | 1 | 689 | | 265 | 429 | 1 | 16 | 17 | 35 |
| | | Jun. 07, 1999 | | | | | | | | | | | | |
| 167 | HPTRM02 | 203959 | pBluescript | 177 | 1760 | 658 | 1680 | 885 | 885 | 430 | 1 | 16 | 17 | 80 |
| | | Apr. 26, 1999 | | | | | | | | | | | | |
| 168 | HRADA42 | 203959 | pCMVSport | 178 | 1135 | 1 | 1135 | | 122 | 431 | 1 | 24 | 25 | 44 |
| | | Apr. 26, 1999 | 3.0 | | | | | | | | | | | |
| 169 | HRADF49 | PTA-181 | pCMVSport | 179 | 2704 | 1 | 2684 | 169 | 169 | 432 | 1 | 39 | 40 | 253 |
| | | Jun. 07, 1999 | 3.0 | | | | | | | | | | | |
| 170 | HRADN25 | 203959 | pCMVSport | 180 | 1225 | 17 | 1206 | 198 | 198 | 433 | 1 | 17 | 18 | 65 |
| | | Apr. 26, 1999 | 3.0 | | | | | | | | | | | |
| 171 | HRDDQ39 | 203959 | Uni-ZAP XR | 181 | 776 | 1 | 773 | | 215 | 434 | 1 | 17 | 18 | 46 |
| | | Apr. 26, 1999 | | | | | | | | | | | | |
| 172 | HRDER22 | 203959 | Uni-ZAP XR | 182 | 543 | 1 | 543 | | 32 | 435 | 1 | | | 9 |
| | | Apr. 26, 1999 | | | | | | | | | | | | |
| 173 | HRDEX93 | 203959 | Uni-ZAP XR | 183 | 1681 | 711 | 1638 | 649 | 649 | 436 | 1 | 20 | 21 | 72 |
| | | Apr. 26, 1999 | | | | | | | | | | | | |
| 174 | HRDFK37 | 203959 | Uni-ZAP XR | 184 | 728 | 1 | 726 | 120 | 120 | 437 | 1 | | | 10 |
| | | Apr. 26, 1999 | | | | | | | | | | | | |
| 175 | HRTAP63 | 203979 | pBluescript | 185 | 2576 | 891 | 2576 | 959 | 959 | 438 | 1 | 28 | 29 | 42 |
| | | Apr. 29, 1999 | SK− | | | | | | | | | | | |
| 176 | HSAVA08 | 203918 | Uni-ZAP XR | 186 | 1061 | 1 | 1061 | | 66 | 439 | 1 | 17 | 18 | 26 |
| | | Apr. 08, 1999 | | | | | | | | | | | | |
| 177 | HSAVW42 | 203959 | Uni-ZAP XR | 187 | 595 | 1 | 595 | 129 | 129 | 440 | 1 | 16 | 17 | 22 |
| | | Apr. 26, 1999 | | | | | | | | | | | | |
| 178 | HSAYC41 | 203959 | Uni-ZAP XR | 188 | 214 | 1 | 214 | 106 | 106 | 441 | 1 | 16 | 17 | 36 |
| | | Apr. 26, 1999 | | | | | | | | | | | | |
| 179 | HSDZM54 | 203959 | pBluescript | 189 | 554 | 1 | 554 | 445 | 445 | 442 | 1 | 15 | 16 | 36 |
| | | Apr. 26, 1999 | | | | | | | | | | | | |
| 180 | HSHBF76 | 203959 | Uni-ZAP XR | 190 | 1273 | 1 | 1213 | | 129 | 443 | 1 | 7 | 8 | 10 |
| | | Apr. 26, 1999 | | | | | | | | | | | | |
| 181 | HSIFG47 | 203959 | Uni-ZAP XR | 191 | 882 | 1 | 882 | 304 | 304 | 444 | 1 | | | 13 |
| | | Apr. 26, 1999 | | | | | | | | | | | | |
| 182 | HSJBY32 | 203918 | Uni-ZAP XR | 192 | 1648 | 1 | 1648 | 257 | 257 | 445 | 1 | 19 | 20 | 91 |
| | | Apr. 08, 1999 | | | | | | | | | | | | |
| 183 | HSKDR27 | 203918 | Uni-ZAP XR | 193 | 762 | 1 | 762 | | 473 | 446 | 1 | 11 | 12 | 27 |
| | | Apr. 08, 1999 | | | | | | | | | | | | |
| 184 | HSNAP85 | 203959 | Uni-ZAP XR | 194 | 1286 | 735 | 1286 | | 941 | 447 | 1 | | | 4 |
| | | Apr. 26, 1999 | | | | | | | | | | | | |
| 185 | HSNBM34 | 203959 | Uni-ZAP XR | 195 | 2186 | 1391 | 1765 | | 1508 | 448 | 1 | 14 | 15 | 62 |
| | | Apr. 26, 1999 | | | | | | | | | | | | |
| 186 | HSQDO85 | PTA-181 | Uni-ZAP XR | 196 | 1210 | 1 | 1210 | 133 | 133 | 449 | 1 | | | 11 |
| | | Jun. 07, 1999 | | | | | | | | | | | | |
| 187 | HSRBE06 | PTA-791 | Uni-ZAP XR | 197 | 1633 | 13 | 1633 | | 128 | 450 | 1 | | | 21 |
| | | Sep. 27, 1999 | | | | | | | | | | | | |
| 188 | HSSDI26 | 203918 | Uni-ZAP XR | 198 | 1406 | 1 | 1406 | 253 | 253 | 451 | 1 | | | 21 |
| | | Apr. 08, 1999 | | | | | | | | | | | | |
| 189 | HSSEA64 | PTA-181 | Uni-ZAP XR | 199 | 1282 | 1 | 1274 | 58 | 58 | 452 | 1 | 16 | 17 | 62 |
| | | Jun. 07, 1999 | | | | | | | | | | | | |
| 190 | HSSEF77 | 203959 | Uni-ZAP XR | 200 | 1053 | 1 | 1053 | | 184 | 453 | 1 | 25 | 26 | 60 |
| | | Apr. 26, 1999 | | | | | | | | | | | | |
| 191 | HSSFE38 | 203959 | Uni-ZAP XR | 201 | 1238 | 85 | 1133 | | 264 | 454 | 1 | 19 | 20 | 125 |
| | | Apr. 26, 1999 | | | | | | | | | | | | |
| 192 | HSXCP38 | PTA-795 | Uni-ZAP XR | 202 | 2206 | 1 | 2206 | | 211 | 455 | 1 | | | 14 |
| | | Sep. 27, 1999 | | | | | | | | | | | | |
| 193 | HT1SC27 | 203959 | Uni-ZAP XR | 203 | 1198 | 1 | 1198 | 366 | 366 | 456 | 1 | 19 | 20 | 27 |
| | | Apr. 26, 1999 | | | | | | | | | | | | |
| 194 | HT4FV41 | PTA-181 | Uni-ZAP XR | 204 | 1764 | 1 | 1764 | | 39 | 457 | 1 | 16 | 17 | 137 |
| | | Jun. 07, 1999 | | | | | | | | | | | | |
| 195 | HT5GR59 | 203959 | Uni-ZAP XR | 205 | 1743 | 1 | 1743 | 135 | 135 | 458 | 1 | 23 | 24 | 31 |
| | | Apr. 26, 1999 | | | | | | | | | | | | |
| 196 | HTEAG62 | 203959 | Uni-ZAP XR | 206 | 2221 | 57 | 2221 | 1017 | 1017 | 459 | 1 | 20 | 21 | 22 |
| | | Apr. 26, 1999 | | | | | | | | | | | | |
| 197 | HTEEW69 | 203959 | Uni-ZAP XR | 207 | 1282 | 110 | 1263 | 182 | 182 | 460 | 1 | 30 | 31 | 323 |
| | | Apr. 26, 1999 | | | | | | | | | | | | |
| 198 | HTEGS07 | 203959 | Uni-ZAP XR | 208 | 806 | 1 | 806 | | 493 | 461 | 1 | 20 | 21 | 37 |
| | | Apr. 26, 1999 | | | | | | | | | | | | |
| 199 | HTEGS11 | PTA-181 | Uni-ZAP XR | 209 | 981 | 1 | 981 | | 173 | 462 | 1 | | | 7 |
| | | Jun. 07, 1999 | | | | | | | | | | | | |
| 200 | HTEHU59 | 203959 | Uni-ZAP XR | 210 | 1523 | 1 | 1504 | 170 | 170 | 463 | 1 | 19 | 20 | 34 |
| | | Apr. 26, 1999 | | | | | | | | | | | | |
| 201 | HTEJD29 | 203959 | Uni-ZAP XR | 211 | 1324 | 1 | 1324 | 101 | 101 | 464 | 1 | | | 23 |
| | | Apr. 26, 1999 | | | | | | | | | | | | |
| 202 | HTEKM46 | PTA-181 | Uni-ZAP XR | 212 | 2116 | 1 | 2116 | 171 | 171 | 465 | 1 | 24 | 25 | 38 |
| | | Jun. 07, 1999 | | | | | | | | | | | | |
| 203 | HTENR63 | PTA-792 | Uni-ZAP XR | 213 | 1591 | 1 | 1591 | 132 | 132 | 466 | 1 | 20 | 21 | 56 |
| | | Sep. 27, 1999 | | | | | | | | | | | | |
| 204 | HTGGM44 | 203959 | Uni-ZAP XR | 214 | 3016 | 1 | 2761 | 179 | 179 | 467 | 1 | 18 | 19 | 84 |
| | | Apr. 26, 1999 | | | | | | | | | | | | |
| 205 | HTHBZ06 | 203959 | Uni-ZAP XR | 215 | 623 | 193 | 619 | 318 | 318 | 468 | 1 | | | 1 |
| | | Apr. 26, 1999 | | | | | | | | | | | | |
| 206 | HTLAP64 | 203918 | Uni-ZAP XR | 216 | 1092 | 1 | 1092 | 173 | 173 | 469 | 1 | 19 | 20 | 20 |
| | | Apr. 08, 1999 | | | | | | | | | | | | |
| 207 | HTLBT80 | 203959 | Uni-ZAP XR | 217 | 2101 | 817 | 1881 | 912 | 912 | 470 | 1 | 27 | 28 | 129 |
| | | Apr. 26, 1999 | | | | | | | | | | | | |
| 208 | HTLDU78 | 203918 | Uni-ZAP XR | 218 | 1318 | 1 | 1318 | 219 | 219 | 471 | 1 | | | 8 |
| | | Apr. 08, 1999 | | | | | | | | | | | | |
| 209 | HTLEM16 | 203959 | Uni-ZAP XR | 219 | 1915 | 1158 | 1755 | 1220 | 1220 | 472 | 1 | 27 | 28 | 69 |
| | | Apr. 26, 1999 | | | | | | | | | | | | |
| 210 | HTLFA13 | 203918 | Uni-ZAP XR | 220 | 1160 | 1 | 1160 | | 209 | 473 | 1 | 8 | 9 | 31 |
| | | Apr. 08, 1999 | | | | | | | | | | | | |
| 211 | HTLGI89 | 203959 | Uni-ZAP XR | 221 | 2377 | 1205 | 2377 | 1802 | 1802 | 474 | 1 | 16 | 17 | 37 |
| | | Apr. 26, 1999 | | | | | | | | | | | | |
| 212 | HTLIF11 | 203959 | Uni-ZAP XR | 222 | 1968 | 860 | 1968 | 933 | 933 | 475 | 1 | 33 | 34 | 38 |
| | | Apr. 26, 1999 | | | | | | | | | | | | |
| 213 | HTNBK13 | 203959 | pBluescript | 223 | 1160 | 295 | 1148 | 534 | 534 | 476 | 1 | 16 | 17 | 21 |
| | | Apr. 26, 1999 | SK− | | | | | | | | | | | |
| 214 | HTOAM11 | 203918 | Uni-ZAP XR | 224 | 1200 | 1 | 1200 | 89 | 89 | 477 | 1 | 24 | 25 | 34 |
| | | Apr. 08, 1999 | | | | | | | | | | | | |
| 215 | HTODH83 | 203918 | Uni-ZAP XR | 225 | 1981 | 1 | 1981 | 103 | 103 | 478 | 1 | 21 | 22 | 32 |
| | | Apr. 08, 1999 | | | | | | | | | | | | |
| 216 | HTPCO75 | PTA-181 | Uni-ZAP XR | 226 | 1467 | 1 | 1467 | | 73 | 479 | 1 | 23 | 24 | 40 |
| | | Jun. 07, 1999 | | | | | | | | | | | | |
| 217 | HTSFJ32 | 203918 | pBluescript | 227 | 1257 | 517 | 1257 | 93 | 93 | 480 | 1 | | | 18 |
| | | Apr. 08, 1999 | | | | | | | | | | | | |
| 218 | HTTCB60 | PTA-181 | Uni-ZAP XR | 228 | 1504 | 1 | 1504 | 84 | 84 | 481 | 1 | 17 | 18 | 266 |
| | | Jun. 07, 1999 | | | | | | | | | | | | |
| 219 | HTTEE41 | 203959 | Uni-ZAP XR | 229 | 1973 | 864 | 1968 | | 1171 | 482 | 1 | | | 8 |
| | | Apr. 26, 1999 | | | | | | | | | | | | |
| 220 | HTTEZ02 | 203918 | Uni-ZAP XR | 230 | 1880 | 1 | 1880 | 250 | 250 | 483 | 1 | 21 | 22 | 28 |
| | | Apr. 08, 1999 | | | | | | | | | | | | |
| 221 | HTWEH94 | 203918 | pSport1 | 231 | 1361 | 1 | 1361 | 66 | 66 | 484 | 1 | 43 | 44 | 81 |
| | | Arp. 08, 1999 | | | | | | | | | | | | |
| 222 | HTXDC77 | 203979 | Uni-ZAP XR | 232 | 1441 | 159 | 1400 | 65 | 65 | 485 | 1 | 18 | 19 | 151 |
| | | Apr. 29, 1999 | | | | | | | | | | | | |
| 223 | HTXDG92 | 203959 | Uni-ZAP XR | 233 | 1162 | 1 | 1162 | | 216 | 486 | 1 | 24 | 25 | 66 |
| | | Apr. 26, 1999 | | | | | | | | | | | | |
| 224 | HTXET11 | 203918 | Uni-ZAP XR | 234 | 989 | 1 | 989 | 178 | 178 | 487 | 1 | 22 | 23 | 29 |
| | | Apr. 08, 1999 | | | | | | | | | | | | |
| 225 | HTXFA72 | PTA-181 | Uni-ZAP XR | 235 | 1861 | 1 | 1861 | 192 | 192 | 488 | 1 | 17 | 18 | 29 |
| | | Jun. 07, 1999 | | | | | | | | | | | | |
| 226 | HTXJY08 | 203959 | Uni-ZAP XR | 236 | 1187 | 12 | 1187 | 108 | 108 | 489 | 1 | | | 16 |
| | | Apr. 26, 1999 | | | | | | | | | | | | |
| 227 | HTXMZ07 | 203959 | Uni-ZAP XR | 237 | 1652 | 189 | 1640 | 319 | 319 | 490 | 1 | 22 | 23 | 37 |
| | | Apr. 26, 1999 | | | | | | | | | | | | |
| 228 | HUKBT67 | 203959 | Lambda ZAP | 238 | 2069 | 74 | 2052 | | 273 | 491 | 1 | 21 | 22 | 39 |
| | | Apr. 26, 1999 | II | | | | | | | | | | | |
| 229 | HUKDF20 | 203918 | Lambda ZAP | 239 | 1105 | 1 | 1105 | 214 | 214 | 492 | 1 | 20 | 21 | 33 |
| | | Apr. 08, 1999 | II | | | | | | | | | | | |
| 230 | HUSCJ14 | PTA- | Lambda ZAP | 240 | 3342 | 1 | 3342 | 74 | 74 | 493 | 1 | 30 | 31 | 196 |
| | | 1838 | II | | | | | | | | | | | |
| | | May 09, 2000 | | | | | | | | | | | | |
| 231 | HUSGL67 | 203918 | pSport1 | 241 | 1008 | 65 | 1008 | 350 | 350 | 494 | 1 | 21 | 22 | 47 |
| | | Apr. 08, 1999 | | | | | | | | | | | | |
| 232 | HUSGU40 | 203959 | pSport1 | 242 | 1054 | 1 | 1054 | | 500 | 495 | 1 | 20 | 21 | 46 |
| | | Apr. 26, 1999 | | | | | | | | | | | | |
| 233 | HUSIR18 | 203959 | pSport1 | 243 | 876 | 1 | 876 | 83 | 83 | 496 | 1 | 16 | 17 | 22 |
| | | Apr. 26, 1999 | | | | | | | | | | | | |
| 234 | HUVDJ48 | 203918 | Uni-ZAP XR | 244 | 1827 | 1 | 1827 | 196 | 196 | 497 | 1 | | | 5 |
| | | Apr. 08, 1999 | | | | | | | | | | | | |
| 235 | HWDAC26 | 203959 | pCMVSport | 245 | 1958 | 1 | 1958 | 242 | 242 | 498 | 1 | 25 | 26 | 35 |
| | | Apr. 26, 1999 | 3.0 | | | | | | | | | | | |
| 236 | HWDAJ01 | 203959 | pCMVSport | 246 | 781 | 1 | 781 | 288 | 288 | 499 | 1 | | | 24 |
| | | Apr. 26, 1999 | 3.0 | | | | | | | | | | | |
| 237 | HBDAB91 | 203917 | pSport1 | 247 | 1007 | 320 | 1007 | 671 | 671 | 500 | 1 | 19 | 20 | 29 |
| | | Apr. 08, 1999 | | | | | | | | | | | | |
| 237 | HBDAB91 | 203917 | pSport1 | 255 | 687 | 1 | 687 | 351 | 351 | 508 | 1 | 19 | 20 | 29 |
| | | Apr. 08, 1999 | | | | | | | | | | | | |
| 238 | HILCA24 | 203960 | pBluescript | 248 | 1982 | 153 | 1982 | 191 | 191 | 501 | 1 | 29 | 30 | 327 |
| | | Apr. 26, 1999 | SK− | | | | | | | | | | | |
| 238 | HILCA24 | 203960 | pBluescript | 256 | 1980 | 151 | 1976 | 189 | 189 | 509 | 1 | 29 | 30 | 327 |
| | | Apr. 26, 1999 | SK− | | | | | | | | | | | |
| 239 | HYABC84 | 203959 | pCMVSport | 249 | 1478 | 833 | 1306 | 1080 | 1080 | 502 | 1 | 28 | 29 | 62 |
| | | Apr. 26, 1999 | 3.0 | | | | | | | | | | | |
| 239 | HYABC84 | 203959 | pCMVSport | 257 | 1338 | 768 | 1238 | 1015 | 1015 | 510 | 1 | 28 | 29 | 62 |
| | | Apr. 26, 1999 | 3.0 | | | | | | | | | | | |
| 240 | HE2CA60 | 203960 | Uni-ZAP XR | 250 | 3034 | 1679 | 3034 | 1731 | 1731 | 503 | 1 | | | 7 |
| | | Apr. 26, 1999 | | | | | | | | | | | | |
| 240 | HE2CA60 | 203960 | Uni-ZAP XR | 258 | 1663 | 308 | 1663 | 360 | 360 | 511 | 1 | | | 7 |
| | | Apr. 26, 1999 | | | | | | | | | | | | |
| 241 | HPQAX38 | 203979 | Lambda ZAP | 251 | 1158 | 41 | 1158 | | 295 | 504 | 1 | 10 | 11 | 16 |
| | | Apr. 29, 1999 | II | | | | | | | | | | | |
| 241 | HPQAX38 | 203979 | Lambda ZAP | 259 | 1157 | 41 | 1157 | | 295 | 512 | 1 | 10 | 11 | 16 |
| | | Apr. 29, 1999 | II | | | | | | | | | | | |
| 242 | HE8FD92 | 203979 | Uni-ZAP XR | 252 | 3977 | 1986 | 3960 | 2141 | 2141 | 505 | 1 | 25 | 26 | 43 |
| | | Apr. 29, 1999 | | | | | | | | | | | | |
| 242 | HE8FD92 | 203979 | Uni-ZAP XR | 260 | 1995 | 1 | 1978 | 157 | 157 | 513 | 1 | 25 | 26 | 43 |
| | | Apr. 29, 1999 | | | | | | | | | | | | |
| 242 | HE8FD92 | 203979 | Uni-ZAP XR | 261 | 4102 | 2114 | 4085 | 2268 | 2268 | 514 | 1 | 25 | 26 | 43 |
| | | Apr. 29, 1999 | | | | | | | | | | | | |
| 242 | HE8FD92 | 203979 | Uni-ZAP XR | 262 | 4907 | 2918 | 4890 | | 2 | 515 | 1 | 1 | 2 | 471 |
| | | Apr. 29, 1999 | | | | | | | | | | | | |
| 242 | HE8FD92 | 203979 | Uni-ZAP XR | 263 | 2908 | 918 | 2891 | 1074 | 1074 | 516 | 1 | 25 | 26 | 43 |
| | | Apr. 29, 1999 | | | | | | | | | | | | |

Table 1B (Comprised of Tables 1B.1 and 1B.2)

[0097] The first column in Table 1B.1 and Table 1B.2 provides the gene number in the application corresponding to the clone identifier. The second column in Table 1B. 1 and Table 1B.2 provides a unique “Clone ID:” for the cDNA clone related to each contig sequence disclosed in Table 1B. 1 and Table 1B.2. This clone ID references the cDNA clone which contains at least the 5′ most sequence of the assembled contig and at least a portion of SEQ ID NO:X as determined by directly sequencing the referenced clone. The referenced clone may have more sequence than described in the sequence listing or the clone may have less. In the vast majority of cases, however, the clone is believed to encode a full-length polypeptide. In the case where a clone is not full-length, a full-length cDNA can be obtained by methods described elsewhere herein. The third column in Table 1B.1 and Table 1B.2 provides a unique “Contig ID” identification for each contig sequence. The fourth column in Table 1B.1 and Table 1B.2 provides the “SEQ ID NO:” identifier for each of the contig polynucleotide sequences disclosed in Table 1B.

[0098] Table 1B.1

[0099] The fifth column in Table 1B. 1, “ORF (From-To)”, provides the location (i.e., nucleotide position numbers) within the polynucleotide sequence “SEQ ID NO:X” that delineate the preferred open reading frame (ORF) shown in the sequence listing and referenced in Table 1B.1, column 6, as SEQ ID NO:Y. Where the nucleotide position number “To” is lower than the nucleotide position number “From”, the preferred ORF is the reverse complement of the referenced polynucleotide sequence. The sixth column in Table 1B.1 provides the corresponding SEQ ID NO:Y for the polypeptide sequence encoded by the preferred ORF delineated in column 5. In one embodiment, the invention provides an amino acid sequence comprising, or alternatively consisting of, a polypeptide encoded by the portion of SEQ ID NO:X delineated by “ORF (From-To)”. Also provided are polynucleotides encoding such amino acid sequences and the complementary strand thereto. Column 7 in Table 1B.1 lists residues comprising epitopes contained in the polypeptides encoded by the preferred ORF (SEQ ID NO:Y), as predicted using the algorithm of Jameson and Wolf, (1988) Comp. Appl. Biosci. 4:181-186. The Jameson-Wolf antigenic analysis was performed using the computer program PROTEAN (Version 3.11 for the Power MacIntosh, DNASTAR, Inc., 1228 South Park Street Madison, Wis.). In specific embodiments, polypeptides of the invention comprise, or alternatively consist of, at least one, two, three, four, five or more of the predicted epitopes as described in Table 1B. It will be appreciated that depending on the analytical criteria used to predict antigenic determinants, the exact address of the determinant may vary slightly.

[0100] Column 8 in Table 1B.1 provides a chromosomal map location for certain polynucleotides of the invention. Chromosomal location was determined by finding exact matches to EST and cDNA sequences contained in the NCBI (National Center for Biotechnology Information) UniGene database. Each sequence in the UniGene database is assigned to a “cluster”; all of the ESTs, cDNAs, and STSs in a cluster are believed to be derived from a single gene. Chromosomal mapping data is often available for one or more sequence(s) in a UniGene cluster; this data (if consistent) is then applied to the cluster as a whole. Thus, it is possible to infer the chromosomal location of a new polynucleotide sequence by determining its identity with a mapped UniGene cluster.

[0101] A modified version of the computer program BLASTN (Altshul, et al., J. Mol. Biol. 215:403-410 (1990), and Gish, and States, Nat. Genet. 3:266-272) (1993) was used to search the UniGene database for EST or cDNA sequences that contain exact or near-exact matches to a polynucleotide sequence of the invention (the ‘Query’). A sequence from the UniGene database (the ‘Subject’) was said to be an exact match if it contained a segment of 50 nucleotides in length such that 48 of those nucleotides were in the same order as found in the Query sequence. If all of the matches that met this criteria were in the same UniGene cluster, and mapping data was available for this cluster, it is indicated in Table 1B under the heading “Cytologic Band”. Where a cluster bad been further localized to a distinct cytologic band, that band is disclosed; where no banding information was available, but the gene had been localized to a single chromosome, the chromosome is disclosed.

[0102] Once a presumptive chromosomal location was determined for a polynucleotide of the invention, an associated disease locus was identified by comparison with a database of diseases which have been experimentally associated with genetic loci. The database used was the Morbid Map, derived from OMIM™ and National Center for Biotechnology Information, National Library of Medicine (Bethesda, Md.) 2000;. If the putative chromosomal location of a polynucleotide of the invention (Query sequence) was associated with a disease in the Morbid Map database, an OMIM reference identification number was noted in column 9, Table 1B.1, labelled “OMIM Disease Reference(s). Table 5 is a key to the OMIM reference identification numbers (column 1), and provides a description of the associated disease in Column 2.

[0103] Table 1B.2

[0104] Column 5, in Table 1B.2, provides an expression profile and library code:count for each of the contig sequences (SEQ ID NO:X) disclosed in Table 1B, which can routinely be combined with the information provided in Table 4 and used to determine the tissues, cells, and/or cell line libraries which predominantly express the polynucleotides of the invention. The first number in Table 1B.2, column 5 (preceding the colon), represents the tissue/cell source identifier code corresponding to the code and description provided in Table 4. The second number in column 5 (following the colon) represents the number of times a sequence corresponding to the reference polynucleotide sequence was identified in the corresponding tissue/cell source. Those tissue/cell source identifier codes in which the first two letters are “AR” designate information generated using DNA array technology. Utilizing this technology, cDNAs were amplified by PCR and then transferred, in duplicate, onto the array. Gene expression was assayed through hybridization of first strand cDNA probes to the DNA array. cDNA probes were generated from total RNA extracted from a variety of different tissues and cell lines. Probe synthesis was performed in the presence of ³³P dCTP, using oligo (dT) to prime reverse transcription. After hybridization, high stringency washing conditions were employed to remove non-specific hybrids from the array. The remaining signal, emanating from each gene target, was measured using a Phosphorimager. Gene expression was reported as Phosphor Stimulating Luminescence (PSL) which reflects the level of phosphor signal generated from the probe hybridized to each of the gene targets represented on the array. A local background signal subtraction was performed before the total signal generated from each array was used to normalize gene expression between the different hybridizations. The value presented after “[array code]:” represents the mean of the duplicate values, following background subtraction and probe normalization. One of skill in the art could routinely use this information to identify normal and/or diseased tissue(s) which show a predominant expression pattern of the corresponding polynucleotide of the invention or to identify polynucleotides which show predominant and/or specific tissue and/or cell expression.

TABLE 1B.1

| | | | | | AA | | | |
|---|---|---|---|---|---|---|---|---|
| | | | SEQ | | SEQ | | | |
| | | | ID | | ID | | | OMIM |
| Gene | cDNA | Contig | NO: | ORF | NO: | | Cytologic | Disease |
| No: | Clone ID | ID: | X | (From-To) | Y | Predicted Epitopes | Band | Reference(s): |
| 1 | H6BSF56 | 762968 | 11 | 83-508 | 264 | Asn-131 to Met-140. | | |
| 2 | H6EDM64 | 841331 | 12 | 1448-1468 | 265 | | 11q13 | 102200, 106100, 131100, 131100, 131100, |
| | | | | | | | | 133780, 147050, 153700, 161015, 164009, |
| | | | | | | | | 168461, 168461, 168461, 180721, 180840, |
| | | | | | | | | 191181, 193235, 209901, 232600, 259700, |
| | | | | | | | | 259770, 600045, 600319, 600528, 601884 |
| 3 | H6EEC72 | 889401 | 13 | 263-319 | 266 | | 19q13.4 | 134790, 191044, 600040, 600138 |
| 4 | H6EEU40 | 757048 | 14 | 175-318 | 267 | | 11q12.1 | 106100, 147050, 259700, 259770, 600045, |
| | | | | | | | | 601884 |
| 5 | HACAB68 | 584773 | 15 | 135-371 | 268 | Leu-6 to Ser-12. | | |
| 6 | HACBJ56 | 847112 | 16 | 250-327 | 269 | Arg-14 to Ile-24. | | |
| 7 | HADMB15 | 847116 | 17 | 238-300 | 270 | | | |
| 8 | HAGFS57 | 847120 | 18 | 241-405 | 271 | Met-1 to Lys-6. | 15q15.3 | 114240, 224120, 600839, 602099 |
| 9 | HAGHN57 | 773286 | 19 | 900-932 | 272 | | 7q22-q32 | 126650, 126650, 154276, 173360, 173360, |
| | | | | | | | | 180105, 190900, 222800, 246900, 602136, |
| | | | | | | | | 602136, 602136, 602447 |
| 10 | HAJAA47 | 534670 | 20 | 192-308 | 273 | Leu-33 to Asp-38. | | |
| 11 | HAJAY92 | 845601 | 21 | 12-296 | 274 | Lys-89 to Glu-94. | | |
| 12 | HAJBV67 | 866415 | 22 | 605-1684 | 275 | Arg-24 to Trp-44, | 10q23.33 | 157640, 174900, 236730, 600512 |
| | | | | | | Leu-87 to Ser-93, | | |
| | | | | | | Arg-119 to Trp-125, | | |
| | | | | | | Pro-206 to Lys-211, | | |
| | | | | | | Glu-280 to Trp-286. | | |
| 13 | HATCD80 | 826098 | 23 | 296-409 | 276 | | | |
| 14 | HATEH20 | 836056 | 24 | 93-221 | 277 | Val-23 to Glu-28. | | |
| 15 | HBAGD86 | 838799 | 25 | 521-580 | 278 | | | |
| 16 | HBGBC29 | 691473 | 26 | 1016-1024 | 279 | | 3q13.3 | 126451, 600882 |
| 17 | HBGNC72 | 892131 | 27 | 550-780 | 280 | His-49 to His-57. | 19p13.3 | 108725, 120700, 133171, 136836, 145981, |
| | | | | | | | | 147141, 164953, 188070, 600957, 601238, |
| | | | | | | | | 601846, 602216, 602477 |
| 18 | HBHAA05 | 603174 | 28 | 110-286 | 281 | | | |
| 19 | HBHAA81 | 846465 | 29 | 28-639 | 282 | | 3p21.32 | 116806, 168468, 182280, 600163 |
| 20 | HBIAC29 | 831751 | 30 | 1036-1125 | 283 | | 1p35.3-p33 | 118210, 120260, 120550, 120570, 120575, |
| | | | | | | | | 121800, 130500, 133200, 138140, 171760, |
| | | | | | | | | 171760, 178300, 185470, 230350, 246450, |
| | | | | | | | | 255800, 602771 |
| 21 | HBJAB02 | 837309 | 31 | 84-188 | 284 | Arg-24 to Asp-31. | 17q23 | 106180, 138700, 139250, 150200, 154275, |
| | | | | | | | | 176960, 249000, 253250 |
| 22 | HBJAC40 | 841235 | 32 | 329-370 | 285 | | 16p13.3 | 141750, 141800, 141800, 141800, 141800, |
| | | | | | | | | 141850, 141850, 141850, 141850, 141850, |
| | | | | | | | | 156850, 186580, 191092, 600140, 600273, |
| | | | | | | | | 601313, 601785 |
| 23 | HBJCR46 | 815649 | 33 | 589-2787 | 286 | Met-1 to Ala-8, | 15q12 | 103581, 146150, 182279, 203200, 203200, |
| | | | | | | Phe-42 to Asp-57, | | 227220, 601623, 601800, 601889, 602117 |
| | | | | | | Tyr-105 to Thr-110, | | |
| | | | | | | His-121 to Cys-127, | | |
| | | | | | | Asp-154 to Lys-181, | | |
| | | | | | | Arg-186 to Pro-210, | | |
| | | | | | | Ala-233 to Asp-252, | | |
| | | | | | | Ser-296 to Ser-306, | | |
| | | | | | | Pro-313 to Ser-320, | | |
| | | | | | | Gln-331 to Gly-346, | | |
| | | | | | | Ser-355 to Thr-360, | | |
| | | | | | | Cys-386 to Phe-395, | | |
| | | | | | | Ser-400 to Glu-425, | | |
| | | | | | | Thr-440 to Thr-446, | | |
| | | | | | | Pro-449 to Cys-466, | | |
| | | | | | | Glu-470 to Thr-509, | | |
| | | | | | | Ser-512 to Asp-533, | | |
| | | | | | | Ala-544 to Arg-550, | | |
| | | | | | | Arg-562 to Glu-571, | | |
| | | | | | | Lys-587 to Thr-594, | | |
| | | | | | | Asp-713 to Glu-733. | | |
| 24 | HBJDW56 | 520401 | 34 | 121-147 | 287 | | | |
| 25 | HBJEL16 | 847030 | 35 | 115-225 | 288 | | 1q23.1-q23.2 | 107300, 131210, 136132, 145001, 173610, |
| | | | | | | | | 249270, 601652 |
| 26 | HBJKD16 | 853358 | 36 | 78-173 | 289 | | 2p14 | 203800 |
| 27 | HBMBM96 | 561935 | 37 | 170-184 | 290 | | | |
| 28 | HBMTM11 | 589515 | 38 | 125-220 | 291 | | | |
| 29 | HBMUH74 | 866160 | 39 | 344-430 | 292 | | 12p11.22 | 112410, 135700, 168470, 200990 |
| 30 | HBQAB79 | 810542 | 40 | 190-225 | 293 | | 4q31.1 | 189800, 600983 |
| 31 | HBSAK32 | 856387 | 41 | 447-590 | 294 | | 20p13 | 192340, 234200 |
| 32 | HBXCX15 | 637542 | 42 | 72-77 | 295 | | | |
| 33 | HCDCY76 | 837972 | 43 | 860-967 | 296 | Pro-20 to Phe-25. | 11q14-q21 | 133780, 203100, 203100, 245000 |
| 34 | HCDDL48 | 839743 | 44 | 333-455 | 297 | Thr-26 to Tyr-38. | | |
| 35 | HCE1G78 | 761204 | 45 | 77-841 | 298 | Asp-20 to Thr-26, | 22q11.2-q13.2 | 123620, 138720, 145410, 188826, 231950, |
| | | | | | | Leu-30 to Gly-38, | | 239500, 275350, 600850 |
| | | | | | | Asp-63 to Phe-72, | | |
| | | | | | | Gly-160 to Trp-175, | | |
| | | | | | | Gly-189 to Ser-197, | | |
| | | | | | | Thr-214 to Val-221. | | |
| 36 | HCE5F78 | 838101 | 46 | 566-664 | 299 | Tyr-21 to Lys-30. | | |
| 37 | HCEDR26 | 771144 | 47 | 177-344 | 300 | | | |
| 38 | HCEEQ25 | 531784 | 48 | 111-182 | 301 | Met-14 to Asn-19. | | |
| 39 | HCEEU18 | 688041 | 49 | 209-340 | 302 | | | |
| 40 | HCEGG08 | 844506 | 50 | 1114-1197 | 303 | | | |
| 41 | HCFLN88 | 610000 | 51 | 101-178 | 304 | | 7q11.23 | 116860, 129900, 233700, 600079 |
| 42 | HCHAB84 | 834326 | 52 | 304-747 | 305 | Asn-47 to Leu-52, | | |
| | | | | | | Tyr-134 to Trp-143. | | |
| 43 | HCMSX51 | 788643 | 53 | 539-781 | 306 | Leu-57 to Glu-66. | 8p21 | 152760, 180100, 185430, 602629 |
| 44 | HCNCO11 | 775086 | 54 | 101-145 | 307 | | | |
| 45 | HCNSD29 | 862314 | 55 | 1145-1240 | 308 | | 2q23.3 | |
| 46 | HCQBH72 | 637548 | 56 | 31-174 | 309 | | | |
| 47 | HCQCC96 | 845066 | 57 | 782-919 | 310 | | | |
| 48 | HCUCF89 | 637986 | 58 | 189-278 | 311 | Gly-14 to Asp-21. | | |
| 49 | HCUCK44 | 790277 | 59 | 598-780 | 312 | | 19q13.1 | 164731, 172400, 172400, 180901, 180901, |
| | | | | | | | | 221770, 248600, 600918, 602716 |
| 50 | HCUDD64 | 835082 | 60 | 256-402 | 313 | Met-1 to Ser-6, | 19p13.3 | 108725, 120700, 133171, 136836, 145981, |
| | | | | | | Gln-32 to Asn-39. | | 147141, 164953, 188070, 600957, 601238, |
| | | | | | | | | 601846, 602216, 602477 |
| 51 | HCWAE64 | 535893 | 61 | 410-427 | 314 | | | |
| 52 | HDPDI72 | 897277 | 62 | 23-385 | 315 | Arg-63 to Phe-72, | | |
| | | | | | | Ile-114 to Phe-120. | | |
| 53 | HDPGE24 | 801947 | 63 | 173-394 | 316 | | | |
| 54 | HDPIU94 | 813352 | 64 | 208-279 | 317 | | 8q21.1 | 138300, 240400, 602629 |
| 55 | HDPIY31 | 886159 | 65 | 268-375 | 318 | | 20q13.33 | |
| 56 | HDPOC24 | 777493 | 66 | 418-819 | 319 | Pro-36 to Cys42, | 9q34.12 | |
| | | | | | | Pro-44 to Cys-54, | | |
| | | | | | | Arg-100 to Gly-105. | | |
| 57 | HDPOL37 | 745377 | 67 | 189-377 | 320 | Met-1 to Arg-8, | | |
| | | | | | | Gly-29 to Glu-36. | | |
| 58 | HDPOO76 | 838594 | 68 | 109-159 | 321 | | | |
| 59 | HDPPQ30 | 684292 | 69 | 220-336 | 322 | | | |
| 60 | HDQHM36 | 852328 | 70 | 129-275 | 323 | | | |
| 61 | HE2CM39 | 553651 | 71 | 10-51 | 324 | | | |
| 62 | HE2PO93 | 771655 | 72 | 770-898 | 325 | | 3p21.3 | 116806, 120120, 120120, 120120, 120436, |
| | | | | | | | | 120436, 120436, 138320, 168468, 182280, |
| | | | | | | | | 600163 |
| 63 | HE6FU11 | 827236 | 73 | 145-825 | 326 | | | |
| 64 | HE6FV29 | 588454 | 74 | 210-311 | 327 | | | |
| 65 | HE9EA10 | 827796 | 75 | 212-448 | 328 | Arg-6 to Trp-11. | | |
| 66 | HEBCY54 | 600355 | 76 | 172-528 | 329 | Arg-18 to Lys-26, | 8p22-p21 | 148370, 152760, 180100, 185430, 238600, |
| | | | | | | Gly-35 to Ala-42, | | 238600, 238600, 238600, 600143, 601385, |
| | | | | | | Gln-61 to Gly-67. | | 602629 |
| 67 | HEBDF77 | 692347 | 77 | 681-791 | 330 | | | |
| 68 | HEBDQ91 | 840288 | 78 | 1211-1336 | 331 | | | |
| 69 | HEBFR46 | 847064 | 79 | 200-289 | 332 | Met-1 to Thr-6. | | |
| 70 | HEBGE07 | 798096 | 80 | 106-234 | 333 | | | |
| 71 | HEGAU15 | 834379 | 81 | 59-163 | 334 | | | |
| 72 | HEQBF89 | 786205 | 82 | 306-458 | 335 | Glu-17 to Gly-22, | | |
| | | | | | | Arg-29 to Phe-36. | | |
| 73 | HFCEI04 | 692438 | 83 | 136-264 | 336 | Asn-21 to Gly-28. | | |
| 74 | HFEAY59 | 658685 | 84 | 154-276 | 337 | Arg-2 to Lys-8, | | |
| | | | | | | Arg-22 to Lys-31. | | |
| 75 | HFIJA68 | 847074 | 85 | 283-414 | 338 | | | |
| 76 | HFKEU12 | 634006 | 86 | 6-173 | 339 | Pro-18 to Thr-55. | | |
| 77 | HFPCZ55 | 840840 | 87 | 676-810 | 340 | | 11p15 | 108985, 186921, 602092 |
| 78 | HFTBM38 | 638338 | 88 | 577-669 | 341 | | | |
| 79 | HFTDH56 | 862021 | 89 | 67-99 | 342 | | 4q11 | 103600, 103600, 103600, 104150, 104150, |
| | | | | | | | | 104500, 170650 |
| 80 | HFVHW43 | 570948 | 90 | 92-211 | 343 | | | |
| 81 | HGBHP91 | 693011 | 91 | 50-208 | 344 | | | |
| 82 | HHEAK45 | 765278 | 92 | 813-824 | 345 | | 6p21.33 | 248611 |
| 83 | HHEGS55 | 858372 | 93 | 159-269 | 346 | | | |
| 84 | HHEOW19 | 886174 | 94 | 183-377 | 347 | Ala-41 to Pro-57. | 1q42 | 106150, 106150, 145260, 173870, 173870, |
| | | | | | | | | 600759, 600996, 601744, 601975 |
| 85 | HHFFL34 | 753230 | 95 | 42-713 | 348 | Asn-146 to Arg-157, | | |
| | | | | | | Leu-168 to Asn-183, | | |
| | | | | | | Gln-189 to Asn-199, | | |
| | | | | | | Gln-206 to Ser-217. | | |
| 86 | HHFFS40 | 824059 | 96 | 37-180 | 349 | | 5p14.1 | 123000 |
| 87 | HHGCS78 | 634605 | 97 | 290-364 | 350 | | 17q11.1 | 182138, 600881, 601954 |
| 88 | HHGDT26 | 658692 | 98 | 181-207 | 351 | | | |
| 89 | HHPFU28 | 824573 | 99 | 156-239 | 352 | Ser-12 to Tyr-17. | 4q12 | 103600, 103600, 103600, 104150, 104150, |
| | | | | | | | | 104500, 164920, 164920, 164920, 170650, |
| | | | | | | | | 600900 |
| 90 | HHSBI06 | 639097 | 100 | 690-707 | 353 | | | |
| 91 | HHSBI65 | 801910 | 101 | 62-229 | 354 | Ala-16 to Val-35. | 8q24.3 | 188450, 188450, 188450 |
| 92 | HHSDI53 | 862028 | 102 | 221-295 | 355 | | | |
| 93 | HISAT67 | 843549 | 103 | 1239-1409 | 356 | | 2p23.3 | 176830, 176830, 182601, 229800, 602134 |
| 94 | HJBCU75 | 638329 | 104 | 61-78 | 357 | | | |
| 95 | HJMAA03 | 824062 | 105 | 527-556 | 358 | | | |
| 96 | HJMAV41 | 862029 | 106 | 207-290 | 359 | | 19p12 | 601843 |
| 97 | HJMAY90 | 793678 | 107 | 2492-2596 | 360 | | 5q35.3 | |
| 98 | HJPBE39 | 801960 | 108 | 170-226 | 361 | | 11q22.1 | 133780, 602574, 602574 |
| 99 | HJPCH08 | 840365 | 109 | 374-727 | 362 | Glu-3 to Phe-9, | | |
| | | | | | | Gln-17 to Leu-50. | | |
| 100 | HKGBF25 | 738797 | 110 | 261-371 | 363 | | | |
| 101 | HKIXC44 | 716213 | 111 | 572-682 | 364 | | | |
| 102 | HKTAB41 | 695732 | 112 | 172-204 | 365 | | | |
| 103 | HLDBG17 | 855953 | 113 | 184-309 | 366 | Leu-29 to His-34. | | |
| 104 | HLDQU79 | 740755 | 114 | 99-1142 | 367 | Leu-68 to Lys-74, | | |
| | | | | | | Tyr-109 to Lys-115, | | |
| | | | | | | Gln-200 to Val-205, | | |
| | | | | | | Lys-207 to Lys-214, | | |
| | | | | | | Glu-237 to Ile-244, | | |
| | | | | | | Ala-271 to Thr-279, | | |
| | | | | | | Ser-317 to Ser-329, | | |
| | | | | | | Gln-342 to Gly-348. | | |
| | HLDQU79 | 837599 | 253 | 75-1121 | 506 | | | |
| 105 | HLDRT09 | 830544 | 115 | 522-719 | 368 | Ser-18 to Ser-30. | 2q36 | 120070, 120131, 120131, 138030, 147545, |
| | | | | | | | | 259900, 262000 |
| 106 | HLHAP05 | 638476 | 116 | 45-89 | 369 | Gln-4 to Leu-14. | | |
| 107 | HLHCS23 | 560663 | 117 | 25-129 | 370 | | | |
| 108 | HLIBO72 | 883431 | 118 | 167-550 | 371 | | | |
| 109 | HLICE88 | 840321 | 119 | 708-716 | 372 | | 4q28 | 107250, 134820, 134820, 134820, 134830, |
| | | | | | | | | 134850, 134850, 181600, 189800, 266300 |
| 110 | HLICO10 | 658740 | 120 | 441-659 | 373 | Pro-30 to Asn-42, | 20q13.13 | 602025 |
| | | | | | | Ser-49 to Val-55, | | |
| | | | | | | Ser-67 to Ser-72. | | |
| 111 | HLJBS28 | 658742 | 121 | 359-412 | 374 | | Xq26.1-q27.2 | 300123, 301201, 301590, 301845, 301900, |
| | | | | | | | | 304340, 306900, 307150, 307700, 308000, |
| | | | | | | | | 308000, 309000, 310490, 313850 |
| 112 | HLMJB64 | 658699 | 122 | 12-161 | 375 | Ser-6 to Gly-11. | 20q11.1-q11.23 | |
| 113 | HLWAV47 | 897769 | 123 | 200-298 | 376 | | 1q41 | 145260, 276901, 600332, 600759, 601744, |
| | | | | | | | | 601975 |
| 114 | HLYDF73 | 566869 | 124 | 363-434 | 377 | | | |
| 115 | HLYGE16 | 651339 | 125 | 406-627 | 378 | Arg-23 to Trp-42, | 7q32.2 | 180105, 222800 |
| | | | | | | Val-52 to Pro-61. | | |
| 116 | HLYGY91 | 658703 | 126 | 211-339 | 379 | | | |
| 117 | HMCFH60 | 654853 | 127 | 211-357 | 380 | | 6pter-p24.1 | |
| 118 | HMDAB29 | 584789 | 128 | 97-177 | 381 | | | |
| 119 | HMDAD44 | 566854 | 129 | 135-161 | 382 | | | |
| 120 | HMEDI90 | 840077 | 130 | 622-675 | 383 | Ser-7 to Thr-13. | | |
| 121 | HMIAK10 | 562774 | 131 | 195-290 | 384 | | | |
| 122 | HMIBF07 | 603528 | 132 | 229-249 | 385 | | | |
| 123 | HMICI80 | 827318 | 133 | 1149-1247 | 386 | Gln-13 to Tyr-20. | | |
| 124 | HMJAK70 | 610099 | 134 | 273-305 | 387 | | | |
| 125 | HMTAB77 | 847411 | 135 | 769-915 | 388 | Gly-3 to Thr-8. | 1p13.2 | 102770, 164790, 601414, 601691, 601691, |
| | | | | | | | | 601691, 601691, 601718, 602094 |
| 126 | HMUAE26 | 747403 | 136 | 710-802 | 389 | Ser-25 to Arg-30. | 3q21.2 | 106165, 117700, 117700, 150210, 169600, |
| | | | | | | | | 180380, 180380, 180380, 203500, 232050, |
| | | | | | | | | 276902, 600882, 601199, 601199, 601199, |
| | | | | | | | | 601471, 601682 |
| 127 | HMUAN45 | 833072 | 137 | 239-922 | 390 | Pro-33 to Gly-45, | 11q13.5 | 133780, 266150, 276903, 276903, 276903 |
| | | | | | | Cys-121 to Gly-131, | | |
| | | | | | | Ala-155 to His-166, | | |
| | | | | | | Gly-180 to Gln-185. | | |
| 128 | HMVBC31 | 825598 | 138 | 1437-1559 | 391 | Ser-33 to Tyr-39. | 1p36.21 | 120550, 120570, 120575, 153454, 256700 |
| 129 | HMWBL03 | 822861 | 139 | 137-1327 | 392 | Met-1 to Leu-11, | | |
| | | | | | | Val-13 to Lys-19, | | |
| | | | | | | Thr-30 to Asp-39, | | |
| | | | | | | Thr-49 to Gly-68, | | |
| | | | | | | Ala-78 to Gly-111, | | |
| | | | | | | Pro-140 to Thr-163, | | |
| | | | | | | Ser-169 to Ser-185, | | |
| | | | | | | Glu-197 to Lys-204, | | |
| | | | | | | Lys-210 to Asp-215, | | |
| | | | | | | Glu-220 to Ser-231, | | |
| | | | | | | Ser-255 to Leu-266, | | |
| | | | | | | Thr-269 to Asp-288, | | |
| | | | | | | Cys-300 to Val-309, | | |
| | | | | | | Phe-331 to Cys-339, | | |
| | | | | | | Ser-362 to Ile-373. | | |
| 130 | HMWCG28 | 847413 | 140 | 78-200 | 393 | | 12p13.3 | 103950, 193100, 193400, 200990, 601458 |
| 131 | HNECW49 | 639117 | 141 | 316-489 | 394 | Cys-21 to Trp-26, | | |
| | | | | | | Val-37 to Ser-53. | | |
| 132 | HNFCY57 | 877653 | 142 | 317-2206 | 395 | Leu-15 to Leu-25, | 1q44 | 601975 |
| | | | | | | Arg-47 to His-53, | | |
| | | | | | | Glu-130 to Asn-138, | | |
| | | | | | | Pro-140 to Ser-148, | | |
| | | | | | | Asn-157 to Lys-163, | | |
| | | | | | | Asn-178 to Lys-187, | | |
| | | | | | | Pro-281 to Arg-292, | | |
| | | | | | | Leu-341 to Leu-346, | | |
| | | | | | | Lys-471 to Cys-477, | | |
| | | | | | | Arg-513 to Gly-521, | | |
| | | | | | | Gly-570 to Gly-575, | | |
| | | | | | | Leu-614 to Glu-620. | | |
| 133 | HNFGR08 | 825417 | 143 | 314-445 | 396 | | | |
| 134 | HNGAK51 | 603910 | 144 | 248-346 | 397 | | | |
| 135 | HNGAM58 | 688114 | 145 | 68-412 | 398 | Trp-31 to Arg-39, | | |
| | | | | | | Ala-50 to Trp-57, | | |
| | | | | | | Lys-83 to Leu-93, | | |
| | | | | | | Pro-103 to Gly-113. | | |
| 136 | HNGDX18 | 1145071 | 146 | 237-965 | 399 | Ser-21 to Ser-39, | | |
| | | | | | | Gln-45 to Gln-61, | | |
| | | | | | | Cys-124 to Ser-139. | | |
| | HNGDX18 | 866177 | 254 | 231-629 | 507 | Ser-21 to Ser-39, | | |
| | | | | | | Gln-45 to Gln-61, | | |
| | | | | | | Cys-124 to Gly-130. | | |
| 137 | HNGEQ75 | 535723 | 147 | 30-98 | 400 | | 12q24.12 | 160781, 181405 |
| 138 | HNGFR54 | 695748 | 148 | 73-231 | 401 | Trp-6 to Tyr-11. | | |
| 139 | HNGGA68 | 638116 | 149 | 184-282 | 402 | Ala-8 to Gly-20. | | |
| 140 | HNGHZ69 | 899289 | 150 | 25-54 | 403 | | | |
| 141 | HNGKT41 | 836061 | 151 | 415-552 | 404 | | | |
| 142 | HNGMW45 | 838613 | 152 | 452-583 | 405 | | | |
| 143 | HNGNO53 | 836063 | 153 | 467-571 | 406 | | | |
| 144 | HNGPJ25 | 834942 | 154 | 544-621 | 407 | | | |
| 145 | HNHFE71 | 834487 | 155 | 598-663 | 408 | | | |
| 146 | HNHGK22 | 597451 | 156 | 239-433 | 409 | | | |
| 147 | HNHKS19 | 778392 | 157 | 192-317 | 410 | Pro-23 to Gln-34. | | |
| 148 | HNHKV56 | 800877 | 158 | 294-494 | 411 | | | |
| 149 | HOACG07 | 792928 | 159 | 778-1149 | 412 | Pro-32 to Ser-42, | 20p13 | 192340, 234200 |
| | | | | | | Cys-51 to Gly-83, | | |
| | | | | | | Gly-87 to Ser-93. | | |
| 150 | HODBB70 | 520196 | 160 | 173-256 | 413 | | | |
| 151 | HOEBK60 | 789396 | 161 | 1714-1845 | 414 | Lys-5 to Thr-10, | | |
| | | | | | | Gln-36 to Gly-43. | | |
| 152 | HOFNB74 | 762821 | 162 | 138-257 | 415 | Ser-30 to Ser-36. | 12q12-12q14.3 | 181430, 600194, 600231, 600808, 601284, |
| | | | | | | | | 601769, 601769, 602116 |
| 153 | HOSDO75 | 862049 | 163 | 88-174 | 416 | Phe-2 to Ser-8, | 11q13.4 | 133780, 266150 |
| | | | | | | Phe-21 to Ser-26. | | |
| 154 | HOSEI81 | 562778 | 164 | 203-454 | 417 | Lys-70 to Asn-76. | 12q12-q13 | 107777, 123940, 139350, 139350, 148040, |
| | | | | | | | | 148041, 148043, 148070, 231550, 600194, |
| | | | | | | | | 600231, 600536, 600808, 600956, 601284, |
| | | | | | | | | 601769, 601769, 601928, 602116, 602153 |
| 155 | HOUDE92 | 580866 | 165 | 70-336 | 418 | Pro-22 to His-31, | | |
| | | | | | | Ser-80 to Gln-88. | | |
| 156 | HOVBD85 | 827362 | 166 | 252-332 | 419 | | | |
| 157 | HPCAB41 | 758003 | 167 | 184-261 | 420 | | | |
| 158 | HPEAD23 | 773409 | 168 | 188-469 | 421 | Ala-54 to Lys-59. | | |
| 159 | HPFCI36 | 855966 | 169 | 94-153 | 422 | | 10q23.31 | 157640, 174900, 236730, 600512 |
| 160 | HPFDI37 | 862056 | 170 | 38-91 | 423 | | 22q11.21 | 123620, 151410, 600850 |
| 161 | HPIAA80 | 829972 | 171 | 314-427 | 424 | | | |
| 162 | HPJCW58 | 612866 | 172 | 177-263 | 425 | Leu-16 to Gly-21. | | |
| 163 | HPMFH77 | 702014 | 173 | 251-358 | 426 | Pro-29 to Cys-35. | | |
| 164 | HPQCB83 | 740761 | 174 | 85-189 | 427 | | | |
| 165 | HPRBH85 | 695752 | 175 | 684-1088 | 428 | Glu-121 to Leu-126. | 3q21.1 | 106165, 117700, 117700, 150210, 169600, |
| | | | | | | | | 180380, 180380, 180380, 203500, 232050, |
| | | | | | | | | 276902, 600882, 601199, 601199, 601199, |
| | | | | | | | | 601471, 601682 |
| 166 | HPRCD35 | 853551 | 176 | 265-372 | 429 | Asp-16 to Gln-27. | | |
| 167 | HPTRM02 | 812879 | 177 | 885-1127 | 430 | His-48 to Ser-61, | 7 | |
| | | | | | | Ala-66 to Val-72. | | |
| 168 | HRADA42 | 827302 | 178 | 122-256 | 431 | | Xq22-24 | 300046, 300088, 300123, 300300, 300300, |
| | | | | | | | | 301201, 301500, 301835, 301845, 303630, |
| | | | | | | | | 303630, 303631, 304500, 304700, 304700, |
| | | | | | | | | 304700, 307150, 309300, 309605, 310490, |
| | | | | | | | | 311850, 312080, 312080 |
| 169 | HRADF49 | 866481 | 179 | 169-930 | 432 | Pro-85 to Asp-99, | 2q36.1 | 120070, 120131, 120131, 138030, 259900 |
| | | | | | | Arg-163 to Arg-170, | | |
| | | | | | | Gln-183 to Thr-189, | | |
| | | | | | | Pro-201 to Ser-209, | | |
| | | | | | | Ser-216 to Gly-222. | | |
| 170 | HRADN25 | 800628 | 180 | 198-395 | 433 | Gly-60 to Pro-65. | 12q13 | 107777, 123940, 139350, 139350, 148040, |
| | | | | | | | | 148041, 148043, 148070, 231550, 600194, |
| | | | | | | | | 600231, 600536, 600808, 600956, 601284, |
| | | | | | | | | 601769, 601769, 601928, 602116, 602153 |
| 171 | HRDDQ39 | 840405 | 181 | 215-355 | 434 | Gly-27 to Pro-35. | | |
| 172 | HRDER22 | 688056 | 182 | 32-61 | 435 | | | |
| 173 | HRDEX93 | 816046 | 183 | 649-867 | 436 | | 1p34 | 130500, 133200, 138140, 168360, 171760, |
| | | | | | | | | 171760, 176100, 176100, 178300, 230000, |
| | | | | | | | | 255800 |
| 174 | HRDFK37 | 840381 | 184 | 120-152 | 437 | | | |
| 175 | HRTAP63 | 780698 | 185 | 959-1087 | 438 | Asn-2 to Trp-13. | 2p23.3 | 176830, 176830, 182601, 229800, 602134 |
| 176 | HSAVA08 | 580870 | 186 | 66-146 | 439 | Thr-15 to Gln-22. | | |
| 177 | HSAVW42 | 637660 | 187 | 129-197 | 440 | | 3p22.3 | 182280, 227646, 261510, 600163, 601154 |
| 178 | HSAYC41 | 688057 | 188 | 106-213 | 441 | Lys-23 to Lys-36. | 11q12.1 | 106100, 147050, 259700, 259770, 600045, |
| | | | | | | | | 601884 |
| 179 | HSDZM54 | 637870 | 189 | 445-552 | 442 | Lys-17 to Leu-23. | | |
| 180 | HSHBF76 | 715838 | 190 | 129-161 | 443 | | | |
| 181 | HSIFG47 | 778378 | 191 | 304-345 | 444 | | | |
| 182 | HSJBY32 | 702020 | 192 | 257-532 | 445 | Pro-49 to Ala-69, | 11p15.5 | 125852, 126452, 126452, 141900, 141900, |
| | | | | | | Pro-72 to His-77, | | 141900, 141900, 141900, 141900, 142000, |
| | | | | | | Pro-79 to Cys-89. | | 142000, 142200, 142250, 142270, 176730, |
| | | | | | | | | 176730, 176730, 190020, 191290, 192500, |
| | | | | | | | | 192500, 194071, 194071, 204500, 600856, |
| | | | | | | | | 601680, 602631, 602631 |
| 183 | HSKDR27 | 580874 | 193 | 473-556 | 446 | Pro-18 to Gly-26. | 19p13.2 | 108725, 120700, 133171, 143890, 147670, |
| | | | | | | | | 147670, 147670, 151440, 164953, 231670, |
| | | | | | | | | 600276, 600957, 601843 |
| 184 | HSNAP85 | 784054 | 194 | 941-955 | 447 | | | |
| 185 | HSNBM34 | 635131 | 195 | 1508-1696 | 448 | Ala-17 to Thr-26, | 17p13-p11 | 100710, 138190, 254210, 271900, 600179, |
| | | | | | | Gly-49 to Gln-62. | | 600977, 601202, 601777 |
| 186 | HSQDO85 | 853393 | 196 | 133-168 | 449 | | 22q13.1 | 103050, 103050, 124030, 124030, 138981, |
| | | | | | | | | 182380, 188826, 190040, 190040, 190040 |
| 187 | HSRBE06 | 871264 | 197 | 128-193 | 450 | | | |
| 188 | HSSDI26 | 560722 | 198 | 253-318 | 451 | | | |
| 189 | HSSEA64 | 853395 | 199 | 58-246 | 452 | | | |
| 190 | HSSEF77 | 658725 | 200 | 184-366 | 453 | Arg-22 to Lys-27, | 2p12 | 147200, 178640, 216900 |
| | | | | | | Leu-30 to Asn-39. | | |
| 191 | HSSFE38 | 742512 | 201 | 264-641 | 454 | Glu-37 to Arg-42, | | |
| | | | | | | Gly-108 to Cys-117. | | |
| 192 | HSXCP38 | 895392 | 202 | 211-255 | 455 | | | |
| 193 | HT1SC27 | 630647 | 203 | 366-449 | 456 | | | |
| 194 | HT4FV41 | 853400 | 204 | 39-452 | 457 | Ala-15 to Gln-22, | 19p13.3 | 108725, 120700, 133171, 136836, 145981, |
| | | | | | | Gly-36 to Gly-41, | | 147141, 164953, 188070, 600957, 601238, |
| | | | | | | Arg-47 to Pro-63, | | 601846, 602216, 602477 |
| | | | | | | Pro-85 to His-98. | | |
| 195 | HT5GR59 | 801930 | 205 | 135-230 | 458 | | 8p21.3 | 602629 |
| 196 | HTEAG62 | 812332 | 206 | 1017-1085 | 459 | | | |
| 197 | HTEEW69 | 764835 | 207 | 182-1153 | 460 | Asp-63 to Thr-70, | | |
| | | | | | | Asn-77 to Ser-86, | | |
| | | | | | | Thr-101 to Arg-108, | | |
| | | | | | | Pro-117 to Asn-123, | | |
| | | | | | | Gly-194 to Trp-203. | | |
| 198 | HTEGS07 | 827700 | 208 | 493-606 | 461 | Pro-18 to Asn-27. | | |
| 199 | HTEGS11 | 862066 | 209 | 173-196 | 462 | | 5p15.1 | 123000 |
| 200 | HTEHU59 | 840385 | 210 | 170-274 | 463 | Ser-29 to Phe-34. | | |
| 201 | HTEJD29 | 695798 | 211 | 101-172 | 464 | | | |
| 202 | HTEKM46 | 862069 | 212 | 171-287 | 465 | | | |
| 203 | HTENR63 | 877952 | 213 | 132-302 | 466 | Pro-22 to Lys-28. | 4q24 | 157147, 248510 |
| 204 | HTGGM44 | 842856 | 214 | 179-433 | 467 | | 3q23 | 106165, 110100, 117700, 117700, 150210, |
| | | | | | | | | 169600, 180380, 180380, 180380, 203500, |
| | | | | | | | | 276902, 601199, 601199, 601199, 601682 |
| 205 | HTHBZ06 | 832477 | 215 | 318-323 | 468 | | 12q24.31 | 181405 |
| 206 | HTLAP64 | 603913 | 216 | 173-235 | 469 | Ile-8 to Asn-20. | 11p15.5-p15.4 | 125852, 126452, 126452, 130650, 141900, |
| | | | | | | | | 141900, 141900, 141900, 141900, 141900, |
| | | | | | | | | 142000, 142000, 142200, 142250, 142270, |
| | | | | | | | | 150000, 176730, 176730, 176730, 190020, |
| | | | | | | | | 191290, 192500, 192500, 194071, 194071, |
| | | | | | | | | 204500, 257200, 257200, 600856, 601680, |
| | | | | | | | | 602631, 602631 |
| 207 | HTLBT80 | 840045 | 217 | 912-1301 | 470 | Ser-107 to Ser-116. | 20q11.21-q13.11 | 102700, 102700, 602025 |
| 208 | HTLDU78 | 637702 | 218 | 219-245 | 471 | | | |
| 209 | HTLEM16 | 779133 | 219 | 1220-1429 | 472 | Arg-29 to Cys-43. | | |
| 210 | HTLFA13 | 535937 | 220 | 209-304 | 473 | | | |
| 211 | HTLGI89 | 835069 | 221 | 1802-1915 | 474 | | | |
| 212 | HTLIF11 | 843506 | 222 | 933-1049 | 475 | Pro-4 to Gly-9. | | |
| 213 | HTNBK13 | 831967 | 223 | 534-599 | 476 | | 22q12 | 123620, 133450, 133450, 600850, 601669 |
| 214 | HTOAM11 | 664508 | 224 | 89-193 | 477 | | | |
| 215 | HTODH83 | 580884 | 225 | 103-201 | 478 | | | |
| 216 | HTPCO75 | 853645 | 226 | 73-195 | 479 | | | |
| 217 | HTSFJ32 | 637720 | 227 | 93-149 | 480 | Leu-12 to Cys-18. | 17p13.1 | 191170, 191170 |
| 218 | HTTCB60 | 853401 | 228 | 84-884 | 481 | Ser-83 to Asp-88, | | |
| | | | | | | Val-166 to Gly-181, | | |
| | | | | | | Pro-193 to Ala-199, | | |
| | | | | | | Glu-235 to Gln-250. | | |
| 219 | HTTEE41 | 840950 | 229 | 1171-1197 | 482 | | 12q15 | 181430, 600698, 600698, 600698, 600698, |
| | | | | | | | | 600808, 602116 |
| 220 | HTTEZ02 | 702027 | 230 | 250-336 | 483 | Arg-23 to Leu-28. | 7q34 | 180105, 222800, 274180 |
| 221 | HTWEH94 | 561680 | 231 | 66-311 | 484 | | | |
| 222 | HTXDC77 | 844258 | 232 | 65-520 | 485 | | | |
| 223 | HTXDG92 | 658730 | 233 | 216-416 | 486 | | 17q11.2 | 154275, 162200, 162200, 182138, 239100, |
| | | | | | | | | 600881, 601954, 602403 |
| 224 | HTXET11 | 581521 | 234 | 178-267 | 487 | | | |
| 225 | HTXFA72 | 853410 | 235 | 192-281 | 488 | | | |
| 226 | HTXJY08 | 637774 | 236 | 108-158 | 489 | | | |
| 227 | HTXMZ07 | 834881 | 237 | 319-432 | 490 | Pro-19 to Ser-28. | 3p21.31 | 116806, 168468, 182280, 212138, 600163 |
| 228 | HUKBT67 | 844446 | 238 | 273-392 | 491 | Ser-32 to Arg-39. | 12q13.13 | 120140, 120140, 120140, 120140, 120140, |
| | | | | | | | | 120140, 120140, 126337, 600808, 601284, |
| | | | | | | | | 601769, 601769, 602116 |
| 229 | HUKDF20 | 566823 | 239 | 214-315 | 492 | | | |
| 230 | HUSCJ14 | 894699 | 240 | 74-661 | 493 | Phe-166 to Arg-174, | | |
| | | | | | | Ser-191 to Tyr-196. | | |
| 231 | HUSGL67 | 792637 | 241 | 350-493 | 494 | Met-1 to Tyr-8, | 19q13.33 | 134790, 600040 |
| | | | | | | Gln-27 to Gln-38. | | |
| 232 | HUSGU40 | 684975 | 242 | 500-640 | 495 | Arg-21 to Ser-27, | | |
| | | | | | | Ile-36 to Asp-41. | | |
| 233 | HUSIR18 | 762858 | 243 | 83-151 | 496 | | 6pter-p12.1 | |
| 234 | HUVDJ48 | 564853 | 244 | 196-213 | 497 | | | |
| 235 | HWDAC26 | 821335 | 245 | 242-349 | 498 | | Xq21.3-q22 | 300088, 300300, 300300, 301201, 301500, |
| | | | | | | | | 301835, 303400, 303630, 303630, 303631, |
| | | | | | | | | 304500, 304700, 304700, 304700, 305450, |
| | | | | | | | | 309300, 309605, 311850, 312080, 312080 |
| 236 | HWDAJ01 | 794016 | 246 | 288-362 | 499 | Pro-17 to Ser-24. | | |
| 237 | HBDAB91 | 864374 | 247 | 671-760 | 500 | Lys-21 to Gln-29. | | |
| | HBDAB91 | 789532 | 255 | 351-440 | 508 | Lys-21 to Gln-29. | | |
| 238 | HILCA24 | 869856 | 248 | 191-1174 | 501 | Gln-52 to Arg-57, | 5p15.2 | 123000, 602568 |
| | | | | | | Glu-74 to Leu-84, | | |
| | | | | | | Val-104 to Asp-110, | | |
| | | | | | | Gly-157 to Gly-163, | | |
| | | | | | | Asn-185 to Ser-195, | | |
| | | | | | | Arg-245 to Asp-250, | | |
| | | | | | | Pro-302 to Pro-310, | | |
| | | | | | | Thr-316 to Tyr-322. | | |
| | HILCA24 | 782450 | 256 | 189-1172 | 509 | Gln-52 to Arg-57, | | |
| | | | | | | Glu-74 to Leu-84, | | |
| | | | | | | Val-104 to Asp-110, | | |
| | | | | | | Gly-157 to Gly-163, | | |
| | | | | | | Asn-185 to Ser-195, | | |
| | | | | | | Arg-245 to Asp-250, | | |
| | | | | | | Pro-302 to Pro-310, | | |
| | | | | | | Thr-316 to Tyr-322. | | |
| 239 | HYABC84 | 865064 | 249 | 1080-1268 | 502 | Pro-3 to Ala-8. | 20q11.22 | |
| | HYABC84 | 789854 | 257 | 1015-1203 | 510 | Pro-3 to Ala-8. | | |
| 240 | HE2CA60 | 888705 | 250 | 1731-1754 | 503 | | | |
| | HE2CA60 | 770301 | 258 | 360-383 | 511 | | | |
| 241 | HPQAX38 | 845752 | 251 | 295-345 | 504 | | | |
| | HPQAX38 | 843592 | 259 | 295-345 | 512 | | | |
| 242 | HE8FD92 | 901142 | 252 | 2141-2272 | 505 | | | |
| | HE8FD92 | 888274 | 260 | 157-288 | 513 | | | |
| | HE8FD92 | 869847 | 261 | 2268-2399 | 514 | | | |
| | HE8FD92 | 856544 | 262 | 2-1414 | 515 | Asp-11 to Tyr-16. | | |
| | HE8FD92 | 843825 | 263 | 1074-1205 | 516 | | | |

[0105] TABLE 1B.2

| | | | | | Tissue Distribution |
|---|---|---|---|---|---|
| | | | | | Library Code: Count |
| Gene No: | cDNA Clone ID | Contig ID: | SEQ ID NO: X | ORF (From-To) | (see Table 4 for Library Codes) |
| 1 | H6BSF56 | 762968 | 11 | 83-508 | AR313: 120, AR039: 99, AR299: 64, AR185: 57, AR089: 54, AR096: 51, AR277: 46, AR300: 43, AR316: 37, |
| | | | | | AR060: 29, AR218: 28, AR240: 28, AR104: 25, AR219: 23, AR282: 23, AR055: 20, AR283: 12, |
| | | | | | L0599: 4, L0439: 3, L0777: 3, H0253: 2, H0615: 2, H0520: 2, L0754: 2, L0745: 2, L0759: 2, H0556: 1, H0657: 1, |
| | | | | | S0116: 1, H0450: 1, S0418: 1, S0046: 1, S0222: 1, H0492: 1, S0049: 1, H0570: 1, H0123: 1, H0050: 1, H0051: 1, |
| | | | | | S0036: 1, H0494: 1, L0805: 1, L0776: 1, S0126: 1, H0435: 1, H0670: 1, S0028: 1, L0747: 1, S0026: 1 and H0542: 1. |
| 2 | H6EDM64 | 841331 | 12 | 1448-1468 | AR277: 22, AR060: 22, AR055: 21, AR283: 18, AR282: 18, AR104: 16, AR185: 16, AR089: 16, AR299: 16, |
| | | | | | AR219: 14, AR240: 14, AR316: 13, AR096: 12, AR218: 12, AR039: 11, AR300: 11, AR313: 11, |
| | | | | | H0333: 6, H0556: 5, H0255: 5, H0618: 4, L0783: 4, S0358: 3, H0549: 3, S0222: 3, H0318: 3, H0052: 3, H0553: 3, |
| | | | | | H0135: 3, L0769: 3, L3905: 3, H0547: 3, H0521: 3, H0555: 3, H0423: 3, H0716: 2, H0341: 2, H0402: 2, H0592: 2, |
| | | | | | H0253: 2, S0474: 2, H0620: 2, H0181: 2, H0617: 2, H0059: 2, L0761: 2, L0764: 2, L0809: 2, L5622: 2, H0520: 2, |
| | | | | | H0682: 2, S0330: 2, H0436: 2, L0751: 2, L0747: 2, L0750: 2, L0755: 2, S0436: 2, L0596: 2, L0601: 2, H0624: 1, |
| | | | | | H0686: 1, H0295: 1, T0049: 1, H0657: 1, H0656: 1, H0484: 1, H0483: 1, S0356: 1, S0442: 1, S0354: 1, S0360: 1, |
| | | | | | S0410: 1, H0729: 1, H0742: 1, S0045: 1, S0476: 1, H0619: 1, S0300: 1, L0717: 1, S0220: 1, H0370: 1, H0455: 1, |
| | | | | | H0586: 1, H0587: 1, H0559: 1, L0623: 1, T0082: 1, H0581: 1, H0183: 1, H0205: 1, H0327: 1, H0050: 1, H0687: 1, |
| | | | | | H0615: 1, T0006: 1, H0424: 1, H0213: 1, H0606: 1, H0166: 1, S0366: 1, H0090: 1, H0087: 1, H0264: 1, H0488: 1, |
| | | | | | H0413: 1, H0100: 1, H0625: 1, H0561: 1, H0130: 1, H0633: 1, H0647: 1, S0426: 1, H0529: 1, L0371: 1, L0796: 1, |
| | | | | | L0637: 1, L5566: 1, L0648: 1, L0364: 1, L0649: 1, L0774: 1, L0375: 1, L0378: 1, L0659: 1, L0636: 1, L5623: 1, |
| | | | | | L4501: 1, L0663: 1, H0693: 1, H0593: 1, S0126: 1, H0522: 1, S0027: 1, S0028: 1, L0740: 1, L0780: 1, L0758: 1, |
| | | | | | H0445: 1, S0011: 1, H0136: 1, S0196: 1 and H0352: 1. |
| 3 | H6EEC72 | 889401 | 13 | 263-319 | AR282: 2, AR039: 1, AR055: 1, |
| | | | | | S0444: 2, S0410: 2, H0559: 2, H0575: 2, H0618: 2, H0050: 2, H0521: 2, H0295: 1, H0650: 1, H0255: 1, S0418: 1, |
| | | | | | S0358: 1, S0376: 1, H0580: 1, S0045: 1, S0046: 1, H0550: 1, H0610: 1, H0497: 1, H0069: 1, H0635: 1, H0546: 1, |
| | | | | | H0086: 1, H0009: 1, H0059: 1, H0100: 1, H0429: 1, H0494: 1, L0766: 1, L0665: 1, H0519: 1, H0711: 1, S0152: 1, |
| | | | | | H0555: 1, L0743: 1, L0748: 1, L0747: 1, L0759: 1, S0192: 1, H0422: 1 and H0506: 1. |
| 4 | H6EEU40 | 757048 | 14 | 175-318 | AR277: 63, AR283: 52, AR219: 45, AR282: 44, AR104: 43, AR218: 41, AR316: 39, AR089: 37, AR313: 37, |
| | | | | | AR299: 35, AR055: 33, AR240: 33, AR096: 30, AR185: 29, AR300: 28, AR039: 27, AR060: 27, |
| | | | | | L0741: 8, H0677: 7, L0439: 6, H0052: 5, H0494: 5, L0747: 5, S0007: 4, H0543: 4, H0009: 3, L0771: 3, L0775: 3, |
| | | | | | H0663: 3, L0665: 3, L0438: 3, H0547: 3, H0521: 3, H0436: 3, L0742: 3, L0748: 3, L0751: 3, S0436: 3, H0556: 2, |
| | | | | | H0255: 2, S0420: 2, S0358: 2, S0046: 2, L0717: 2, S0222: 2, H0333: 2, H0559: 2, H0318: 2, H0581: 2, H0545: 2, |
| | | | | | H0620: 2, H0024: 2, H0266: 2, H0617: 2, H0529: 2, L0662: 2, L0653: 2, L0659: 2, L0809: 2, L0664: 2, H0690: 2, |
| | | | | | H0555: 2, L0743: 2, L0755: 2, L0757: 2, L0759: 2, L0588: 2, H0352: 2, H0624: 1, H0685: 1, H0740: 1, H0295: 1, |
| | | | | | S0134: 1, H0583: 1, H0656: 1, H0341: 1, S0212: 1, H0484: 1, L3659: 1, S0418: 1, S0356: 1, S0442: 1, S0410: 1, |
| | | | | | H0729: 1, H0735: 1, H0339: 1, H0619: 1, S0278: 1, H0257: 1, H0069: 1, H0744: 1, H0327: 1, H0023: 1, S0051: 1, |
| | | | | | T0010: 1, H0031: 1, H0181: 1, H0032: 1, H0169: 1, S0364: 1, H0135: 1, H0163: 1, H0090: 1, H0063: 1, H0087: 1, |
| | | | | | H0551: 1, H0264: 1, H0488: 1, H0623: 1, H0100: 1, S0438: 1, S0440: 1, L0369: 1, L0770: 1, L0769: 1, L5565: 1, |
| | | | | | L0761: 1, L0667: 1, L0772: 1, L0641: 1, L0644: 1, L0764: 1, L0773: 1, L0363: 1, L0768: 1, L0794: 1, L0766: 1, |
| | | | | | L0381: 1, L0803: 1, L0774: 1, L0375: 1, L0806: 1, L0512: 1, L0517: 1, L0666: 1, H0144: 1, H0702: 1, S0148: 1, |
| | | | | | L0352: 1, H0519: 1, H0593: 1, H0435: 1, H0658: 1, H0539: 1, S0406: 1, H0478: 1, H0631: 1, S0028: 1, S0206: 1, |
| | | | | | L0744: 1, L0740: 1, L0745: 1, L0749: 1, L0750: 1, L0758: 1, H0445: 1, S0434: 1, L0594: 1, S0194: 1, H0542: 1 and |
| | | | | | H0423: 1. |
| 5 | HACAB68 | 584773 | 15 | 135-371 | L0748: 4, H0457: 3 and S6022: 1. |
| 6 | HACBJ56 | 847112 | 16 | 250-327 | AR251: 7, AR310: 6, AR265: 6, AR053: 6, AR060: 6, AR182: 6, AR055: 6, AR312: 5, AR309: 5, AR273: 5, |
| | | | | | AR282: 5, AR061: 5, AR206: 5, AR241: 5, AR194: 5, AR186: 5, AR270: 4, AR213: 4, AR052: 4, AR266: 4, |
| | | | | | AR218: 4, AR089: 4, AR274: 4, AR253: 4, AR269: 4, AR291: 4, AR248: 4, AR296: 4, AR183: 4, AR240: 4, |
| | | | | | AR104: 4, AR293: 4, AR205: 4, AR284: 4, AR289: 3, AR313: 3, AR184: 3, AR299: 3, AR247: 3, AR185: 3, |
| | | | | | AR316: 3, AR231: 3, AR298: 3, AR033: 3, AR243: 3, AR268: 3, AR290: 3, AR283: 3, AR295: 3, AR300: 3, |
| | | | | | AR246: 3, AR277: 3, AR232: 3, AR175: 3, AR096: 3, AR219: 3, AR177: 3, AR234: 3, AR233: 3, AR275: 3, |
| | | | | | AR237: 3, AR238: 3, AR285: 3, AR227: 3, AR202: 3, AR263: 3, AR292: 3, AR204: 2, AR286: 2, AR314: 2, |
| | | | | | AR267: 2, AR280: 2, AR229: 2, AR258: 2, AR039: 2, AR294: 2, AR256: 2, AR259: 2, AR281: 1, AR315: 1, |
| | | | | | AR26: 1, AR244: 1, AR249: 1, |
| | | | | | H0661: 1, S0045: 1, H0550: 1, S0280: 1, S0010: 1, H0028: 1, L0764: 1, L0803: 1, L0805: 1, L0665: 1, S0053: 1, |
| | | | | | H0670: 1, L0748: 1, L0731: 1 and L0581: 1. |
| 7 | HADMB15 | 847116 | 17 | 238-300 | AR104: 19, AR218: 19, AR219: 16, AR089: 11, AR313: 8, AR055: 8, AR060: 7, AR299: 6, AR282: 5, AR300: 5, |
| | | | | | AR039: 5, AR240: 5, AR316: 5, AR185: 5, AR277: 4, AR283: 4, AR096: 3, |
| | | | | | L0595: 2, L0442: 1, L0005: 1, L3653: 1, H0390: 1, H0081: 1, H0024: 1, L0770: 1, L5566: 1, L0651: 1, L0565: 1, |
| | | | | | L0439: 1, L0747: 1, L0752: 1, H0445: 1, L0592: 1 and L0599: 1. |
| 8 | HAGFS57 | 847120 | 18 | 241-405 | AR055: 7, AR104: 6, AR060: 5, AR277: 4, AR300: 3, AR299: 3, AR096: 3, AR316: 3, AR039: 2, AR185: 2, |
| | | | | | AR089: 2, AR283: 2, AR218: 2, AR219: 1, AR313: 1, AR240: 1, |
| | | | | | L0438: 6, L0439: 4, S0360: 3, S0422: 3, H0547: 3, L0747: 3, L0005: 2, S0222: 2, S0002: 2, L0664: 2, L0754: 2, |
| | | | | | S0434: 2, H0506: 2, H0170: 1, H0171: 1, S0116: 1, S0212: 1, H0580: 1, H0749: 1, H0455: 1, L3655: 1, H0069: 1, |
| | | | | | H0098: 1, S0010: 1, L0105: 1, H0581: 1, H0263: 1, H0009: 1, L0471: 1, H0099: 1, S0003: 1, H0039: 1, S0036: 1, |
| | | | | | H0090: 1, H0591: 1, S0426: 1, L0794: 1, L0776: 1, L5622: 1, S0052: 1, H0144: 1, H0682: 1, H0659: 1, H0521: 1, |
| | | | | | H0555: 1, L0756: 1, H0445: 1 and S0452: 1. |
| 9 | HAGHN57 | 773286 | 19 | 900-932 | AR313: 12, AR316: 11, AR218: 11, AR185: 11, AR039: 10, AR219: 10, AR299: 10, AR060: 9, AR055: 8, AR277: 8, |
| | | | | | AR282: 8, AR096: 7, AR089: 7, AR300: 7, AR240: 6, AR104: 6, AR283: 4, |
| | | | | | H0521: 5, L0777: 5, S0376: 4, H0733: 3, H0156: 3, H0519: 3, H0436: 3, L0731: 3, H0656: 2, H0580: 2, H0747: 2, |
| | | | | | L3816: 2, H0036: 2, L0471: 2, H0090: 2, H0040: 2, H0551: 2, H0494: 2, S0438: 2, S0440: 2, H0529: 2, L0809: 2, |
| | | | | | H0144: 2, S0374: 2, H0593: 2, H0170: 1, L3643: 1, H0583: 1, H0650: 1, S0418: 1, S0358: 1, S0444: 1, L3645: 1, |
| | | | | | H0741: 1, H0734: 1, S0045: 1, S0476: 1, H0619: 1, H0586: 1, H0643: 1, H0632: 1, H0486: 1, S0280: 1, H0590: 1, |
| | | | | | S0010: 1, S0346: 1, H0581: 1, H0231: 1, H0046: 1, H0123: 1, S6028: 1, H0687: 1, S0003: 1, S0214: 1, H0252: 1, |
| | | | | | H0615: 1, H0212: 1, L0455: 1, S0366: 1, H0163: 1, H0038: 1, H0634: 1, T0067: 1, L0475: 1, H0560: 1, H0561: 1, |
| | | | | | S0464: 1, H0646: 1, S0426: 1, H0026: 1, L0790: 1, H0520: 1, H0435: 1, S0328: 1, H0539: 1, H0704: 1, S0027: 1, |
| | | | | | L0439: 1, L0750: 1, L0756: 1, L0757: 1, S0434: 1, L0581: 1, L0595: 1, H0543: 1 and H0423: 1. |
| 10 | HAJAA47 | 534670 | 20 | 192-308 | H0560: 1, H0561: 1 and H0542: 1. |
| 11 | HAJAY92 | 845601 | 21 | 12-296 | AR060: 184, AR055: 136, AR185: 131, AR299: 118, AR283: 100, AR300: 99, AR277: 94, AR089: 94, AR104: 84, |
| | | | | | AR282: 79, AR039: 68, AR316: 65, AR240: 60, AR096: 54, AR218: 35, AR219: 33, AR313: 33, |
| | | | | | H0561: 1 and L0758: 1. |
| 12 | HAJBV67 | 866415 | 22 | 605-1684 | AR039: 11, AR219: 10, AR316: 9, AR218: 9, AR089: 9, AR270: 8, AR282: 8, AR283: 8, AR269: 8, AR248: 7, |
| | | | | | AR299: 7, AR183: 7, AR309: 7, AR277: 7, AR096: 7, AR104: 7, AR313: 7, AR281: 7, AR265: 6, AR249: 6, |
| | | | | | AR253: 6, AR315: 6, AR300: 6, AR290: 6, AR292: 6, AR202: 6, AR312: 6, AR280: 6, AR175: 6, AR231: 5, |
| | | | | | AR182: 5, AR185: 5, AR268: 5, AR060: 5, AR294: 5, AR194: 5, AR238: 5, AR247: 4, AR243: 4, AR053: 4, |
| | | | | | AR267: 4, AR295: 4, AR291: 4, AR055: 4, AR285: 4, AR213: 4, AR052: 4, AR184: 4, AR293: 4, AR296: 3, |
| | | | | | AR240: 3, AR033: 3, AR310: 3, AR314: 3, AR275: 3, AR246: 3, AR205: 3, AR286: 3, AR271: 3, AR234: 3, |
| | | | | | AR192: 3, AR298: 3, AR263: 3, AR232: 3, AR256: 3, AR251: 3, AR259: 2, AR284: 2, AR229: 2, AR289: 2, |
| | | | | | AR226: 2, AR274: 2, AR237: 2, AR258: 2, AR179: 2, AR177: 2, AR233: 2, AR273: 2, AR227: 2, AR204: 2, |
| | | | | | AR186: 1, AR061: 1, AR241: 1, |
| | | | | | L0754: 9, S0444: 6, S0442: 5, S0358: 5, H0622: 5, H0624: 4, H0040: 4, L0659: 4, H0144: 4, H0521: 4, H0171: 3, |
| | | | | | L3499: 3, L2630: 3, H0046: 3, H0658: 3, H0555: 3, H0436: 3, L0758: 3, S0434: 3, H0543: 3, S0418: 2, S0360: 2, |
| | | | | | S0222: 2, L2499: 2, H0013: 2, H0156: 2, H0575: 2, H0615: 2, H0674: 2, H0616: 2, H0551: 2, H0412: 2, H0623: 2, |
| | | | | | S0440: 2, H0647: 2, S0422: 2, H0529: 2, L0666: 2, L2263: 2, S0374: 2, S0380: 2, S0146: 2, L0740: 2, L0731: 2, |
| | | | | | L0759: 2, S0436: 2, L0362: 2, H0556: 1, L3644: 1, S0114: 1, T0049: 1, L0002: 1, L2910: 1, S0282: 1, L2300: 1, |
| | | | | | S0356: 1, S0354: 1, S0408: 1, S0410: 1, L3709: 1, H0637: 1, H0742: 1, H0722: 1, S0046: 1, S0132: 1, S0300: 1, |
| | | | | | L2744: 1, L0717: 1, H0411: 1, H0431: 1, H0586: 1, H0587: 1, L2491: 1, L2647: 1, H0036: 1, H0004: 1, S0010: 1, |
| | | | | | H0318: 1, H0581: 1, H0251: 1, H0596: 1, L0471: 1, H0024: 1, H0014: 1, H0375: 1, H0266: 1, S0003: 1, S0214: 1, |
| | | | | | H0688: 1, T0023: 1, H0553: 1, L0055: 1, H0032: 1, S0036: 1, H0090: 1, H0591: 1, H0038: 1, T0067: 1, H0477: 1, |
| | | | | | H0488: 1, H0059: 1, H0561: 1, L0369: 1, L3905: 1, L0662: 1, L0766: 1, L0388: 1, L0774: 1, L0775: 1, L0606: 1, |
| | | | | | L0661: 1, L0526: 1, L0809: 1, L0665: 1, L2653: 1, L3665: 1, L3811: 1, H0519: 1, S0126: 1, H0683: 1, H0684: 1, |
| | | | | | H0659: 1, H0672: 1, H0710: 1, H0522: 1, S3014: 1, S0028: 1, L0752: 1, H0595: 1, S0394: 1, L0596: 1, L0589: 1, |
| | | | | | L0485: 1, L0595: 1, H0667: 1, S0242: 1, S0194: 1, H0423: 1, H0422: 1, S0384: 1, H0506: 1 and H0352: 1. |
| 13 | HATCD80 | 826098 | 23 | 296-409 | AR316: 50, AR055: 4, AR277: 3, AR060: 3, AR300: 3, AR282: 3, AR283: 2, AR218: 2, AR039: 1, AR104: 1, |
| | | | | | AR089: 1, AR240: 1, AR299: 1, AR185: 1, |
| | | | | | H0156: 1 and H0038: 1. |
| 14 | HATEH20 | 836056 | 24 | 93-221 | AR055: 7, AR060: 6, AR218: 6, AR185: 5, AR089: 5, AR299: 4, AR313: 4, AR240: 4, AR316: 4, AR300: 4, |
| | | | | | AR283: 4, AR096: 3, AR039: 3, AR282: 3, AR104: 3, AR277: 2, AR219: 1, |
| | | | | | L0439: 14, L0740: 13, H0046: 10, H0556: 9, L0752: 9, H0052: 7, H0617: 7, L0748: 7, L0747: 7, L0758: 7, S0222: 6, |
| | | | | | L0809: 6, L0754: 6, S0049: 5, H0620: 5, L0769: 5, L0766: 5, L0663: 5, H0144: 5, L0438: 5, L0741: 5, L0731: 5, |
| | | | | | S0436: 5, H0657: 4, S0278: 4, H0599: 4, L0163: 4, H0266: 4, S0002: 4, L0771: 4, L0804: 4, L0659: 4, H0521: 4, |
| | | | | | L0742: 4, L0743: 4, L0751: 4, L0753: 4, L0759: 4, S0444: 3, H0728: 3, H0618: 3, S0010: 3, H0050: 3, L0471: 3, |
| | | | | | S0051: 3, T0010: 3, S6028: 3, H0551: 3, H0494: 3, S0144: 3, H0529: 3, L0763: 3, L0770: 3, L0637: 3, L0775: 3, |
| | | | | | L0655: 3, L0666: 3, S0330: 3, H0696: 3, L0757: 3, H0265: 2, H0716: 2, H0656: 2, S0418: 2, S0442: 2, H0733: 2, |
| | | | | | L0149: 2, H0333: 2, H0486: 2, H0427: 2, H0042: 2, H0457: 2, H0041: 2, S0003: 2, T0006: 2, S0364: 2, H0124: 2, |
| | | | | | S0366: 2, H0135: 2, S0038: 2, S0422: 2, L0638: 2, L5575: 2, L5566: 2, L0372: 2, L0662: 2, L0794: 2, L0776: 2, |
| | | | | | L0789: 2, S0374: 2, H0519: 2, H0658: 2, H0660: 2, S0152: 2, S0406: 2, H0727: 2, L0485: 2, L0599: 2, L0601: 2, |
| | | | | | H0506: 2, S0040: 1, H0713: 1, H0740: 1, H0650: 1, H0341: 1, S0212: 1, S0282: 1, H0663: 1, H0459: 1, H0638: 1, |
| | | | | | S0420: 1, L0617: 1, S0360: 1, S0408: 1, H0741: 1, H0735: 1, H0734: 1, H0208: 1, S0132: 1, H0645: 1, H0370: 1, |
| | | | | | L0622: 1, L0623: 1, H0013: 1, S0280: 1, H0156: 1, L0021: 1, H0097: 1, H0575: 1, H0036: 1, H0590: 1, S0346: 1, |
| | | | | | H0318: 1, H0230: 1, H0596: 1, H0597: 1, H0231: 1, H0150: 1, H0009: 1, N0006: 1, H0565: 1, H0569: 1, H0242: 1, |
| | | | | | H0012: 1, H0024: 1, H0373: 1, H0051: 1, H0083: 1, H0267: 1, H0292: 1, H0428: 1, H0604: 1, H0553: 1, H0181: 1, |
| | | | | | H0168: 1, H0169: 1, H0708: 1, H0163: 1, H0090: 1, T0067: 1, H0264: 1, S0386: 1, S0112: 1, L0351: 1, L0564: 1, |
| | | | | | T0042: 1, H0561: 1, S0370: 1, S0142: 1, S0344: 1, L0640: 1, L0761: 1, L0667: 1, L0373: 1, L0646: 1, L0641: 1, |
| | | | | | L0374: 1, L0764: 1, L0773: 1, L0521: 1, L0626: 1, L0533: 1, L0803: 1, L0651: 1, L0805: 1, L0661: 1, L0657: 1, |
| | | | | | L0634: 1, L0542: 1, L0783: 1, L0529: 1, L0543: 1, L5623: 1, L0787: 1, L0665: 1, L3811: 1, L3825: 1, H0520: 1, |
| | | | | | H0547: 1, S0380: 1, H0522: 1, H0436: 1, H0576: 1, L0609: 1, L0744: 1, L0745: 1, L0749: 1, L0786: 1, L0777: 1, |
| | | | | | L0755: 1, H0444: 1, S0434: 1, L0480: 1, L0584: 1, L0595: 1, S0011: 1, H0422: 1 and H0008: 1. |
| 15 | HBAGD86 | 838799 | 25 | 521-580 | AR219: 7, AR218: 4, AR313: 4, AR104: 4, AR039: 3, AR299: 3, AR282: 2, AR300: 2, AR096: 2, AR316: 2, |
| | | | | | AR277: 1, AR240: 1, AR089: 1, |
| | | | | | L0809: 4, L0766: 3, L0439: 3, H0624: 2, H0411: 2, L0794: 2, L0749: 2, L0756: 2, L0005: 1, L3649: 1, S0476: 1, |
| | | | | | H0599: 1, L0471: 1, S0051: 1, T0010: 1, H0266: 1, S0150: 1, S0422: 1, L0637: 1, L0765: 1, L0803: 1, L0783: 1, |
| | | | | | L5622: 1, H0144: 1, H0672: 1, S0392: 1, L0748: 1, L0754: 1, L0779: 1, L0777: 1, L0731: 1 and L0759: 1. |
| 16 | HBGBC29 | 691473 | 26 | 1016-1024 | AR299: 5, AR218: 5, AR313: 4, AR300: 4, AR055: 4, AR060: 4, AR277: 3, AR316: 3, AR089: 3, AR185: 3, |
| | | | | | AR096: 3, AR039: 3, AR219: 3, AR104: 3, AR240: 3, AR282: 2, AR283: 2, |
| | | | | | L0731: 20, L0747: 7, L0794: 6, L0764: 4, L0803: 4, L0759: 4, L0662: 3, L0774: 3, L0749: 3, L0756: 3, S0436: 3, |
| | | | | | S0360: 2, H0156: 2, H0046: 2, H0181: 2, L0766: 2, L0659: 2, L0809: 2, L0438: 2, S0126: 2, H0658: 2, L0439: 2, |
| | | | | | L0754: 2, L0777: 2, L0755: 2, L0757: 2, L0604: 2, S0242: 2, S0442: 1, S0376: 1, S0408: 1, L0717: 1, H0270: 1, |
| | | | | | H0263: 1, H0597: 1, H0123: 1, H0617: 1, H0551: 1, S0440: 1, H0647: 1, L0770: 1, L0769: 1, L0638: 1, L0775: 1, |
| | | | | | L0651: 1, L0527: 1, L0526: 1, L0789: 1, L0666: 1, L0665: 1, H0547: 1, H0435: 1, H0648: 1, S0330: 1, S0406: 1, |
| | | | | | H0627: 1, L0750: 1, L0780: 1, L0752: 1, L0758: 1, L0366: 1 and H0293: 1. |
| 17 | HBGNC72 | 892131 | 27 | 550-780 | AR096: 11, AR240: 11, AR316: 9, AR218: 9, AR089: 8, AR282: 8, AR219: 8, AR055: 7, AR060: 7, AR299: 6, |
| | | | | | AR104: 6, AR039: 6, AR185: 6, AR313: 6, AR283: 6, AR300: 5, AR277: 5, |
| | | | | | H0617: 5, H0547: 3, L0751: 3, L0779: 3, H0618: 2, H0052: 2, H0135: 2, H0100: 2, L0637: 2, L0764: 2, H0520: 2, |
| | | | | | H0593: 2, H0543: 2, H0265: 1, H0556: 1, H0585: 1, H0255: 1, H0664: 1, S0420: 1, S0442: 1, H0637: 1, H0733: 1, |
| | | | | | S0045: 1, H0614: 1, H0485: 1, H0486: 1, H0374: 1, S0049: 1, H0086: 1, H0674: 1, L0770: 1, L0769: 1, L3905: 1, |
| | | | | | L0662: 1, L0794: 1, L0766: 1, L0803: 1, L0805: 1, L0653: 1, L0654: 1, L0636: 1, L0783: 1, L5622: 1, L5623: 1, |
| | | | | | L0787: 1, L0663: 1, H0519: 1, H0521: 1, H0555: 1, H0436: 1, S0028: 1, L0741: 1, L0758: 1, S0276: 1 and H0352: 1. |
| 18 | HBHAA05 | 603174 | 28 | 110-286 | AR313: 74, AR039: 45, AR299: 34, AR089: 33, AR185: 31, AR277: 29, AR096: 26, AR300: 26, AR240: 22, |
| | | | | | AR316: 20, AR218: 17, AR060: 15, AR219: 14, AR104: 14, AR282: 11, AR055: 9, AR283: 6, |
| | | | | | S0029: 1 |
| 19 | HBHAA81 | 846465 | 29 | 28-639 | AR289: 34, AR291: 33, AR283: 32, AR055: 32, AR294: 26, AR266: 26, AR286: 26, AR256: 23, AR285: 21, |
| | | | | | AR293: 19, AR259: 17, AR295: 16, AR292: 15, AR298: 14, AR258: 14, AR296: 12, AR284: 11, AR104: 10, |
| | | | | | AR033: 9, AR186: 9, AR202: 7, AR206: 7, AR246: 7, AR204: 7, AR241: 6, AR194: 5, AR198: 4, AR244: 4, |
| | | | | | AR251: 4, AR060: 4, AR061: 4, AR282: 4, AR052: 4, AR053: 4, AR205: 4, AR309: 4, AR316: 3, AR182: 3, |
| | | | | | AR312: 3, AR192: 3, AR273: 3, AR229: 3, AR183: 3, AR310: 3, AR271: 3, AR213: 3, AR248: 3, AR270: 3, |
| | | | | | AR277: 2, AR185: 2, AR275: 2, AR299: 2, AR269: 2, AR300: 2, AR247: 2, AR267: 2, AR175: 2, AR089: 2, |
| | | | | | AR313: 2, AR265: 2, AR268: 2, AR237: 2, AR096: 1, AR232: 1, AR039: 1, AR240: 1, AR179: 1, AR231: 1, AR234: 1, |
| | | | | | H0599: 8, S0366: 7, L0485: 6, H0733: 5, H0734: 5, L0769: 5, H0735: 4, H0729: 3, H0728: 3, H0619: 2, H0706: 2, |
| | | | | | L0661: 2, L0756: 2, L0759: 2, S0282: 1, S0029: 1, S0222: 1, L0622: 1, H0122: 1, S0010: 1, H0196: 1, H0012: 1, |
| | | | | | H0200: 1, H0373: 1, S6028: 1, S0364: 1, S0036: 1, S0294: 1, L0770: 1, L0638: 1, L5565: 1, L0657: 1, L0809: 1, |
| | | | | | L0789: 1, L0791: 1, L0438: 1, L0439: 1, L0750: 1, L0777: 1, S0260: 1, L0604: 1 and S0460: 1. |
| 20 | HBIAC29 | 831751 | 30 | 1036-1125 | AR089: 25, AR218: 17, AR104: 14, AR219: 13, AR313: 12, AR316: 11, AR060: 11, AR096: 10, AR055: 10, |
| | | | | | AR299: 9, AR185: 9, AR039: 9, AR240: 8, AR282: 8, AR300: 8, AR283: 6, AR277: 5, |
| | | | | | L0105: 11, L0745: 5, L0770: 4, L0794: 4, L0777: 4, S0003: 3, L0766: 3, L0806: 3, L0809: 3, L0740: 3, L0751: 3, |
| | | | | | L0749: 3, S0376: 2, S0360: 2, L0598: 2, L0776: 2, L0666: 2, L0663: 2, S0126: 2, H0659: 2, H0658: 2, S0406: 2, |
| | | | | | H0436: 2, S3014: 2, L0754: 2, L0756: 2, L0604: 2, H0624: 1, H0265: 1, S0116: 1, H0669: 1, H0331: 1, L0586: 1, |
| | | | | | S0049: 1, H0597: 1, L0471: 1, H0024: 1, S0214: 1, H0169: 1, L0455: 1, H0135: 1, S0422: 1, L0451: 1, L0772: 1, |
| | | | | | L0764: 1, L0765: 1, L0773: 1, L0387: 1, L0804: 1, L0805: 1, L0657: 1, L0659: 1, L0526: 1, L0783: 1, L0529: 1, |
| | | | | | L0787: 1, L0788: 1, L0664: 1, L0665: 1, L0748: 1, L0779: 1, L0731: 1, L0599: 1, H0543: 1 and H0423: 1. |
| 21 | HBJAB02 | 837309 | 31 | 84-188 | AR282: 3, AR277: 1, AR039: 1, AR316: 1, |
| | | | | | S0434: 5, L0794: 3, H0255: 2, H0318: 2, H0251: 2, L0764: 2, L0628: 2, L0809: 2, L0665: 2, H0658: 2, S0406: 2, |
| | | | | | L0361: 2, H0265: 1, H0685: 1, H0657: 1, H0483: 1, S0420: 1, S0442: 1, S0358: 1, H0729: 1, H0734: 1, S0132: 1, |
| | | | | | S0222: 1, T0082: 1, H0150: 1, H0083: 1, S0214: 1, H0252: 1, H0628: 1, T0041: 1, S0344: 1, H0529: 1, L0520: 1, |
| | | | | | L0535: 1, L0662: 1, L0387: 1, L0375: 1, L0518: 1, L0666: 1, L0663: 1, H0726: 1, H0519: 1, H0670: 1, H0660: 1, |
| | | | | | L0602: 1, L0747: 1, L0777: 1, L0601: 1, S0276: 1, H0423: 1 and H0422: 1. |
| 22 | HBJAC40 | 841235 | 32 | 329-370 | AR104: 23, AR060: 6, AR055: 6, AR283: 5, AR185: 5, AR282: 4, AR313: 4, AR299: 4, AR316: 4, AR277: 3, |
| | | | | | AR096: 3, AR240: 3, AR219: 2, AR089: 2, AR300: 2, AR039: 2, AR218: 2, |
| | | | | | L0439: 18, H0052: 12, L0741: 8, L0438: 6, S0051: 5, H0556: 4, L0769: 4, L0774: 4, S0474: 3, H0622: 3, S0036: 3, |
| | | | | | L3905: 3, H0261: 2, H0318: 2, H0194: 2, L0471: 2, H0538: 2, L0749: 2, L0757: 2, L0758: 2, S0436: 2, L0593: 2, |
| | | | | | H0624: 1, H0265: 1, S0342: 1, H0717: 1, H0650: 1, H0657: 1, S0212: 1, S0282: 1, H0730: 1, S0045: 1, S0476: 1, |
| | | | | | H0619: 1, S0222: 1, H0455: 1, H0559: 1, H0075: 1, H0253: 1, H0251: 1, H0544: 1, L0158: 1, H0012: 1, S0050: 1, |
| | | | | | L0163: 1, H0083: 1, H0594: 1, H0615: 1, T0006: 1, H0708: 1, H0087: 1, H0056: 1, S0038: 1, H0494: 1, S0450: 1, |
| | | | | | S0144: 1, L0770: 1, L4747: 1, L0639: 1, L0761: 1, L0775: 1, L0805: 1, L0635: 1, L5622: 1, L0788: 1, S0428: 1, |
| | | | | | S0044: 1, L0612: 1, L0742: 1, L0748: 1, L0779: 1, L0777: 1, S0011: 1 and H0136: 1. |
| 23 | HBJCR46 | 815649 | 33 | 589-2787 | L0794: 11, L0803: 10, L0779: 10, H0038: 9, L0777: 9, L0758: 9, S0358: 6, L0809: 5, S0408: 4, H0616: 4, L0748: 4, |
| | | | | | L0439: 4, L0591: 4, S0282: 3, L0789: 3, L0666: 3, L0438: 3, L0756: 3, H0036: 2, H0196: 2, H0046: 2, H0154: 2, |
| | | | | | L0163: 2, H0213: 2, S0036: 2, L0804: 2, L0774: 2, L0655: 2, L0656: 2, S0374: 2, S0126: 2, S0328: 2, S0152: 2, |
| | | | | | H0521: 2, S0406: 2, L0731: 2, L0588: 2, L0485: 2, S0026: 2, H0543: 2, H0170: 1, H0171: 1, H0713: 1, S6024: 1, |
| | | | | | H0650: 1, H0656: 1, S0116: 1, H0341: 1, H0638: 1, S0442: 1, S0354: 1, S0360: 1, H0580: 1, S0045: 1, H0619: 1, |
| | | | | | H0437: 1, S0222: 1, H0333: 1, H0574: 1, H0486: 1, H0575: 1, H0590: 1, H0618: 1, H0253: 1, H0318: 1, H0581: 1, |
| | | | | | H0230: 1, H0597: 1, H0544: 1, H0178: 1, H0123: 1, H0050: 1, S0050: 1, H0014: 1, S6028: 1, H0266: 1, S0003: 1, |
| | | | | | H0033: 1, H0032: 1, H0673: 1, H0598: 1, H0163: 1, H0040: 1, H0551: 1, H0623: 1, H0100: 1, T0041: 1, H0561: 1, |
| | | | | | S0438: 1, H0641: 1, S0344: 1, S0002: 1, S0426: 1, L0769: 1, L0800: 1, L0641: 1, L0766: 1, L0775: 1, L0375: 1, |
| | | | | | L0653: 1, L0634: 1, L0659: 1, L0783: 1, L0787: 1, L0663: 1, L0664: 1, L0665: 1, H0725: 1, H0670: 1, H0522: 1, |
| | | | | | H0436: 1, H0540: 1, S0027: 1, L0740: 1, L0751: 1, L0747: 1, L0749: 1, L0786: 1, L0780: 1, L0752: 1, L0757: 1, |
| | | | | | L0608: 1, L0604: 1, S0192: 1 and S0276: 1. |
| 24 | HBJDW56 | 520401 | 34 | 121-147 | AR055: 8, AR060: 7, AR282: 6, AR104: 5, AR313: 5, AR185: 5, AR300: 4, AR089: 4, AR299: 4, AR240: 4, |
| | | | | | AR039: 4, AR219: 4, AR316: 3, AR096: 3, AR283: 3, AR218: 3, AR277: 2, |
| | | | | | H0318: 1 |
| 25 | HBJEL16 | 847030 | 35 | 115-225 | H0046: 2, H0009: 2, H0090: 2, H0494: 2, L0438: 2, H0547: 2, H0521: 2, L0439: 2, L0777: 2, H0543: 2, H0556: 1, |
| | | | | | S0342: 1, S0045: 1, H0619: 1, H0632: 1, H0013: 1, H0156: 1, L0021: 1, H0575: 1, H0318: 1, S0003: 1, L0483: 1, |
| | | | | | H0628: 1, H0623: 1, H0561: 1, L0761: 1, L0803: 1, L0804: 1, L0659: 1, L0382: 1, H0144: 1, H0539: 1, S0152: 1, |
| | | | | | H0478: 1, H0631: 1, L0741: 1, L0740: 1 and L0591: 1. |
| 26 | HBJKD16 | 853358 | 36 | 78-173 | AR172: 63, AR171: 62, AR215: 61, AR274: 50, AR216: 48, AR213: 43, AR214: 41, AR272: 41, AR169: 41, |
| | | | | | AR224: 37, AR225: 37, AR217: 37, AR254: 36, AR205: 36, AR170: 35, AR243: 35, AR168: 35, AR247: 34, |
| | | | | | AR245: 32, AR312: 32, AR221: 32, AR212: 31, AR161: 29, AR222: 28, AR162: 28, AR311: 27, AR308: 27, |
| | | | | | AR163: 26, AR275: 26, AR165: 25, AR164: 24, AR313: 23, AR053: 23, AR166: 23, AR223: 21, AR039: 20, |
| | | | | | AR089: 20, AR309: 19, AR096: 19, AR242: 18, AR253: 18, AR240: 17, AR289: 16, AR266: 16, AR283: 16, |
| | | | | | AR263: 16, AR193: 16, AR316: 16, AR264: 16, AR204: 16, AR250: 15, AR282: 15, AR201: 15, AR277: 15, |
| | | | | | AR207: 14, AR291: 14, AR246: 14, AR200: 13, AR198: 13, AR271: 12, AR299: 12, AR300: 12, AR195: 12, |
| | | | | | AR185: 12, AR104: 12, AR290: 11, AR192: 11, AR173: 11, AR255: 11, AR257: 11, AR060: 11, AR197: 11, |
| | | | | | AR252: 10, AR180: 10, AR297: 10, AR179: 10, AR210: 10, AR061: 10, AR181: 9, AR296: 9, AR199: 9, AR270: 9, |
| | | | | | AR269: 9, AR178: 9, AR183: 9, AR268: 8, AR055: 8, AR177: 8, AR262: 8, AR236: 8, AR288: 8, AR211: 8, |
| | | | | | AR188: 7, AR267: 7, AR293: 7, AR219: 7, AR285: 7, AR256: 7, AR294: 7, AR174: 7, AR176: 7, AR189: 7, |
| | | | | | AR033: 7, AR261: 7, AR218: 7, AR287: 6, AR175: 6, AR196: 6, AR231: 6, AR203: 6, AR286: 5, AR235: 5, |
| | | | | | AR190: 5, AR230: 5, AR234: 5, AR191: 5, AR182: 5, AR260: 5, AR258: 4, AR295: 4, AR237: 4, AR233: 4, |
| | | | | | AR229: 4, AR238: 4, AR239: 3, AR226: 3, AR232: 2, AR227: 2, AR228: 2, |
| | | | | | L0766: 9, L0439: 9, L0747: 6, L2528: 5, L0777: 5, H0673: 4, L0438: 4, L0758: 4, L0362: 4, S0116: 3, L0748: 3, |
| | | | | | L0752: 3, H0445: 3, H0156: 2, T0010: 2, H0615: 2, H0038: 2, H0616: 2, H0264: 2, H0646: 2, L0761: 2, L0776: 2, |
| | | | | | L0750: 2, L0779: 2, S0436: 2, L0593: 2, S0242: 2, H0222: 1, H0740: 1, H0657: 1, H0661: 1, H0663: 1, L2293: 1, |
| | | | | | H0589: 1, S0444: 1, H0340: 1, L3646: 1, H0580: 1, H0749: 1, H0393: 1, H0549: 1, S0222: 1, H0574: 1, H0486: 1, |
| | | | | | H0013: 1, H0069: 1, L0021: 1, S0010: 1, H0318: 1, S0474: 1, H0046: 1, L0471: 1, H0090: 1, L0638: 1, L0646: 1, |
| | | | | | L0764: 1, L0521: 1, L0364: 1, L0774: 1, L0659: 1, L0543: 1, L5622: 1, L0792: 1, L0666: 1, L0664: 1, L0665: 1, |
| | | | | | S0428: 1, L2657: 1, L2652: 1, L3663: 1, L2262: 1, H0435: 1, L3832: 1, L0741: 1, L0749: 1, S0434: 1, L0588: 1, |
| | | | | | H0422: 1, L0698: 1 and L2359: 1. |
| 27 | HBMBM96 | 561935 | 37 | 170-184 | AR313: 45, AR039: 38, AR277: 36, AR299: 25, AR096: 23, AR185: 22, AR089: 21, AR219: 19, AR300: 18, |
| | | | | | AR218: 18, AR104: 17, AR316: 16, AR060: 13, AR240: 12, AR282: 11, AR055: 9, AR283: 4, |
| | | | | | L0747: 2, H0392: 1, H0574: 1, H0421: 1, L0662: 1, L0666: 1, S0404: 1, L0744: 1 and H0543: 1. |
| 28 | HBMTM11 | 589515 | 38 | 125-220 | AR039: 17, AR313: 13, AR219: 11, AR055: 9, AR218: 9, AR104: 8, AR096: 8, AR089: 8, AR316: 8, AR299: 7, |
| | | | | | AR300: 7, AR277: 7, AR060: 7, AR282: 6, AR185: 6, AR240: 6, AR283: 2, |
| | | | | | S0422: 14, L0754: 14, L0766: 13, L0740: 7, L0779: 6, L0755: 5, H0591: 4, L0756: 4, S0354: 3, L0663: 3, L0438: 3, |
| | | | | | L0777: 3, L0752: 3, L0362: 3, H0423: 3, H0624: 2, S0218: 2, S0212: 2, H0638: 2, S0360: 2, S0222: 2, H0562: 2, |
| | | | | | H0014: 2, H0615: 2, H0412: 2, S0002: 2, L0638: 2, L0764: 2, S0406: 2, H0555: 2, L0439: 2, L0745: 2, L0753: 2, |
| | | | | | H0543: 2, H0170: 1, L3643: 1, S0040: 1, H0713: 1, H0740: 1, S0134: 1, S0116: 1, H0669: 1, S0442: 1, S0444: 1, |
| | | | | | H0637: 1, H0729: 1, H0734: 1, S0046: 1, H0747: 1, H0749: 1, L0717: 1, S6016: 1, H0497: 1, H0333: 1, L3816: 1, |
| | | | | | H0632: 1, H0485: 1, H0486: 1, H0013: 1, H0427: 1, H0156: 1, L0021: 1, H0122: 1, H0318: 1, H0596: 1, H0546: 1, |
| | | | | | H0046: 1, H0457: 1, H0123: 1, H0375: 1, S6028: 1, S0250: 1, H0428: 1, H0553: 1, H0644: 1, H0674: 1, H0634: 1, |
| | | | | | H0063: 1, H0264: 1, H0623: 1, H0561: 1, H0646: 1, H0529: 1, L0761: 1, L0662: 1, L0767: 1, L0649: 1, L0774: 1, |
| | | | | | L0775: 1, L0375: 1, L0805: 1, L0776: 1, L0658: 1, L0518: 1, L0783: 1, L0809: 1, L0647: 1, L0367: 1, L0789: 1, |
| | | | | | L0792: 1, L0666: 1, L0664: 1, H0519: 1, H0690: 1, H0670: 1, H0648: 1, S0330: 1, S0378: 1, H0709: 1, H0436: 1, |
| | | | | | S0390: 1, S0028: 1, L0758: 1, L0759: 1, S0434: 1, S0436: 1, H0668: 1, S0412: 1 and S0424: 1. |
| 29 | HBMUH74 | 866160 | 39 | 344-430 | AR218: 12, AR055: 8, AR060: 7, AR104: 7, AR219: 5, AR240: 5, AR299: 5, AR096: 4, AR316: 4, AR300: 4, |
| | | | | | AR039: 4, AR089: 3, AR283: 3, AR185: 3, AR313: 3, AR282: 2, AR277: 2, |
| | | | | | L0754: 3, L0777: 3, L0439: 2, S0116: 1, H0341: 1, H0661: 1, H0038: 1, H0412: 1, L0761: 1, L0667: 1, L0764: 1, |
| | | | | | L0788: 1, H0435: 1, L0749: 1, L0779: 1 and L0758: 1. |
| 30 | HBQAB79 | 810542 | 40 | 190-225 | AR055: 7, AR218: 7, AR060: 6, AR039: 6, AR300: 5, AR185: 5, AR313: 5, AR240: 4, AR299: 4, AR089: 4, |
| | | | | | AR096: 3, AR316: 3, AR283: 3, AR104: 2, AR219: 2, AR277: 2, AR282: 1, |
| | | | | | H0229: 1 |
| 31 | HBSAK32 | 856387 | 41 | 447-590 | AR277: 18, AR104: 14, AR218: 14, AR219: 13, AR299: 13, AR313: 12, AR316: 12, AR089: 12, AR185: 12, |
| | | | | | AR283: 11, AR060: 11, AR039: 11, AR096: 11, AR240: 10, AR055: 10, AR282: 10, AR300: 7, |
| | | | | | L0790: 2, H0170: 1, H0381: 1, S0001: 1, S0282: 1, L0021: 1, S0112: 1, L0640: 1, L0766: 1, L0774: 1, L0651: 1, |
| | | | | | L0517: 1, L0783: 1, L0809: 1, L0519: 1, L0743: 1, L0751: 1, L0747: 1, L0749: 1, L0750: 1, L0777: 1, L0755: 1, |
| | | | | | L0758: 1 and L0759: 1. |
| 32 | HBXCX15 | 637542 | 42 | 72-77 | S0038: 3, H0438: 1, L0363: 1 and S0053: 1. |
| 33 | HCDCY76 | 837972 | 43 | 860-967 | AR219: 7, AR218: 6, AR055: 2, AR282: 2, AR060: 2, AR299: 1, AR104: 1, AR185: 1, AR240: 1, AR277: 1, |
| | | | | | L1430: 5, L0770: 2, L0754: 2, L0747: 2, L0777: 2, S0360: 1, S0045: 1, H0486: 1, H0616: 1, L0803: 1, L0775: 1, |
| | | | | | L0783: 1, L0787: 1, L0789: 1, L0750: 1, S0194: 1 and S0276: 1. |
| 34 | HCDDL48 | 839743 | 44 | 333-455 | AR282: 5, AR055: 5, AR060: 4, AR240: 3, AR283: 3, AR300: 2, AR316: 2, AR104: 2, AR039: 2, AR313: 2, |
| | | | | | AR185: 1, AR218: 1, AR089: 1, AR299: 1, AR219: 1, AR096: 1, |
| | | | | | H0251: 1 |
| 35 | HCE1G78 | 761204 | 45 | 77-841 | AR277: 13, AR060: 9, AR104: 9, AR218: 8, AR055: 8, AR282: 8, AR299: 8, AR283: 7, AR039: 7, AR185: 6, |
| | | | | | AR089: 6, AR219: 6, AR316: 5, AR300: 5, AR096: 5, AR313: 5, AR240: 5, |
| | | | | | L0439: 8, S0356: 2, L0803: 2, L0809: 2, L0666: 2, L0752: 2, S0442: 1, H0052: 1, H0194: 1, H0617: 1, H0040: 1, |
| | | | | | H0100: 1, L5565: 1, L0774: 1, L0787: 1 and L0593: 1. |
| 36 | HCE5F78 | 838101 | 46 | 566-664 | H0052: 2 and H0445: 2. |
| 37 | HCEDR26 | 771144 | 47 | 177-344 | AR313: 59, AR039: 47, AR277: 33, AR299: 28, AR185: 25, AR096: 23, AR089: 23, AR300: 20, AR219: 19, |
| | | | | | AR240: 17, AR316: 16, AR104: 15, AR282: 13, AR218: 13, AR060: 13, AR283: 10, AR055: 10, |
| | | | | | H0052: 2, H0018: 1, H0264: 1 and L0700: 1. |
| 38 | HCEEQ25 | 531784 | 48 | 111-182 | AR039: 8, AR313: 7, AR185: 7, AR055: 7, AR300: 6, AR060: 6, AR240: 6, AR218: 6, AR089: 5, AR299: 5, |
| | | | | | AR104: 5, AR096: 4, AR316: 4, AR277: 3, AR282: 3, AR283: 3, AR219: 3, |
| | | | | | H0052: 1 and H0144: 1. |
| 39 | HCEEU18 | 688041 | 49 | 209-340 | AR313: 46, AR039: 35, AR299: 24, AR219: 21, AR277: 21, AR089: 20, AR096: 19, AR185: 19, AR218: 16, |
| | | | | | AR316: 14, AR300: 13, AR104: 13, AR240: 12, AR060: 11, AR282: 10, AR055: 9, AR283: 5, |
| | | | | | H0052: 1 |
| 40 | HCEGG08 | 844506 | 50 | 1114-1197 | AR240: 6, AR282: 6, AR104: 5, AR060: 5, AR055: 4, AR089: 4, AR277: 4, AR096: 4, AR283: 3, AR039: 3, |
| | | | | | AR300: 3, AR299: 3, AR313: 3, AR185: 2, AR219: 2, AR316: 2, AR218: 2, |
| | | | | | L0439: 15, H0052: 11, S0007: 9, L0438: 6, L0731: 6, L0779: 5, L0754: 4, H0550: 3, L0769: 3, S0126: 3, L0743: 3, |
| | | | | | H0194: 2, H0687: 2, H0623: 2, L0768: 2, L0776: 2, L0659: 2, L0666: 2, L0663: 2, H0689: 2, S0330: 2, L0748: 2, |
| | | | | | L0786: 2, L0777: 2, L0752: 2, L0758: 2, L0608: 2, H0352: 2, H0662: 1, S0356: 1, S0354: 1, S0444: 1, S0045: 1, |
| | | | | | S0476: 1, H0441: 1, H0431: 1, H0333: 1, H0642: 1, H0575: 1, H0590: 1, T0048: 1, H0150: 1, H0024: 1, S0050: 1, |
| | | | | | S0388: 1, H0252: 1, H0039: 1, H0135: 1, H0038: 1, H0264: 1, H0494: 1, L0770: 1, L4747: 1, L0372: 1, L0646: 1, |
| | | | | | L0521: 1, L0794: 1, L0803: 1, L0775: 1, L0653: 1, L0661: 1, L0807: 1, L0657: 1, L0809: 1, L0792: 1, L0664: 1, |
| | | | | | L2258: 1, H0144: 1, L0352: 1, H0519: 1, H0593: 1, H0658: 1, H0672: 1, H0539: 1, S0406: 1, L0751: 1, L0749: 1, |
| | | | | | L0756: 1, L0753: 1, H0506: 1 and L2357: 1. |
| 41 | HCFLN88 | 610000 | 51 | 101-178 | S0410: 22, L0770: 9, L0748: 9, L0769: 7, L0776: 6, L0659: 6, H0424: 5, L0761: 5, L0731: 5, H0486: 4, L0803: 4, |
| | | | | | L0809: 4, L0666: 4, H0696: 4, L0754: 4, L0779: 4, L0758: 4, H0729: 3, H0618: 3, H0135: 3, L0637: 3, L0771: 3, |
| | | | | | L0766: 3, L0805: 3, L0665: 3, L0751: 3, H0542: 3, H0341: 2, H0402: 2, S0358: 2, S0376: 2, S0360: 2, H0747: 2, |
| | | | | | S0132: 2, L3109: 2, L0717: 2, H0592: 2, H0253: 2, S0010: 2, H0052: 2, H0545: 2, H0050: 2, H0617: 2, H0087: 2, |
| | | | | | H0551: 2, H0100: 2, H0560: 2, L0763: 2, L5565: 2, L0646: 2, L0764: 2, L0655: 2, L0663: 2, L2260: 2, S0374: 2, |
| | | | | | H0414: 2, S0406: 2, H0436: 2, L0743: 2, L0740: 2, L0749: 2, L0755: 2, L0757: 2, L0759: 2, H0445: 2, H0136: 2, |
| | | | | | H0543: 2, H0423: 2, H0352: 2, H0170: 1, H0171: 1, H0225: 1, H0713: 1, S0218: 1, L0785: 1, H0692: 1, S0212: 1, |
| | | | | | H0483: 1, H0254: 1, H0305: 1, S0356: 1, S0442: 1, S0444: 1, S0408: 1, H0619: 1, H0393: 1, H0406: 1, H0370: 1, |
| | | | | | H0249: 1, H0101: 1, H0250: 1, S0280: 1, H0599: 1, H0575: 1, H0706: 1, T0048: 1, H0318: 1, S0474: 1, H0581: 1, |
| | | | | | T0115: 1, H0009: 1, H0572: 1, H0024: 1, S0051: 1, H0271: 1, H0288: 1, T0006: 1, H0213: 1, H0553: 1, H0644: 1, |
| | | | | | S0364: 1, H0163: 1, H0090: 1, H0264: 1, H0488: 1, S0112: 1, H0494: 1, H0652: 1, S0344: 1, S0002: 1, S0426: 1, |
| | | | | | L4497: 1, L5575: 1, L3905: 1, L5566: 1, L0772: 1, L0641: 1, L0645: 1, L0773: 1, L0650: 1, L0774: 1, L0775: 1, |
| | | | | | L0378: 1, L0806: 1, L0783: 1, L5622: 1, L0790: 1, L0664: 1, L3827: 1, H0547: 1, H0519: 1, S0126: 1, H0711: 1, |
| | | | | | H0672: 1, S0330: 1, H0521: 1, S0392: 1, S0037: 1, L0742: 1, L0439: 1, L0745: 1, L0747: 1, L0750: 1, L0777: 1, |
| | | | | | S0436: 1, L0485: 1, L0608: 1, S0011: 1, H0653: 1 and H0422: 1. |
| 42 | HCHAB84 | 834326 | 52 | 304-747 | AR313: 37, AR039: 34, AR104: 24, AR300: 24, AR277: 23, AR096: 23, AR185: 20, AR089: 20, AR299: 19, |
| | | | | | AR219: 18, AR218: 17, AR316: 16, AR240: 16, AR282: 13, AR283: 9, AR060: 8, AR055: 7, |
| | | | | | S0354: 9, S0358: 3, H0494: 3, S0476: 2, S0474: 2, S0438: 2, H0519: 2, H0521: 2, L0754: 2, H0170: 1, S0040: 1, |
| | | | | | S0114: 1, H0484: 1, H0483: 1, H0255: 1, S0376: 1, S0444: 1, S0408: 1, S0046: 1, H0619: 1, H0549: 1, H0042: 1, |
| | | | | | H0581: 1, H0052: 1, H0083: 1, S0440: 1, L0773: 1, L0517: 1, L0383: 1, S0374: 1, S0152: 1, S3014: 1, L0751: 1, |
| | | | | | L0759: 1, S0434: 1, S0436: 1, H0543: 1 and H0422: 1. |
| 43 | HCMSX51 | 788643 | 53 | 539-781 | L0740: 16, L0745: 7, L0439: 6, L0438: 4, H0547: 4, L0750: 4, L0759: 4, H0619: 3, H0618: 3, L0770: 3, L3828: 3, |
| | | | | | L0749: 3, L0758: 3, H0393: 2, H0599: 2, H0083: 2, H0124: 2, H0623: 2, H0100: 2, L3905: 2, L0794: 2, L0809: 2, |
| | | | | | L3825: 2, L3829: 2, S0406: 2, S0027: 2, L0743: 2, L0746: 2, L0777: 2, L0603: 2, S0040: 1, L2879: 1, L2906: 1, |
| | | | | | S0420: 1, S0442: 1, S0358: 1, L3311: 1, L3485: 1, H0261: 1, H0392: 1, H0013: 1, H0250: 1, H0590: 1, H0196: 1, |
| | | | | | H0545: 1, H0046: 1, H0123: 1, H0620: 1, S0051: 1, S0250: 1, H0617: 1, S0036: 1, H0135: 1, H0634: 1, H0087: 1, |
| | | | | | H0269: 1, H0561: 1, H0509: 1, H0646: 1, S0426: 1, L0763: 1, L0769: 1, L3904: 1, L0662: 1, L0363: 1, L0767: 1, |
| | | | | | L0768: 1, L0650: 1, L0375: 1, L0806: 1, L0776: 1, L0657: 1, L0787: 1, L4559: 1, L0664: 1, L2260: 1, H0520: 1, |
| | | | | | L3831: 1, H0670: 1, H0518: 1, L3834: 1, H0704: 1, H0436: 1, L0747: 1, L0780: 1, L0608: 1, L0595: 1 and H0423: 1. |
| 44 | HCNCO11 | 775086 | 54 | 101-145 | AR055: 2, AR060: 2, AR277: 1, AR282: 1, |
| | | | | | H0597: 1 |
| 45 | HCNSD29 | 862314 | 55 | 1145-1240 | AR252: 128, AR253: 67, AR245: 63, AR272: 55, AR308: 49, AR246: 47, AR263: 46, AR212: 40, AR053: 37, |
| | | | | | AR243: 35, AR312: 34, AR254: 33, AR275: 33, AR205: 33, AR309: 32, AR264: 31, AR250: 31, AR197: 31, |
| | | | | | AR271: 29, AR224: 26, AR195: 26, AR311: 26, AR200: 26, AR223: 26, AR201: 25, AR198: 25, AR219: 23, |
| | | | | | AR274: 22, AR210: 22, AR172: 21, AR218: 21, AR222: 21, AR225: 20, AR221: 20, AR268: 19, AR104: 19, |
| | | | | | AR096: 18, AR240: 17, AR188: 17, AR313: 17, AR199: 17, AR213: 17, AR203: 16, AR242: 16, AR039: 15, |
| | | | | | AR316: 15, AR170: 15, AR193: 15, AR180: 15, AR165: 14, AR269: 14, AR192: 14, AR204: 14, AR164: 14, |
| | | | | | AR166: 14, AR211: 13, AR033: 13, AR168: 13, AR270: 13, AR207: 12, AR175: 12, AR290: 12, AR169: 12, |
| | | | | | AR089: 12, AR183: 12, AR247: 12, AR176: 11, AR171: 11, AR267: 11, AR178: 11, AR162: 11, AR161: 11, |
| | | | | | AR217: 11, AR163: 10, AR174: 10, AR229: 10, AR291: 10, AR173: 10, AR189: 9, AR214: 9, AR266: 9, AR255: 9, |
| | | | | | AR181: 8, AR196: 8, AR177: 8, AR297: 8, AR289: 8, AR299: 8, AR179: 8, AR190: 8, AR191: 8, AR300: 8, |
| | | | | | AR060: 8, AR182: 8, AR238: 7, AR216: 7, AR215: 7, AR257: 7, AR261: 7, AR262: 7, AR282: 7, AR296: 7, |
| | | | | | AR185: 7, AR293: 7, AR235: 6, AR295: 6, AR283: 6, AR231: 6, AR055: 6, AR288: 6, AR285: 6, AR287: 6, |
| | | | | | AR234: 6, AR258: 6, AR237: 5, AR239: 5, AR236: 5, AR256: 5, AR277: 5, AR286: 5, AR228: 5, AR230: 4, |
| | | | | | AR294: 4, AR226: 4, AR233: 4, AR260: 4, AR232: 4, AR061: 3, AR227: 3, |
| | | | | | L0648: 2, L0768: 2, L0766: 2, L0748: 2, L0588: 2, H0125: 1, S0468: 1, H0497: 1, H0486: 1, H0744: 1, H0231: 1, |
| | | | | | H0266: 1, H0202: 1, H0641: 1, S0422: 1, L0638: 1, L0644: 1, L5572: 1, L0662: 1, L0650: 1, L0807: 1, L0657: 1, |
| | | | | | L0663: 1, L0665: 1, H0519: 1, L0759: 1, S0026: 1 and L0718: 1. |
| 46 | HCQBH72 | 637548 | 56 | 31-174 | AR055: 2, AR060: 2, AR299: 2, AR089: 2, AR219: 1, AR185: 1, AR039: 1, AR283: 1, AR104: 1, |
| | | | | | L0520: 4, L0754: 2, H0263: 1, H0272: 1 and H0555: 1. |
| 47 | HCQCC96 | 845066 | 57 | 782-919 | AR252: 46, AR197: 44, AR204: 38, AR195: 35, AR253: 34, AR178: 31, AR230: 31, AR254: 31, AR233: 29, |
| | | | | | AR250: 28, AR180: 28, AR198: 28, AR266: 26, AR243: 26, AR193: 24, AR239: 23, AR061: 23, AR267: 23, |
| | | | | | AR201: 23, AR227: 22, AR229: 22, AR228: 22, AR237: 21, AR162: 21, AR181: 21, AR163: 21, AR170: 21, |
| | | | | | AR161: 20, AR257: 20, AR192: 20, AR226: 20, AR176: 19, AR234: 19, AR171: 18, AR183: 18, AR245: 18, |
| | | | | | AR271: 18, AR182: 17, AR258: 17, AR270: 17, AR179: 17, AR275: 17, AR238: 16, AR231: 16, AR296: 16, |
| | | | | | AR261: 16, AR033: 16, AR174: 15, AR185: 15, AR255: 15, AR164: 15, AR262: 15, AR207: 15, AR053: 15, |
| | | | | | AR165: 15, AR272: 14, AR256: 14, AR039: 14, AR269: 14, AR242: 14, AR166: 14, AR205: 14, AR175: 14, |
| | | | | | AR246: 14, AR300: 13, AR203: 13, AR289: 12, AR236: 12, AR104: 12, AR316: 11, AR232: 11, AR293: 11, |
| | | | | | AR055: 11, AR287: 11, AR169: 11, AR260: 11, AR235: 11, AR168: 11, AR089: 11, AR173: 10, AR308: 10, |
| | | | | | AR286: 10, AR268: 10, AR291: 10, AR060: 10, AR297: 10, AR313: 10, AR288: 10, AR212: 10, AR213: 10, |
| | | | | | AR299: 10, AR177: 10, AR188: 9, AR096: 9, AR190: 9, AR191: 9, AR294: 9, AR282: 9, AR285: 9, AR283: 9, |
| | | | | | AR172: 8, AR277: 8, AR189: 8, AR247: 8, AR309: 8, AR312: 8, AR274: 8, AR240: 7, AR218: 7, AR264: 7, |
| | | | | | AR210: 6, AR200: 6, AR295: 6, AR290: 6, AR219: 6, AR215: 6, AR199: 5, AR263: 5, AR196: 5, AR223: 5, |
| | | | | | AR311: 5, AR216: 5, AR214: 4, AR224: 4, AR225: 4, AR211: 4, AR217: 4, AR221: 2, AR222: 2, |
| | | | | | S0360: 5, L0748: 5, L0766: 3, H0657: 2, L3388: 2, H0581: 2, H0596: 2, H0563: 2, S0003: 2, H0328: 2, H0670: 2, |
| | | | | | L0756: 2, S0436: 2, S0026: 2, H0170: 1, H0556: 1, H0344: 1, H0650: 1, H0656: 1, H0638: 1, S0420: 1, H0675: 1, |
| | | | | | S0007: 1, H0574: 1, H0632: 1, H0013: 1, H0036: 1, S0010: 1, H0318: 1, H0052: 1, H0251: 1, H0150: 1, H0050: 1, |
| | | | | | H0090: 1, H0038: 1, S0440: 1, H0130: 1, S0142: 1, S0422: 1, H0529: 1, L0803: 1, L0659: 1, L5623: 1, L0666: 1, |
| | | | | | S0428: 1, S0126: 1, H0689: 1, H0648: 1, H0672: 1, S0330: 1, H0539: 1, S0378: 1, H0521: 1, H0522: 1, H0478: 1, |
| | | | | | L0744: 1, L0754: 1, L0779: 1, L0752: 1, S0260: 1, H0445: 1, H0343: 1, H0595: 1, S0434: 1, H0423: 1 and S0424: 1. |
| 48 | HCUCF89 | 637986 | 58 | 189-278 | AR313: 26, AR039: 18, AR277: 13, AR299: 12, AR096: 11, AR089: 11, AR185: 11, AR300: 10, AR240: 8, |
| | | | | | AR316: 8, AR218: 5, AR282: 4, AR104: 4, AR060: 4, AR219: 3, AR055: 2, |
| | | | | | H0306: 1, L0761: 1 and H0436: 1. |
| 49 | HCUCK44 | 790277 | 59 | 598-780 | AR172: 3, AR245: 3, AR252: 3, AR161: 3, AR164: 3, AR166: 3, AR221: 2, AR162: 2, AR163: 2, AR169: 2, |
| | | | | | AR311: 2, AR261: 2, AR165: 2, AR214: 2, AR224: 2, AR296: 2, AR264: 1, AR195: 1, AR277: 1, AR212: 1, |
| | | | | | AR217: 1, AR096: 1, AR193: 1, AR295: 1, AR287: 1, AR216: 1, AR213: 1, AR257: 1, AR275: 1, AR089: 1, |
| | | | | | AR201: 1, AR282: 1, |
| | | | | | L3450: 19, H0271: 18, S0002: 12, L0794: 12, S0144: 8, L3783: 8, L3807: 8, H0250: 7, L0777: 7, L3119: 6, L3729: 6, |
| | | | | | L0665: 6, H0518: 6, S0132: 5, H0264: 5, S0426: 5, S0328: 5, S0330: 5, L0758: 5, S0444: 4, S0344: 4, L0770: 4, |
| | | | | | L0776: 4, L0659: 4, S0052: 4, S0053: 4, L0743: 4, L0747: 4, S0436: 4, L0065: 3, L0769: 3, L0766: 3, L0774: 3, |
| | | | | | L0657: 3, H0521: 3, L0748: 3, L0749: 3, L0731: 3, L2999: 2, H0306: 2, H0402: 2, H0638: 2, S0360: 2, S0408: 2, |
| | | | | | S0476: 2, H0393: 2, S0278: 2, L3516: 2, H0050: 2, H0014: 2, H0416: 2, H0617: 2, H0634: 2, H0494: 2, S0440: 2, |
| | | | | | L0800: 2, L0771: 2, L0648: 2, L0549: 2, L0806: 2, L0805: 2, L0666: 2, S0428: 2, S0216: 2, L3210: 2, S0404: 2, |
| | | | | | L0439: 2, L0740: 2, L0750: 2, L0752: 2, L0596: 2, L0599: 2, T0002: 1, H0159: 1, H0650: 1, H0657: 1, L0785: 1, |
| | | | | | H0662: 1, L3659: 1, S0442: 1, S0358: 1, S0410: 1, L3646: 1, H0741: 1, L3117: 1, H0619: 1, L2791: 1, H0613: 1, |
| | | | | | H0600: 1, H0592: 1, H0486: 1, L2504: 1, L3750: 1, H0069: 1, H0581: 1, H0596: 1, H0044: 1, H0009: 1, H0024: 1, |
| | | | | | H0057: 1, S0051: 1, H0355: 1, H0615: 1, L0483: 1, S0036: 1, H0090: 1, H0038: 1, H0087: 1, H0413: 1, H0100: 1, |
| | | | | | S0448: 1, S0142: 1, S0210: 1, H0529: 1, L3904: 1, L0761: 1, L0772: 1, L0372: 1, L0646: 1, L0645: 1, L0764: 1, |
| | | | | | L0773: 1, L0662: 1, L0768: 1, L0387: 1, L0649: 1, L0551: 1, L0550: 1, L0803: 1, L0775: 1, L0653: 1, L0655: 1, |
| | | | | | L0656: 1, L0782: 1, L0787: 1, L4537: 1, L2257: 1, S0374: 1, H0690: 1, H0659: 1, H0658: 1, S0378: 1, H0710: 1, |
| | | | | | S0152: 1, H0696: 1, H0704: 1, S0406: 1, H0436: 1, L0744: 1, L0756: 1, L0779: 1, L0780: 1, L0755: 1, L0759: 1, |
| | | | | | S0031: 1, L0581: 1, L0601: 1, L0603: 1, S0196: 1, L3632: 1 and H0352: 1. |
| 50 | HCUDD64 | 835082 | 60 | 256-402 | AR282: 3, AR219: 3, |
| | | | | | H0052: 3, S3012: 2, L0754: 2, H0402: 1, H0413: 1, S0374: 1, L0438: 1, L0748: 1 and L0740: 1. |
| 51 | HCWAE64 | 535893 | 61 | 410-427 | AR277: 7, AR282: 1, |
| | | | | | H0305: 1 |
| 52 | HDPDI72 | 897277 | 62 | 23-385 | AR263: 7, AR039: 6, AR089: 5, AR184: 5, AR096: 4, AR313: 4, AR299: 4, AR282: 3, AR277: 3, AR240: 3, |
| | | | | | AR060: 3, AR218: 3, AR249: 3, AR316: 3, AR185: 2, AR055: 2, AR274: 2, AR104: 2, AR267: 2, AR247: 2, |
| | | | | | AR300: 2, AR206: 1, AR283: 1, AR052: 1, AR312: 1, AR275: 1, AR183: 1, AR270: 1, AR309: 1, AR238: 1, |
| | | | | | H0521: 2 and H0580: 1. |
| 53 | HDPGE24 | 801947 | 63 | 173-394 | H0555: 8, S0002: 7, L0748: 6, H0556: 5, H0179: 5, L0369: 5, S0222: 4, S0474: 4, S0045: 3, H0427: 3, H0599: 3, |
| | | | | | H0575: 3, H0271: 3, H0628: 3, H0598: 3, S0426: 3, L0766: 3, L0581: 3, H0265: 2, S0114: 2, S0212: 2, H0402: 2, |
| | | | | | S0442: 2, S0354: 2, S0132: 2, H0431: 2, H0370: 2, H0632: 2, H0581: 2, H0196: 2, H0050: 2, H0124: 2, L0665: 2, |
| | | | | | H0521: 2, S0390: 2, S0028: 2, L0777: 2, H0444: 2, S0436: 2, H0423: 2, L3643: 1, S0040: 1, L0002: 1, H0381: 1, |
| | | | | | S0116: 1, H0255: 1, H0662: 1, S0360: 1, H0676: 1, H0580: 1, H0729: 1, H0722: 1, H0728: 1, S0046: 1, H0749: 1, |
| | | | | | S0300: 1, L0717: 1, L3388: 1, H0586: 1, H0333: 1, H0486: 1, H0706: 1, H0036: 1, T0048: 1, H0318: 1, H0251: 1, |
| | | | | | H0309: 1, H0121: 1, H0544: 1, S0050: 1, H0375: 1, H0266: 1, S0003: 1, S0214: 1, H0252: 1, H0031: 1, H0644: 1, |
| | | | | | H0708: 1, H0400: 1, H0063: 1, H0264: 1, S0038: 1, H0280: 1, H0334: 1, H0625: 1, S0440: 1, H0509: 1, H0132: 1, |
| | | | | | S0210: 1, L0803: 1, L0525: 1, L0555: 1, L0529: 1, L0367: 1, L0532: 1, S0052: 1, S0428: 1, S0216: 1, H0547: 1, |
| | | | | | H0519: 1, S0126: 1, H0134: 1, S0406: 1, H0727: 1, H0345: 1, S0037: 1, L0740: 1, L0749: 1, S0031: 1, H0445: 1, |
| | | | | | H0707: 1, L0605: 1, L0604: 1, L0601: 1 and H0543: 1. |
| 54 | HDPIU94 | 813352 | 64 | 208-279 | AR055: 17, AR277: 13, AR060: 12, AR316: 9, AR219: 8, AR240: 8, AR089: 8, AR300: 8, AR218: 8, AR039: 7, |
| | | | | | AR283: 7, AR096: 6, AR282: 5, AR104: 5, AR185: 4, AR299: 4, AR313: 2, |
| | | | | | L0748: 6, L0666: 5, L0665: 5, L0768: 4, L0777: 4, L0595: 4, H0352: 4, S0045: 3, H0124: 3, L0774: 3, S0028: 3, |
| | | | | | L0439: 3, L0756: 3, L0592: 3, S0376: 2, S0360: 2, H0619: 2, S0222: 2, L3816: 2, H0635: 2, H0036: 2, H0052: 2, |
| | | | | | H0046: 2, L0041: 2, S0312: 2, H0551: 2, L3815: 2, L0764: 2, L0663: 2, H0144: 2, L3825: 2, L0751: 2, L0754: 2, |
| | | | | | L0745: 2, L0731: 2, L0589: 2, H0653: 2, H0136: 2, H0216: 2, H0624: 1, S6024: 1, S0430: 1, H0656: 1, H0255: 1, |
| | | | | | S0046: 1, H0747: 1, H0645: 1, L2759: 1, H0013: 1, H0156: 1, H0575: 1, H0050: 1, S0050: 1, H0373: 1, H0687: 1, |
| | | | | | S0314: 1, S0250: 1, H0031: 1, H0135: 1, H0634: 1, H0616: 1, H0380: 1, H0264: 1, H0433: 1, H0059: 1, L0351: 1, |
| | | | | | S0422: 1, L0800: 1, L0662: 1, L0626: 1, L0766: 1, L0803: 1, L0375: 1, L0655: 1, L0659: 1, L0783: 1, L0809: 1, |
| | | | | | L0664: 1, L2263: 1, L2258: 1, L2259: 1, H0726: 1, L3826: 1, L3827: 1, H0648: 1, S0152: 1, L3833: 1, H0521: 1, |
| | | | | | S0390: 1, S3014: 1, S0027: 1, L0749: 1, L0750: 1, L0780: 1, L0758: 1, L0759: 1, S0260: 1 and L0366: 1. |
| 55 | HDPIY31 | 886159 | 65 | 268-375 | AR214: 26, AR263: 25, AR224: 21, AR222: 20, AR264: 20, AR223: 19, AR169: 18, AR221: 18, AR217: 18, |
| | | | | | AR171: 17, AR172: 17, AR195: 17, AR207: 16, AR170: 16, AR311: 16, AR235: 16, AR215: 16, AR225: 16, |
| | | | | | AR168: 15, AR216: 15, AR165: 14, AR197: 14, AR164: 14, AR162: 14, AR308: 13, AR089: 13, AR161: 13, |
| | | | | | AR166: 13, AR212: 13, AR192: 13, AR193: 13, AR163: 13, AR213: 12, AR033: 12, AR309: 12, AR242: 12, |
| | | | | | AR053: 11, AR245: 11, AR312: 11, AR210: 10, AR282: 10, AR253: 10, AR261: 10, AR254: 10, AR277: 10, |
| | | | | | AR198: 10, AR104: 10, AR295: 10, AR288: 9, AR240: 9, AR316: 9, AR299: 9, AR219: 9, AR196: 9, AR205: 9, |
| | | | | | AR271: 9, AR252: 9, AR285: 9, AR250: 9, AR297: 9, AR272: 8, AR060: 8, AR096: 8, AR177: 8, AR269: 8, |
| | | | | | AR274: 8, AR246: 8, AR313: 8, AR236: 8, AR211: 8, AR185: 8, AR286: 8, AR039: 7, AR291: 7, AR287: 7, |
| | | | | | AR275: 7, AR200: 7, AR300: 7, AR055: 7, AR229: 7, AR181: 7, AR283: 7, AR189: 7, AR218: 7, AR175: 7, |
| | | | | | AR174: 7, AR247: 7, AR238: 7, AR199: 6, AR289: 6, AR188: 6, AR293: 6, AR243: 6, AR191: 6, AR173: 6, |
| | | | | | AR266: 6, AR262: 6, AR204: 6, AR270: 6, AR226: 6, AR258: 6, AR201: 6, AR176: 6, AR268: 5, AR296: 5, |
| | | | | | AR257: 5, AR183: 5, AR182: 5, AR234: 5, AR231: 5, AR180: 5, AR255: 5, AR230: 5, AR178: 5, AR256: 5, |
| | | | | | AR290: 5, AR190: 5, AR239: 5, AR232: 5, AR260: 4, AR227: 4, AR203: 4, AR294: 4, AR267: 4, AR061: 4, |
| | | | | | AR179: 4, AR237: 4, AR233: 3, AR228: 3, |
| | | | | | L0439: 56, L0438: 20, H0556: 7, H0052: 7, L0776: 5, S0222: 4, H0438: 4, S0418: 3, S0278: 3, L0770: 3, L0771: 3, |
| | | | | | L0743: 3, L0366: 3, H0265: 2, S0040: 2, L0415: 2, S0045: 2, H0619: 2, H0492: 2, H0486: 2, H0581: 2, H0620: 2, |
| | | | | | H0266: 2, H0604: 2, H0031: 2, H0100: 2, L0351: 2, H0144: 2, L0352: 2, H0672: 2, H0521: 2, L0756: 2, L0777: 2, |
| | | | | | L0731: 2, H0624: 1, H0140: 1, H0583: 1, H0255: 1, H0402: 1, H0305: 1, H0458: 1, S0420: 1, S0354: 1, S0358: 1, |
| | | | | | H0645: 1, S6022: 1, H0392: 1, H0643: 1, H0559: 1, H0013: 1, H0069: 1, H0156: 1, H0590: 1, S0346: 1, H0085: 1, |
| | | | | | H0544: 1, H0545: 1, H0439: 1, H0150: 1, H0041: 1, S0388: 1, S0051: 1, T0010: 1, H0271: 1, H0416: 1, H0188: 1, |
| | | | | | H0288: 1, S0022: 1, T0006: 1, H0213: 1, H0628: 1, H0617: 1, H0135: 1, H0087: 1, H0551: 1, H0477: 1, H0059: 1, |
| | | | | | S0038: 1, L0435: 1, T0042: 1, H0494: 1, S0344: 1, S0426: 1, L0640: 1, L0769: 1, L0638: 1, L0761: 1, L0642: 1, |
| | | | | | L0764: 1, L0768: 1, L0794: 1, L0803: 1, L0375: 1, L0806: 1, L0805: 1, L0655: 1, L0659: 1, L0809: 1, L0789: 1, |
| | | | | | L0665: 1, H0519: 1, S0126: 1, H0690: 1, H0682: 1, S0330: 1, H0539: 1, H0522: 1, S0037: 1, L0751: 1, L0754: 1, |
| | | | | | L0746: 1, L0749: 1, L0786: 1, L0779: 1, H0445: 1, L0596: 1, H0542: 1 and H0543: 1. |
| 56 | HDPOC24 | 777493 | 66 | 418-819 | H0585: 26, H0141: 12, L0666: 9, L0754: 9, L0755: 9, S0212: 6, L0663: 5, L0743: 5, S0356: 4, H0587: 4, H0553: 4, |
| | | | | | L0657: 4, L0382: 4, L0740: 4, L0747: 4, S0045: 3, S0046: 3, H0024: 3, L0771: 3, L0648: 3, L0662: 3, L0659: 3, |
| | | | | | L0664: 3, S0126: 3, H0522: 3, L0748: 3, L0777: 3, L0757: 3, S0192: 3, S0040: 2, S0420: 2, S0442: 2, S0358: 2, |
| | | | | | S0476: 2, H0550: 2, H0497: 2, H0250: 2, H0575: 2, H0052: 2, H0546: 2, H0266: 2, H0100: 2, H0646: 2, S0002: 2, |
| | | | | | L0763: 2, L0649: 2, L0803: 2, L0775: 2, L0653: 2, L0517: 2, L0809: 2, L0790: 2, L0665: 2, H0660: 2, S0380: 2, |
| | | | | | H0521: 2, S3014: 2, S0028: 2, L0751: 2, S0436: 2, H0665: 2, S0430: 1, H0341: 1, S0282: 1, H0664: 1, S0418: 1, |
| | | | | | S0354: 1, S0444: 1, H0549: 1, S0222: 1, H0600: 1, H0333: 1, H0618: 1, H0253: 1, S0474: 1, H0581: 1, H0235: 1, |
| | | | | | H0597: 1, H0545: 1, H0009: 1, H0081: 1, H0620: 1, H0023: 1, H0687: 1, S0250: 1, L0483: 1, T0006: 1, L0055: 1, |
| | | | | | H0087: 1, H0551: 1, H0379: 1, H0264: 1, H0494: 1, H0625: 1, S0352: 1, H0641: 1, H0529: 1, L0371: 1, L0769: 1, |
| | | | | | L5575: 1, L3905: 1, L5566: 1, L0772: 1, L0800: 1, L0764: 1, L0773: 1, L0794: 1, L0386: 1, L0378: 1, L0806: 1, |
| | | | | | L0807: 1, L0792: 1, L0565: 1, S0310: 1, H0519: 1, H0682: 1, H0684: 1, H0670: 1, H0672: 1, S0328: 1, S0330: 1, |
| | | | | | S0332: 1, H0478: 1, S0432: 1, S3012: 1, S0390: 1, S0206: 1, L0742: 1, L0756: 1, L0779: 1, H0707: 1, S0434: 1, |
| | | | | | L0596: 1, H0668: 1, S0242: 1, H0506: 1 and H0008: 1. |
| 57 | HDPOL37 | 745377 | 67 | 189-377 | AR283: 17, AR089: 16, AR316: 16, AR096: 16, AR277: 15, AR039: 15, AR104: 14, AR313: 12, AR060: 11, |
| | | | | | AR219: 10, AR282: 9, AR240: 9, AR299: 8, AR055: 8, AR185: 8, AR218: 7, AR244: 5, AR265: 4, AR300: 4, |
| | | | | | AR310: 2, AR295: 2, AR271: 2, AR298: 1, AR175: 1, AR266: 1, AR291: 1, AR286: 1, AR296: 1, AR309: 1, |
| | | | | | AR312: 1, AR294: 1, |
| | | | | | H0618: 2, H0040: 1 and H0522: 1. |
| 58 | HDPOO76 | 838594 | 68 | 109-159 | AR218: 924, AR096: 917, AR219: 813, AR316: 779, AR240: 765, AR089: 547, AR313: 512, AR039: 433, |
| | | | | | AR299: 400, AR104: 348, AR300: 336, AR185: 267, AR060: 243, AR282: 172, AR055: 155, AR277: 94, AR283: 93, |
| | | | | | S0474: 29, L0766: 11, H0521: 10, L0803: 7, L0748: 6, L0717: 5, L0759: 5, S0003: 4, L3832: 4, H0663: 3, H0156: 3, |
| | | | | | L0598: 3, L0770: 3, L0771: 3, L0804: 3, L2439: 3, H0522: 3, L0731: 3, S0436: 3, H0486: 2, S0426: 2, L0805: 2, |
| | | | | | L0659: 2, L2260: 2, S0126: 2, S0406: 2, L0749: 2, L0755: 2, L0757: 2, L0758: 2, L0590: 2, S0026: 2, H0716: 1, |
| | | | | | H0341: 1, S0212: 1, L0481: 1, S0444: 1, S0360: 1, L3649: 1, H0637: 1, H0580: 1, H0734: 1, H0749: 1, L3092: 1, |
| | | | | | H0619: 1, L3388: 1, H0586: 1, H0574: 1, H0427: 1, L0021: 1, H0575: 1, H0318: 1, H0545: 1, H0024: 1, H0373: 1, |
| | | | | | H0071: 1, H0179: 1, S0214: 1, H0428: 1, H0674: 1, H0591: 1, H0616: 1, H0488: 1, H0494: 1, S0438: 1, S0440: 1, |
| | | | | | H0647: 1, S0142: 1, UNKWN: 1, L0369: 1, L0763: 1, L0769: 1, L0646: 1, L0648: 1, L0662: 1, L0650: 1, L0775: 1, |
| | | | | | L0653: 1, L0776: 1, L0656: 1, L0782: 1, L0809: 1, L0519: 1, S0052: 1, L2657: 1, H0144: 1, L3823: 1, H0520: 1, |
| | | | | | H0547: 1, H0660: 1, S0380: 1, L0742: 1, L0439: 1, L0750: 1, L0777: 1, S0031: 1, H0445: 1, S0434: 1, H0665: 1, |
| | | | | | H0667: 1, S0194: 1, S0276: 1 and S0458: 1. |
| 59 | HDPPQ30 | 684292 | 69 | 220-336 | H0542: 4, S0250: 3, H0521: 3, H0522: 3, H0485: 2, H0486: 1, H0494: 1 and H0543: 1. |
| 60 | HDQHM36 | 852328 | 70 | 129-275 | AR313: 50, AR039: 48, AR277: 28, AR089: 26, AR096: 26, AR300: 25, AR185: 23, AR299: 22, AR240: 17, |
| | | | | | AR316: 17, AR104: 15, AR219: 12, AR282: 12, AR218: 12, AR060: 10, AR055: 6, AR283: 5, |
| | | | | | H0521: 2 |
| 61 | HE2CM39 | 553651 | 71 | 10-51 | AR277: 46, AR283: 32, AR219: 30, AR313: 29, AR218: 25, AR316: 25, AR089: 24, AR299: 23, AR104: 23, |
| | | | | | AR282: 23, AR055: 21, AR300: 20, AR185: 18, AR039: 18, AR096: 17, AR240: 17, AR060: 13, |
| | | | | | L0759: 4, L0657: 3, L0789: 3, L0439: 3, L0752: 3, L0758: 3, S0360: 2, L0805: 2, L0438: 2, L0750: 2, L0777: 2, |
| | | | | | H0423: 2, H0171: 1, H0638: 1, H0351: 1, H0178: 1, H0606: 1, L0625: 1, L0769: 1, L0771: 1, L0662: 1, L0794: 1, |
| | | | | | L0803: 1, L0804: 1, L0650: 1, L0774: 1, L0659: 1, L0809: 1, L0663: 1, H0436: 1, L0748: 1, L0740: 1, H0445: 1, |
| | | | | | L0604: 1 and H0422: 1. |
| 62 | HE2PO93 | 771655 | 72 | 770-898 | AR219: 19, AR218: 19, AR313: 13, AR299: 13, AR185: 13, AR089: 11, AR055: 10, AR316: 10, AR060: 10, |
| | | | | | AR300: 9, AR096: 8, AR104: 7, AR039: 7, AR240: 6, AR282: 6, AR283: 5, AR277: 3, |
| | | | | | L0803: 5, L0731: 5, S0422: 4, L2903: 3, S0408: 2, H0040: 2, L0766: 2, L0666: 2, L2657: 2, H0144: 2, H0648: 2, |
| | | | | | L0748: 2, L0439: 2, L0754: 2, L0779: 2, H0170: 1, H0171: 1, S0114: 1, H0657: 1, L2285: 1, S0354: 1, S0360: 1, |
| | | | | | H0580: 1, H0742: 1, H0741: 1, H0749: 1, L2777: 1, L0717: 1, H0411: 1, H0431: 1, H0586: 1, H0052: 1, H0596: 1, |
| | | | | | H0014: 1, S0388: 1, S0051: 1, S0003: 1, H0591: 1, T0042: 1, H0625: 1, H0509: 1, L0598: 1, H0026: 1, L0763: 1, |
| | | | | | L0639: 1, L0372: 1, L0646: 1, L0641: 1, L0768: 1, L0649: 1, L0651: 1, L0805: 1, L0776: 1, L0635: 1, L0664: 1, |
| | | | | | L0665: 1, L2264: 1, L2262: 1, S0374: 1, L0438: 1, L0352: 1, H0672: 1, S0380: 1, H0696: 1, H0134: 1, S0406: 1, |
| | | | | | H0478: 1, L0758: 1, L0759: 1, S0436: 1, S0011: 1 and S0424: 1. |
| 63 | HE6FU11 | 827236 | 73 | 145-825 | AR089: 8, AR104: 6, AR039: 6, AR096: 5, AR060: 5, AR313: 5, AR185: 5, AR055: 4, AR284: 4, AR266: 4, |
| | | | | | AR316: 4, AR282: 4, AR292: 4, AR299: 4, AR202: 4, AR218: 3, AR289: 3, AR283: 3, AR298: 3, AR277: 3, |
| | | | | | AR182: 3, AR184: 3, AR280: 3, AR250: 3, AR219: 3, AR315: 3, AR281: 3, AR300: 3, AR169: 3, AR294: 3, |
| | | | | | AR240: 3, AR291: 3, AR268: 2, AR172: 2, AR033: 2, AR270: 2, AR248: 2, AR310: 2, AR175: 2, AR238: 2, |
| | | | | | AR241: 2, AR265: 2, AR232: 2, AR285: 2, AR183: 2, AR177: 2, AR227: 2, AR269: 2, AR263: 2, AR290: 2, |
| | | | | | AR288: 2, AR293: 2, AR229: 2, AR267: 2, AR061: 2, AR176: 2, AR257: 2, AR271: 2, AR296: 2, AR286: 2, |
| | | | | | AR272: 2, AR259: 1, AR206: 1, AR256: 1, AR214: 1, AR231: 1, AR247: 1, AR295: 1, AR204: 1, AR237: 1, |
| | | | | | AR226: 1, AR234: 1, AR308: 1, AR253: 1, AR053: 1, AR311: 1, AR205: 1, AR243: 1, AR233: 1, AR173: 1, |
| | | | | | AR312: 1, AR251: 1, AR314: 1, |
| | | | | | L0759: 2, H0706: 1, H0123: 1, H0024: 1, H0100: 1, L0794: 1 and L0789: 1. |
| 64 | HE6FV29 | 588454 | 74 | 210-311 | AR219: 37, AR218: 36, AR315: 34, AR280: 34, AR271: 33, AR244: 29, AR089: 29, AR314: 29, AR243: 28, |
| | | | | | AR281: 26, AR282: 25, AR273: 25, AR205: 24, AR192: 22, AR206: 22, AR198: 19, AR247: 19, AR316: 19, |
| | | | | | AR039: 19, AR231: 18, AR269: 17, AR246: 17, AR204: 16, AR234: 16, AR299: 16, AR313: 15, AR194: 15, |
| | | | | | AR055: 14, AR186: 14, AR237: 14, AR060: 14, AR241: 13, AR270: 13, AR293: 12, AR240: 12, AR232: 11, |
| | | | | | AR238: 11, AR251: 10, AR300: 10, AR061: 10, AR233: 10, AR227: 10, AR291: 9, AR185: 9, AR202: 9, AR266: 9, |
| | | | | | AR226: 9, AR229: 9, AR184: 8, AR179: 8, AR182: 8, AR175: 8, AR312: 8, AR268: 8, AR289: 7, AR284: 7, |
| | | | | | AR249: 7, AR183: 7, AR310: 7, AR267: 7, AR052: 7, AR033: 7, AR296: 7, AR290: 7, AR265: 7, AR177: 7, |
| | | | | | AR309: 7, AR292: 6, AR298: 6, AR275: 6, AR277: 6, AR285: 6, AR294: 5, AR248: 5, AR053: 5, AR253: 5, |
| | | | | | AR295: 5, AR286: 5, AR259: 5, AR274: 4, AR258: 4, AR213: 4, AR096: 4, AR256: 4, AR104: 4, AR283: 3, AR263: 2, |
| | | | | | S0440: 32, S0476: 22, H0494: 20, L0754: 17, S0372: 16, S0132: 13, L0666: 13, S0330: 13, H0046: 12, H0586: 11, |
| | | | | | H0587: 11, S0328: 11, S0360: 10, S0436: 9, S0356: 8, H0622: 8, S0003: 7, L0806: 7, H0648: 7, L0747: 7, L0752: 7, |
| | | | | | H0674: 6, L0777: 6, L0362: 6, L0662: 5, L0659: 5, L0601: 5, S0430: 4, S0358: 4, S0408: 4, H0592: 4, S0214: 4, |
| | | | | | H0039: 4, H0031: 4, H0551: 4, H0264: 4, H0560: 4, L0763: 4, L0653: 4, L5623: 4, L0663: 4, S0376: 3, S0444: 3, |
| | | | | | S0410: 3, H0370: 3, H0600: 3, H0644: 3, L0646: 3, L0649: 3, L0776: 3, L0783: 3, L0809: 3, L0665: 3, H0696: 3, |
| | | | | | S0406: 3, S3014: 3, L0755: 3, S0434: 3, L0591: 3, H0170: 2, S0134: 2, H0662: 2, S0442: 2, H0393: 2, H0596: 2, |
| | | | | | H0597: 2, H0688: 2, H0553: 2, H0032: 2, H0169: 2, H0598: 2, H0090: 2, H0379: 2, H0380: 2, L0770: 2, L0372: 2, |
| | | | | | L0549: 2, L0376: 2, L0517: 2, L0518: 2, L5622: 2, H0658: 2, H0670: 2, S0380: 2, S0152: 2, S0350: 2, S0027: 2, |
| | | | | | L0744: 2, L0779: 2, L0759: 2, L0599: 2, S0196: 2, S0456: 2, H0171: 1, H0556: 1, T0002: 1, H0713: 1, H0483: 1, |
| | | | | | H0663: 1, L0005: 1, S0354: 1, T0008: 1, H0742: 1, H0741: 1, H0411: 1, H0549: 1, T0039: 1, H0013: 1, L0021: 1, |
| | | | | | H0349: 1, S0010: 1, H0204: 1, L0738: 1, H0545: 1, H0014: 1, H0015: 1, H0373: 1, H0355: 1, H0510: 1, H0615: 1, |
| | | | | | L0483: 1, L0142: 1, L0143: 1, H0166: 1, H0673: 1, H0708: 1, H0591: 1, H0038: 1, H0040: 1, H0634: 1, T0067: 1, |
| | | | | | H0272: 1, H0487: 1, H0412: 1, H0623: 1, H0059: 1, H0100: 1, S0352: 1, S0382: 1, S0448: 1, S0306: 1, S0438: 1, |
| | | | | | S0472: 1, H0646: 1, L0503: 1, L0640: 1, L0637: 1, L0761: 1, L0772: 1, L0764: 1, L0771: 1, L0648: 1, L0794: 1, |
| | | | | | L5564: 1, L0551: 1, L0805: 1, L0382: 1, L0519: 1, L0789: 1, L0532: 1, L0664: 1, H0144: 1, H0520: 1, H0547: 1, |
| | | | | | S0126: 1, H0689: 1, H0711: 1, H0435: 1, H0659: 1, H0666: 1, S0378: 1, H0704: 1, S0044: 1, H0555: 1, S0392: 1, |
| | | | | | S0322: 1, L0748: 1, L0740: 1, L0745: 1, L0749: 1, L0756: 1, L0757: 1 and S0242: 1. |
| 65 | HE9EA10 | 827796 | 75 | 212-448 | L0794: 12, H0620: 3, L0756: 2, L0759: 2, S0408: 1, S0049: 1, H0544: 1, H0012: 1, H0615: 1, H0040: 1, L0764: 1, |
| | | | | | L0803: 1, L0806: 1, L0789: 1, H0144: 1, H0547: 1, L0779: 1, L0597: 1 and L0595: 1. |
| 66 | HEBCY54 | 600355 | 76 | 172-528 | AR104: 9, AR277: 6, AR283: 5, AR055: 4, AR096: 4, AR060: 4, AR240: 4, AR282: 2, AR316: 2, AR185: 2, |
| | | | | | AR300: 2, AR299: 2, AR089: 2, AR039: 2, AR313: 1, AR218: 1, |
| | | | | | L0438: 3, L0748: 3, T0010: 2, L0351: 2, L0769: 2, H0521: 2, L0439: 2, L0747: 2, S0116: 1, S0354: 1, S0007: 1, |
| | | | | | H0619: 1, H0253: 1, H0565: 1, H0135: 1, L0641: 1, L0521: 1, L0774: 1, L0809: 1, L0789: 1, H0520: 1, L0755: 1, |
| | | | | | L0758: 1 and H0445: 1. |
| 67 | HEBDF77 | 692347 | 77 | 681-791 | AR104: 10, AR213: 5, AR055: 4, AR172: 4, AR060: 4, AR221: 4, AR254: 3, AR161: 3, AR162: 3, |
| | | | | | AR170: 3, AR089: 3, AR163: 3, AR207: 3, AR218: 3, AR313: 3, AR039: 2, AR223: 2, AR096: 2, AR205: 2, |
| | | | | | AR296: 2, AR185: 2, AR282: 2, AR243: 2, AR283: 2, AR230: 2, AR181: 2, AR197: 2, AR299: 2, AR224: 2, |
| | | | | | AR316: 2, AR228: 2, AR300: 2, AR176: 2, AR277: 1, AR295: 1, AR217: 1, AR219: 1, AR309: 1, AR222: 1, |
| | | | | | AR240: 1, AR238: 1, AR216: 1, AR226: 1, AR233: 1, AR264: 1, AR177: 1, AR266: 1, AR289: 1, AR297: 1, |
| | | | | | L0805: 6, L0438: 5, L0439: 5, L0794: 3, L0759: 2, L0005: 1, S0007: 1, H0351: 1, S0346: 1, L0157: 1, L0351: 1, |
| | | | | | L0769: 1, L0638: 1, L0776: 1, L0741: 1, L0756: 1, L0608: 1 and L0366: 1. |
| 68 | HEBDQ91 | 840288 | 78 | 1211-1336 | AR218: 18, AR219: 15, AR104: 14, AR185: 11, AR055: 10, AR060: 9, AR313: 9, AR299: 8, AR096: 7, AR089: 7, |
| | | | | | AR282: 7, AR316: 6, AR240: 6, AR277: 6, AR283: 6, AR039: 5, AR300: 5 |
| | | | | | S0007: 5, L0805: 3, S6026: 1, L0769: 1, L0438: 1, L0741: 1, L0748: 1 and L0758: 1. |
| 69 | HEBFR46 | 847064 | 79 | 200-289 | AR313: 58, AR039: 47, AR300: 30, AR096: 29, AR299: 29, AR277: 28, AR089: 27, AR185: 27, AR316: 22, |
| | | | | | AR219: 22, AR104: 21, AR218: 20, AR240: 20, AR282: 15, AR060: 15, AR055: 11, AR283: 7, |
| | | | | | H0457: 10, H0550: 5, H0436: 5, H0549: 4, H0616: 4, L0519: 4, H0556: 3, H0580: 3, S0007: 3, S0046: 3, L0809: 3, |
| | | | | | L0747: 3, L0777: 3, S0436: 3, H0295: 2, T0040: 2, H0266: 2, L0761: 2, L0783: 2, L0789: 2, H0658: 2, H0521: 2, |
| | | | | | L0753: 2, L0731: 2, L0596: 2, H0543: 2, S0040: 1, S0116: 1, S0282: 1, H0662: 1, H0402: 1, H0125: 1, L0534: 1, |
| | | | | | L0562: 1, S0356: 1, S0358: 1, H0749: 1, L3816: 1, H0559: 1, H0069: 1, H0599: 1, H0618: 1, H0253: 1, H0581: 1, |
| | | | | | H0546: 1, H0123: 1, S0051: 1, H0083: 1, H0687: 1, H0284: 1, H0124: 1, H0038: 1, H0551: 1, H0623: 1, S0038: 1, |
| | | | | | T0041: 1, S0440: 1, S0150: 1, L3818: 1, S0002: 1, L0763: 1, L0769: 1, L5575: 1, L0627: 1, L0800: 1, L0662: 1, |
| | | | | | L0803: 1, L0793: 1, L0666: 1, L2264: 1, L3825: 1, L3827: 1, L3828: 1, H0547: 1, H0519: 1, H0539: 1, S0037: 1, |
| | | | | | S0206: 1, L0748: 1, L0749: 1, H0595: 1, L0593: 1, S0194: 1 and S0276: 1. |
| 70 | HEBGE07 | 798096 | 80 | 106-234 | S0007: 1 |
| 71 | HEGAU15 | 834379 | 81 | 59-163 | AR299: 9, AR039: 8, AR300: 8, AR055: 7, AR240: 7, AR060: 7, AR313: 6, AR282: 6, AR277: 6, AR104: 5, |
| | | | | | AR089: 5, AR096: 5, AR185: 5, AR316: 4, AR283: 4, AR218: 4, AR219: 3, |
| | | | | | H0550: 2, L0749: 2, H0318: 1 and H0555: 1. |
| 72 | HEQBF89 | 786205 | 82 | 306-458 | AR313: 76, AR277: 64, AR039: 62, AR299: 47, AR089: 47, AR316: 44, AR096: 43, AR185: 41, AR300: 40, |
| | | | | | AR283: 38, AR282: 37, AR104: 34, AR240: 34, AR219: 33, AR218: 29, AR055: 22, AR060: 21, |
| | | | | | H0544: 1 |
| 73 | HFCEI04 | 692438 | 83 | 136-264 | AR055: 7, AR060: 7, AR104: 6, AR240: 6, AR282: 6, AR218: 5, AR185: 5, AR283: 5, AR089: 4, AR300: 4, |
| | | | | | AR313: 3, AR299: 3, AR316: 3, AR096: 3, AR039: 3, AR277: 3, AR219: 2, |
| | | | | | H0009: 3 |
| 74 | HFEAY59 | 658685 | 84 | 154-276 | AR055: 5, AR277: 5, AR283: 5, AR060: 4, AR282: 4, AR104: 4, AR300: 3, AR240: 3, AR316: 2, AR039: 2, |
| | | | | | AR089: 2, AR096: 2, AR218: 2, AR185: 2, AR219: 1, AR299: 1, |
| | | | | | H0081: 2 and H0586: 1. |
| 75 | HFIJA68 | 847074 | 85 | 283-414 | AR241: 47, AR313: 34, AR039: 26, AR089: 24, AR198: 24, AR192: 23, AR204: 18, AR183: 17, AR299: 16, |
| | | | | | AR229: 16, AR218: 16, AR096: 15, AR185: 15, AR300: 14, AR271: 14, AR275: 14, AR240: 13, AR247: 13, |
| | | | | | AR243: 12, AR238: 12, AR194: 12, AR316: 12, AR258: 12, AR226: 12, AR219: 11, AR177: 11, AR293: 11, |
| | | | | | AR274: 10, AR175: 10, AR273: 10, AR277: 10, AR233: 9, AR312: 9, AR280: 9, AR234: 9, AR104: 9, AR315: 9, |
| | | | | | AR292: 8, AR269: 8, AR231: 8, AR205: 8, AR314: 7, AR060: 7, AR295: 7, AR265: 7, AR237: 7, AR053: 7, |
| | | | | | AR179: 7, AR186: 7, AR270: 7, AR281: 7, AR052: 7, AR267: 6, AR268: 6, AR227: 6, AR294: 6, AR249: 6, |
| | | | | | AR202: 6, AR033: 6, AR182: 6, AR184: 6, AR246: 6, AR259: 6, AR256: 5, AR213: 5, AR282: 5, AR232: 4, |
| | | | | | AR206: 4, AR309: 4, AR253: 4, AR310: 4, AR296: 4, AR251: 4, AR055: 3, AR290: 3, AR248: 3, AR291: 3, |
| | | | | | AR286: 3, AR285: 2, AR298: 2, AR263: 2, AR289: 2, AR061: 2, AR244: 2, AR284: 2, AR283: 2, AR266: 1, |
| | | | | | S0194: 1 |
| 76 | HFKEU12 | 634006 | 86 | 6-173 | AR055: 9, AR219: 7, AR060: 7, AR282: 6, AR277: 5, AR039: 5, AR104: 5, AR313: 5, AR300: 5, AR218: 4, |
| | | | | | AR299: 4, AR283: 4, AR240: 4, AR089: 4, AR316: 4, AR096: 3, AR185: 3, |
| | | | | | H0012: 2 and L0805: 1. |
| 77 | HFPCZ55 | 840840 | 87 | 676-810 | L0756: 6, L0439: 4, L0777: 4, L0662: 3, H0672: 3, S0358: 2, L0659: 2, L0666: 2, S0031: 2, S0360: 1, H0411: 1, |
| | | | | | H0369: 1, S0222: 1, S0220: 1, S0005: 1, H0575: 1, T0082: 1, H0050: 1, S6028: 1, H0169: 1, H0100: 1, L0769: 1, |
| | | | | | L0774: 1, L0776: 1, L0647: 1, L0663: 1, H0660: 1, H0651: 1, S0146: 1, L0743: 1, L0757: 1, L0361: 1 and L0462: 1. |
| 78 | HFTBM38 | 638338 | 88 | 577-669 | AR185: 7, AR089: 5, AR055: 5, AR104: 4, AR218: 3, AR060: 3, AR299: 3, AR316: 3, AR277: 3, AR300: 2, |
| | | | | | AR240: 2, AR282: 2, AR039: 2, AR096: 2, AR313: 2, AR283: 1, AR219: 1, |
| | | | | | L0439: 14, H0052: 9, L0770: 3, H0544: 2, L0769: 2, L0650: 2, L0438: 2, H0593: 2, L0742: 2, L0779: 2, L0758: 2, |
| | | | | | S0040: 1, H0581: 1, H0009: 1, H0567: 1, H0566: 1, H0123: 1, H0266: 1, H0687: 1, H0433: 1, H0100: 1, S0002: 1, |
| | | | | | L0369: 1, L0640: 1, L0639: 1, L0637: 1, L5575: 1, L5565: 1, L0764: 1, L0521: 1, L0794: 1, L0803: 1, L0653: 1, |
| | | | | | L0655: 1, L0647: 1, L0367: 1, L5623: 1, L0790: 1, L0663: 1, L0665: 1, H0670: 1, S0406: 1, H0479: 1, L0743: 1, |
| | | | | | L0751: 1, L0747: 1, L0749: 1, L0757: 1, S0434: 1, H0665: 1 and H0352: 1. |
| 79 | HFTDH56 | 862021 | 89 | 67-99 | AR060: 10, AR096: 9, AR055: 9, AR104: 8, AR240: 6, AR218: 6, AR283: 5, AR185: 5, AR089: 5, AR300: 4, |
| | | | | | AR316: 4, AR299: 4, AR219: 3, AR277: 3, AR282: 3, AR039: 2, AR313: 2, |
| | | | | | L0754: 7, L0777: 6, L0794: 4, L0803: 4, L0750: 4, L0731: 4, H0046: 3, H0050: 3, H0620: 3, H0135: 3, H0539: 3, |
| | | | | | L0749: 3, L0759: 3, H0550: 2, T0039: 2, H0013: 2, H0052: 2, H0039: 2, L0809: 2, H0547: 2, L0748: 2, H0624: 1, |
| | | | | | S0001: 1, H0208: 1, H0619: 1, H0393: 1, S0278: 1, H0069: 1, H0635: 1, H0253: 1, H0123: 1, H0024: 1, T0010: 1, |
| | | | | | H0687: 1, H0428: 1, H0494: 1, L0764: 1, L0784: 1, L0807: 1, L0438: 1, H0689: 1, L0747: 1 and L0755: 1. |
| 80 | HFVHW43 | 570948 | 90 | 92-211 | H0393: 1 |
| 81 | HGBHP91 | 693011 | 91 | 50-208 | AR313: 32, AR039: 24, AR299: 22, AR089: 21, AR185: 17, AR096: 16, AR060: 15, AR316: 13, AR300: 13, |
| | | | | | AR277: 13, AR240: 12, AR218: 11, AR055: 11, AR104: 11, AR282: 9, AR219: 9, AR283: 5, |
| | | | | | H0014: 1 |
| 82 | HHEAK45 | 765278 | 92 | 813-824 | AR277: 12, AR283: 11, AR313: 11, AR316: 9, AR282: 9, AR089: 7, AR240: 7, AR104: 7, AR299: 7, AR039: 7, |
| | | | | | AR218: 6, AR096: 6, AR055: 6, AR300: 6, AR185: 6, AR060: 4, AR219: 3, |
| | | | | | L0758: 9, L0748: 6, L0747: 6, L0779: 5, L0750: 4, H0556: 3, S0440: 3, H0658: 3, H0656: 2, L0770: 2, L0769: 2, |
| | | | | | L0804: 2, L0774: 2, H0144: 2, H0648: 2, L0439: 2, L0749: 2, L0596: 2, H0265: 1, S0444: 1, H0318: 1, H0597: 1, |
| | | | | | H0050: 1, H0024: 1, H0135: 1, H0090: 1, H0038: 1, H0616: 1, H0494: 1, L0065: 1, S0422: 1, H0529: 1, L0637: 1, |
| | | | | | L0764: 1, L0768: 1, L0794: 1, L0387: 1, L0803: 1, L0805: 1, L0809: 1, L0788: 1, L0790: 1, L0664: 1, L0438: 1, |
| | | | | | H0555: 1, L0780: 1, L0731: 1, H0444: 1, H0542: 1, H0543: 1 and H0423: 1. |
| 83 | HHEGS55 | 858372 | 93 | 159-269 | AR039: 82, AR313: 78, AR300: 45, AR096: 42, AR277: 41, AR185: 40, AR299: 37, AR089: 37, AR104: 29, |
| | | | | | AR316: 28, AR240: 24, AR219: 20, AR218: 19, AR282: 17, AR060: 16, AR055: 8, AR283: 7, |
| | | | | | H0542: 5 |
| 84 | HHEOW19 | 886174 | 94 | 183-377 | AR169: 30, AR089: 25, AR207: 25, AR308: 25, AR214: 24, AR263: 24, AR165: 24, AR264: 24, AR164: 23, |
| | | | | | AR161: 23, AR168: 23, AR222: 23, AR171: 22, AR283: 22, AR166: 22, AR162: 22, AR311: 21, AR163: 21, |
| | | | | | AR096: 21, AR223: 21, AR213: 19, AR104: 19, AR316: 19, AR219: 19, AR218: 18, AR217: 18, AR312: 18, |
| | | | | | AR212: 18, AR225: 17, AR309: 17, AR282: 17, AR313: 17, AR039: 17, AR272: 17, AR299: 16, AR216: 16, |
| | | | | | AR060: 15, AR172: 15, AR274: 15, AR053: 15, AR170: 15, AR240: 14, AR055: 14, AR185: 14, AR195: 13, |
| | | | | | AR277: 13, AR197: 13, AR235: 13, AR295: 12, AR192: 12, AR224: 12, AR296: 11, AR297: 11, AR246: 11, |
| | | | | | AR285: 10, AR198: 10, AR245: 10, AR293: 10, AR252: 10, AR288: 10, AR205: 10, AR300: 10, AR221: 9, |
| | | | | | AR242: 9, AR287: 9, AR201: 9, AR247: 9, AR253: 9, AR033: 9, AR266: 9, AR215: 9, AR275: 8, AR291: 8, |
| | | | | | AR174: 8, AR261: 8, AR193: 8, AR243: 8, AR271: 8, AR177: 8, AR270: 8, AR254: 8, AR289: 7, AR236: 7, |
| | | | | | AR286: 7, AR175: 6, AR204: 6, AR269: 6, AR189: 6, AR294: 6, AR180: 6, AR178: 5, AR250: 5, AR183: 5, |
| | | | | | AR199: 5, AR257: 5, AR181: 5, AR179: 5, AR268: 5, AR262: 5, AR173: 5, AR290: 5, AR258: 5, AR255: 4, |
| | | | | | AR061: 4, AR210: 4, AR191: 4, AR190: 4, AR229: 4, AR196: 4, AR176: 4, AR188: 3, AR226: 3, AR239: 3, |
| | | | | | AR182: 3, AR200: 3, AR234: 3, AR238: 3, AR267: 3, AR232: 3, AR230: 3, AR203: 3, AR256: 3, AR231: 3, |
| | | | | | AR211: 3, AR237: 3, AR233: 2, AR227: 2, AR260: 2, AR228: 1, |
| | | | | | L0748: 4, L0745: 4, L0775: 3, L0776: 3, L0758: 3, H0458: 2, H0050: 2, S0003: 2, H0529: 2, L0764: 2, L0747: 2, |
| | | | | | L0599: 2, L0362: 2, H0556: 1, S0116: 1, S0282: 1, H0662: 1, H0305: 1, S0420: 1, S0444: 1, H0329: 1, H0351: 1, |
| | | | | | H0411: 1, S0278: 1, H0438: 1, T0039: 1, H0635: 1, H0156: 1, H0235: 1, H0327: 1, L0471: 1, H0428: 1, H0031: 1, |
| | | | | | H0644: 1, H0032: 1, S0366: 1, H0038: 1, H0616: 1, T0067: 1, H0477: 1, H0059: 1, H0560: 1, H0625: 1, S0422: 1, |
| | | | | | L0769: 1, L0761: 1, L0667: 1, L0771: 1, L0662: 1, L0806: 1, L0655: 1, L0809: 1, L5622: 1, L0789: 1, L0790: 1, |
| | | | | | L0665: 1, S0052: 1, H0144: 1, H0520: 1, H0547: 1, H0519: 1, H0435: 1, H0539: 1, S0044: 1, S0392: 1, L0754: 1, |
| | | | | | L0749: 1, L0750: 1, L0779: 1, L0755: 1, L0759: 1, S0434: 1, L0608: 1, H0543: 1 and S0452: 1. |
| 85 | HHFFL34 | 753230 | 95 | 42-713 | AR265: 3, AR183: 3, AR184: 3, AR248: 3, AR309: 2, AR310: 2, AR269: 2, AR206: 1, AR282: 1, AR267: 1, |
| | | | | | AR270: 1, AR295: 1, AR277: 1, AR186: 1, AR205: 1, |
| | | | | | H0599: 3, L0766: 3, S0037: 3, H0556: 2, H0242: 2, H0620: 2, H0543: 2, H0170: 1, T0002: 1, H0300: 1, S0360: 1, |
| | | | | | S0045: 1, S0476: 1, H0549: 1, H0309: 1, H0545: 1, H0081: 1, H0050: 1, S0388: 1, H0644: 1, T0041: 1, S0144: 1, |
| | | | | | H0529: 1, H0026: 1, L0659: 1, L2261: 1, H0520: 1, S0126: 1, H0539: 1, L0602: 1, S0152: 1, S0044: 1, H0436: 1, |
| | | | | | S3014: 1, S0027: 1, L0779: 1, L0731: 1 and S0424: 1. |
| 86 | HHFFS40 | 824059 | 96 | 37-180 | AR219: 22, AR277: 18, AR283: 17, AR218: 16, AR039: 15, AR282: 15, AR089: 14, AR316: 13, AR313: 13, |
| | | | | | AR096: 12, AR299: 12, AR104: 12, AR240: 10, AR055: 10, AR300: 10, AR185: 9, AR060: 8, |
| | | | | | S0422: 7, L0748: 6, L0591: 6, L0766: 5, L0754: 5, H0423: 5, S0408: 4, H0069: 4, L0803: 4, L0602: 4, H0657: 3, |
| | | | | | S0442: 3, S0046: 3, H0596: 3, S0003: 3, H0032: 3, H0169: 3, H0674: 3, L0662: 3, L0794: 3, L0526: 3, H0670: 3, |
| | | | | | L0740: 3, L0759: 3, S0134: 2, S0212: 2, H0661: 2, S0444: 2, H0046: 2, L0471: 2, H0355: 2, H0038: 2, H0100: 2, |
| | | | | | L0564: 2, S0440: 2, H0529: 2, L0770: 2, L0769: 2, L0667: 2, L0771: 2, L0521: 2, L0804: 2, L0805: 2, L0384: 2, |
| | | | | | L0809: 2, L0665: 2, H0659: 2, L0743: 2, L0750: 2, L0731: 2, S0436: 2, L0592: 2, L0599: 2, L0608: 2, L0362: 2, |
| | | | | | H0171: 1, H0556: 1, H0686: 1, H0713: 1, H0717: 1, H0738: 1, H0740: 1, H0656: 1, H0663: 1, H0662: 1, H0402: 1, |
| | | | | | S0356: 1, H0742: 1, H0730: 1, H0747: 1, S0222: 1, H0574: 1, H0632: 1, H0486: 1, H0013: 1, H0581: 1, S0049: 1, |
| | | | | | H0052: 1, H0194: 1, H0309: 1, H0263: 1, H0123: 1, H0050: 1, H0373: 1, H0510: 1, S6028: 1, H0266: 1, H0615: 1, |
| | | | | | L0483: 1, H0644: 1, L0143: 1, H0708: 1, H0135: 1, H0163: 1, H0090: 1, H0616: 1, T0067: 1, H0488: 1, H0412: 1, |
| | | | | | H0059: 1, H0494: 1, S0382: 1, S0306: 1, S0450: 1, H0509: 1, H0641: 1, H0647: 1, H0646: 1, L0520: 1, L0763: 1, |
| | | | | | L0637: 1, L0373: 1, L0363: 1, L5564: 1, L0775: 1, L0375: 1, L0651: 1, L0655: 1, L0661: 1, L0527: 1, L0656: 1, |
| | | | | | L0659: 1, L0518: 1, L0532: 1, L0663: 1, L0664: 1, S0374: 1, H0682: 1, H0658: 1, H0660: 1, H0672: 1, H0539: 1, |
| | | | | | H0521: 1, S0044: 1, S0406: 1, H0478: 1, L0744: 1, L0439: 1, L0747: 1, L0779: 1, L0777: 1, L0758: 1, L0480: 1, |
| | | | | | L0595: 1, H0667: 1, S0192: 1, S0194: 1, S0196: 1, H0422: 1 and S0424: 1. |
| 87 | HHGCS78 | 634605 | 97 | 290-364 | AR277: 76, AR283: 71, AR219: 57, AR218: 56, AR316: 56, AR089: 52, AR313: 52, AR240: 51, AR055: 45, |
| | | | | | AR282: 45, AR299: 44, AR104: 41, AR096: 41, AR185: 34, AR039: 33, AR060: 31, AR300: 30, |
| | | | | | L0770: 7, H0333: 3, L0783: 2, L0731: 2, H0445: 2, S0418: 1, H0741: 1, S0002: 1, L0369: 1, L0643: 1, L0764: 1, |
| | | | | | L0794: 1, L0803: 1, L0775: 1, L0375: 1, L0378: 1, L0655: 1, L0809: 1, L0666: 1, L0664: 1, L0754: 1, L0747: 1, |
| | | | | | L0749: 1, L0752: 1 and L0591: 1. |
| 88 | HHGDT26 | 658692 | 98 | 181-207 | L0748: 2, S0218: 1, H0333: 1, H0271: 1, S0210: 1, L0776: 1, S0188: 1, L0745: 1 and H0423: 1. |
| 89 | HHPFU28 | 824573 | 99 | 156-239 | AR218: 11, AR039: 9, AR219: 9, AR104: 8, AR300: 8, AR185: 7, AR055: 6, AR299: 6, AR089: 6, AR096: 6, |
| | | | | | AR240: 6, AR060: 5, AR282: 5, AR316: 5, AR313: 4, AR277: 3, AR283: 3, |
| | | | | | L0622: 2, L0518: 2, L0382: 2, L0663: 2, L0750: 2, L0752: 2, L0362: 2, S0114: 1, S0420: 1, S0354: 1, S0444: 1, |
| | | | | | S0222: 1, S0010: 1, H0046: 1, H0051: 1, L0483: 1, H0644: 1, H0412: 1, H0529: 1, L0794: 1, L0561: 1, L0666: 1, |
| | | | | | S0330: 1, S0028: 1, L0779: 1, L0777: 1, L0758: 1, S0031: 1, H0444: 1 and L0592: 1. |
| 90 | HHSBI06 | 639097 | 100 | 690-707 | AR218: 14, AR060: 11, AR282: 11, AR055: 11, AR089: 10, AR219: 10, AR185: 10, AR277: 10, AR039: 9, |
| | | | | | AR104: 9, AR299: 8, AR316: 8, AR300: 8, AR313: 8, AR283: 7, AR096: 7, AR240: 5, |
| | | | | | L0766: 12, L0794: 7, L0439: 7, L0749: 7, L0803: 6, L0740: 6, L0745: 6, H0052: 5, L0754: 5, L3181: 4, L0770: 4, |
| | | | | | L0666: 4, L0748: 4, H0553: 3, L0790: 3, L0589: 3, H0543: 3, S0114: 2, S0134: 2, H0650: 2, S0354: 2, S0444: 2, |
| | | | | | H0747: 2, S0476: 2, H0393: 2, H0549: 2, H0586: 2, H0013: 2, H0599: 2, H0014: 2, S0051: 2, S0003: 2, H0032: 2, |
| | | | | | H0674: 2, H0135: 2, S0142: 2, L0372: 2, L0800: 2, L0764: 2, L0805: 2, L0655: 2, L0657: 2, L0659: 2, L0809: 2, |
| | | | | | L0789: 2, L0792: 2, H0144: 2, L0438: 2, H0684: 2, H0658: 2, H0539: 2, H0521: 2, S0406: 2, S0028: 2, L0750: 2, |
| | | | | | L0779: 2, L0777: 2, L0752: 2, L0731: 2, L0758: 2, S0436: 2, H0653: 2, H0542: 2, H0556: 1, H0716: 1, H0381: 1, |
| | | | | | S0116: 1, H0661: 1, S0356: 1, S0442: 1, S0360: 1, H0675: 1, H0734: 1, L2255: 1, L3726: 1, H0261: 1, S0222: 1, |
| | | | | | L3499: 1, T0114: 1, H0706: 1, H0036: 1, H0318: 1, H0581: 1, L0738: 1, H0123: 1, H0620: 1, S0050: 1, H0015: 1, |
| | | | | | H0051: 1, H0355: 1, H0416: 1, H0286: 1, H0328: 1, H0428: 1, H0622: 1, T0006: 1, H0030: 1, H0031: 1, H0644: 1, |
| | | | | | H0617: 1, L0055: 1, H0124: 1, H0163: 1, H0038: 1, H0040: 1, H0616: 1, H0551: 1, H0264: 1, H0102: 1, S0112: 1, |
| | | | | | L0564: 1, H0280: 1, H0494: 1, H0561: 1, S0440: 1, H0633: 1, L3815: 1, S0002: 1, L0763: 1, L0769: 1, L0761: 1, |
| | | | | | L0646: 1, L0642: 1, L0644: 1, L0645: 1, L0648: 1, L0662: 1, L0363: 1, L0775: 1, L0375: 1, L0651: 1, L0784: 1, |
| | | | | | L0806: 1, L0653: 1, L0807: 1, L0658: 1, L0540: 1, L5622: 1, L0368: 1, L0665: 1, L2655: 1, L2257: 1, L2263: 1, |
| | | | | | L2258: 1, L2262: 1, S0374: 1, H0723: 1, L3811: 1, L2670: 1, H0547: 1, L3215: 1, H0648: 1, H0672: 1, S0328: 1, |
| | | | | | H0753: 1, H0522: 1, H0436: 1, S0392: 1, H0626: 1, L0759: 1, S0031: 1, H0445: 1, S0434: 1, L0596: 1, L0588: 1, |
| | | | | | S0192: 1, H0423: 1, S0424: 1 and H0352: 1. |
| 91 | HHSBI65 | 801910 | 101 | 62-229 | AR176: 10, AR216: 9, AR217: 8, AR168: 8, AR169: 8, AR182: 8, AR161: 8, AR196: 8, AR162: 8, AR214: 8, |
| | | | | | AR228: 8, AR269: 8, AR231: 8, AR233: 7, AR171: 7, AR207: 7, AR229: 7, AR181: 7, AR223: 7, AR163: 7, |
| | | | | | AR198: 7, AR165: 7, AR172: 7, AR225: 7, AR267: 7, AR224: 7, AR266: 6, AR268: 6, AR170: 6, AR164: 6, |
| | | | | | AR237: 6, AR221: 6, AR222: 6, AR177: 6, AR179: 6, AR235: 6, AR270: 6, AR183: 6, AR204: 6, AR288: 6, |
| | | | | | AR053: 6, AR239: 6, AR193: 5, AR236: 5, AR250: 5, AR191: 5, AR264: 5, AR293: 5, AR296: 5, AR055: 5, |
| | | | | | AR238: 5, AR247: 5, AR309: 5, AR300: 5, AR178: 5, AR295: 5, AR290: 5, AR294: 5, AR060: 5, AR061: 5, |
| | | | | | AR287: 5, AR257: 5, AR201: 5, AR282: 5, AR291: 5, AR175: 5, AR311: 4, AR261: 4, AR234: 4, AR289: 4, |
| | | | | | AR275: 4, AR262: 4, AR252: 4, AR242: 4, AR213: 4, AR253: 4, AR297: 4, AR203: 4, AR277: 4, AR180: 4, |
| | | | | | AR212: 4, AR200: 4, AR316: 4, AR286: 4, AR274: 4, AR255: 4, AR312: 4, AR240: 4, AR174: 4, AR215: 4, |
| | | | | | AR039: 4, AR192: 4, AR263: 4, AR205: 4, AR283: 3, AR232: 3, AR271: 3, AR285: 3, AR190: 3, AR226: 3, |
| | | | | | AR185: 3, AR033: 3, AR246: 3, AR230: 3, AR188: 3, AR308: 3, AR227: 3, AR096: 3, AR173: 3, AR313: 3, |
| | | | | | AR089: 3, AR195: 3, AR272: 3, AR199: 3, AR189: 3, AR260: 3, AR197: 3, AR299: 3, AR104: 2, AR210: 2, |
| | | | | | AR258: 2, AR211: 2, AR256: 2, AR243: 2, AR218: 2, AR219: 2, |
| | | | | | L0439: 7, L0794: 5, L0766: 5, S0354: 2, H0549: 2, S0051: 2, S0142: 2, L0372: 2, L0809: 2, L0438: 2, H0658: 2, |
| | | | | | H0650: 1, H0381: 1, S0116: 1, S0356: 1, S0360: 1, H0261: 1, H0586: 1, H0486: 1, H0036: 1, H0052: 1, L0738: 1, |
| | | | | | H0457: 1, H0014: 1, H0051: 1, H0617: 1, H0032: 1, H0561: 1, S0440: 1, H0633: 1, L0763: 1, L0761: 1, L0800: 1, |
| | | | | | L0644: 1, L0645: 1, L0764: 1, L0648: 1, L0655: 1, L0657: 1, L0658: 1, L0368: 1, L0665: 1, L3811: 1, S0044: 1, |
| | | | | | S0406: 1, H0626: 1, L0731: 1, S0434: 1, S0436: 1, H0653: 1 and H0423: 1. |
| 92 | HHSDI53 | 862028 | 102 | 221-295 | AR313: 45, AR039: 43, AR300: 22, AR299: 22, AR096: 21, AR316: 20, AR185: 19, AR089: 19, AR277: 19, |
| | | | | | AR219: 15, AR240: 14, AR104: 14, AR218: 13, AR282: 12, AR060: 11, AR055: 8, AR283: 4, |
| | | | | | L0766: 10, L0752: 8, L0439: 6, L0747: 6, L0740: 5, L0756: 5, S0408: 4, L0779: 4, L0777: 4, L0731: 4, S0051: 3, |
| | | | | | H0169: 3, L0803: 3, L0774: 3, L0809: 3, L0754: 3, S0360: 2, H0574: 2, S0422: 2, L0763: 2, L0805: 2, L0666: 2, |
| | | | | | L0663: 2, L0751: 2, L0755: 2, L0759: 2, L0601: 2, H0624: 1, S0040: 1, H0713: 1, S0114: 1, S0298: 1, S0420: 1, |
| | | | | | S0444: 1, H0580: 1, H0730: 1, H0733: 1, L3388: 1, H0351: 1, H0600: 1, H0331: 1, H0013: 1, L0021: 1, H0575: 1, |
| | | | | | H0590: 1, T0110: 1, H0012: 1, H0615: 1, H0031: 1, H0553: 1, H0591: 1, S0440: 1, H0646: 1, S0002: 1, L0772: 1, |
| | | | | | L0645: 1, L0773: 1, L0662: 1, L0794: 1, L0381: 1, L0775: 1, L0776: 1, L0657: 1, L0659: 1, L0528: 1, L5622: 1, |
| | | | | | L0790: 1, H0547: 1, H0648: 1, H0539: 1, S0152: 1, H0696: 1, S0044: 1, S0406: 1, S0028: 1, L0758: 1, S0434: 1, |
| | | | | | S0436: 1, L0366: 1, S0011: 1, S0276: 1, H0422: 1, S0398: 1 and S0424: 1. |
| 93 | HISAT67 | 843549 | 103 | 1239-1409 | AR283: 20, AR282: 15, AR277: 11, AR089: 11, AR219: 11, AR299: 10, AR218: 10, AR316: 9, AR313: 8, AR096: 8, |
| | | | | | AR185: 8, AR104: 7, AR240: 7, AR055: 6, AR060: 6, AR039: 6, AR300: 6, |
| | | | | | L0751: 8, L0754: 6, L0731: 6, H0556: 5, L0766: 5, L0439: 5, L0750: 5, L0770: 4, L0666: 4, H0521: 4, S0356: 3, |
| | | | | | H0052: 3, H0424: 3, L0776: 3, S0406: 3, S0418: 2, S0442: 2, H0580: 2, H0733: 2, H0486: 2, H0575: 2, S0438: 2, |
| | | | | | L0769: 2, L3905: 2, L0659: 2, L0663: 2, L0665: 2, L0748: 2, L0749: 2, S0436: 2, T0002: 1, H0159: 1, S6024: 1, |
| | | | | | S0134: 1, H0656: 1, H0484: 1, S0358: 1, S0360: 1, H0742: 1, S0046: 1, H0393: 1, S0278: 1, H0607: 1, H0586: 1, |
| | | | | | H0642: 1, H0632: 1, H0427: 1, L0021: 1, H0599: 1, H0318: 1, H0746: 1, H0194: 1, L0738: 1, H0178: 1, H0566: 1, |
| | | | | | H0051: 1, T0010: 1, H0408: 1, H0290: 1, H0328: 1, H0401: 1, H0417: 1, H0553: 1, H0617: 1, H0040: 1, H0264: 1, |
| | | | | | H0623: 1, H0059: 1, T0041: 1, H0494: 1, H0561: 1, H0509: 1, S0144: 1, L0763: 1, L0638: 1, L5565: 1, L0772: 1, |
| | | | | | L0373: 1, L0764: 1, L0662: 1, L0626: 1, L0363: 1, L0649: 1, L0650: 1, L0774: 1, L0806: 1, L0654: 1, L0789: 1, |
| | | | | | L0664: 1, L3822: 1, H0699: 1, S0374: 1, L3828: 1, H0547: 1, H0689: 1, H0659: 1, H0658: 1, H0670: 1, H0672: 1, |
| | | | | | H0539: 1, L0740: 1, L0746: 1, L0752: 1, L0755: 1, L0757: 1, L0584: 1, L0596: 1, L0608: 1 and H0352: 1. |
| 94 | HJBCU75 | 638329 | 104 | 61-78 | AR162: 12, AR161: 12, AR163: 11, AR186: 10, AR244: 10, AR273: 8, AR222: 8, AR225: 8, AR221: 8, AR214: 8, |
| | | | | | AR216: 8, AR224: 7, AR223: 7, AR282: 7, AR215: 7, AR052: 7, AR202: 7, AR200: 6, AR206: 6, AR176: 6, |
| | | | | | AR269: 6, AR235: 6, AR272: 6, AR217: 6, AR055: 6, AR182: 6, AR264: 6, AR275: 6, AR061: 6, AR183: 5, |
| | | | | | AR168: 5, AR171: 5, AR309: 5, AR270: 5, AR228: 5, AR290: 5, AR268: 5, AR310: 5, AR181: 5, AR257: 5, |
| | | | | | AR060: 5, AR255: 5, AR165: 5, AR191: 5, AR164: 5, AR274: 5, AR247: 5, AR246: 4, AR166: 4, AR178: 4, |
| | | | | | AR311: 4, AR291: 4, AR312: 4, AR236: 4, AR173: 4, AR249: 4, AR233: 4, AR240: 4, AR288: 4, AR174: 4, |
| | | | | | AR267: 4, AR239: 4, AR204: 4, AR185: 4, AR287: 4, AR172: 4, AR192: 4, AR297: 4, AR213: 4, AR194: 4, |
| | | | | | AR177: 4, AR294: 4, AR261: 4, AR184: 4, AR190: 4, AR170: 3, AR284: 3, AR262: 3, AR210: 3, AR188: 3, |
| | | | | | AR089: 3, AR313: 3, AR196: 3, AR298: 3, AR266: 3, AR175: 3, AR033: 3, AR260: 3, AR285: 3, AR189: 3, |
| | | | | | AR316: 3, AR231: 3, AR251: 3, AR293: 3, AR296: 3, AR237: 3, AR286: 3, AR265: 3, AR243: 3, AR277: 3, |
| | | | | | AR300: 3, AR039: 3, AR289: 3, AR315: 3, AR179: 3, AR271: 3, AR234: 3, AR263: 3, AR199: 3, AR283: 3, |
| | | | | | AR203: 3, AR096: 3, AR299: 3, AR295: 3, AR229: 3, AR230: 3, AR292: 3, AR180: 3, AR104: 2, AR198: 2, |
| | | | | | AR308: 2, AR219: 2, AR053: 2, AR218: 2, AR211: 2, AR205: 2, AR238: 2, AR241: 2, AR258: 2, AR256: 2, |
| | | | | | AR226: 2, AR232: 2, AR280: 2, AR169: 1, AR227: 1, AR259: 1, AR201: 1, |
| | | | | | L0805: 3, H0556: 2, H0046: 2, S0022: 2, L0764: 2, L0662: 2, L0748: 2, H0013: 1, H0050: 1, H0039: 1, H0040: 1, |
| | | | | | H0087: 1, T0042: 1, L0643: 1, L0794: 1, L0803: 1, L0804: 1, L0807: 1, L0809: 1, L0666: 1, H0144: 1, L0749: 1, |
| | | | | | L0779: 1 and L0758: 1. |
| 95 | HJMAA03 | 824062 | 105 | 527-556 | AR207: 12, AR309: 11, AR192: 11, AR252: 10, AR053: 9, AR212: 9, AR242: 9, AR235: 9, AR213: 8, AR215: 8, |
| | | | | | AR198: 8, AR170: 8, AR169: 8, AR161: 8, AR162: 8, AR253: 8, AR223: 8, AR165: 8, AR166: 8, AR263: 7, |
| | | | | | AR163: 7, AR164: 7, AR274: 7, AR224: 7, AR245: 7, AR264: 7, AR214: 7, AR195: 7, AR217: 7, AR174: 7, |
| | | | | | AR197: 7, AR261: 7, AR311: 7, AR221: 7, AR282: 6, AR308: 6, AR222: 6, AR240: 6, AR312: 6, AR205: 6, |
| | | | | | AR171: 6, AR168: 6, AR193: 6, AR313: 6, AR246: 6, AR177: 6, AR173: 6, AR277: 6, AR216: 6, AR247: 6, |
| | | | | | AR180: 6, AR225: 6, AR283: 5, AR269: 5, AR300: 5, AR089: 5, AR201: 5, AR272: 5, AR297: 5, AR189: 5, |
| | | | | | AR204: 5, AR183: 5, AR299: 5, AR175: 5, AR288: 5, AR176: 5, AR295: 5, AR271: 5, AR250: 5, AR096: 5, |
| | | | | | AR275: 5, AR270: 4, AR316: 4, AR196: 4, AR191: 4, AR286: 4, AR178: 4, AR290: 4, AR185: 4, AR268: 4, |
| | | | | | AR296: 4, AR291: 4, AR257: 4, AR033: 4, AR199: 4, AR181: 4, AR039: 4, AR236: 4, AR229: 4, AR243: 4, |
| | | | | | AR285: 4, AR254: 4, AR289: 4, AR238: 3, AR172: 3, AR293: 3, AR262: 3, AR190: 3, AR287: 3, AR179: 3, |
| | | | | | AR200: 3, AR055: 3, AR104: 3, AR060: 3, AR188: 3, AR239: 3, AR182: 3, AR233: 3, AR258: 3, AR294: 3, |
| | | | | | AR061: 3, AR237: 3, AR231: 3, AR234: 3, AR226: 3, AR203: 3, AR255: 3, AR232: 3, AR230: 2, AR211: 2, |
| | | | | | AR227: 2, AR228: 2, AR267: 2, AR210: 2, AR266: 2, AR219: 2, AR260: 1, AR218: 1, AR256: 1, |
| | | | | | L0749: 8, L0803: 5, L0748: 5, L0777: 5, L0794: 4, L0766: 4, L0804: 4, H0135: 3, H0551: 3, L0754: 3, L0599: 3, |
| | | | | | H0542: 3, H0556: 2, H0545: 2, H0674: 2, L0764: 2, L0774: 2, L0776: 2, L0655: 2, H0521: 2, L0439: 2, L0752: 2, |
| | | | | | L0731: 2, L0596: 2, H0395: 1, H0713: 1, H0483: 1, H0663: 1, S0358: 1, H0580: 1, H0329: 1, S0045: 1, H0453: 1, |
| | | | | | H0427: 1, H0599: 1, H0706: 1, H0150: 1, H0123: 1, L0471: 1, L0163: 1, H0051: 1, H0275: 1, S0003: 1, S0214: 1, |
| | | | | | H0628: 1, H0090: 1, H0040: 1, H0087: 1, T0067: 1, H0412: 1, H0494: 1, H0509: 1, H0633: 1, H0647: 1, S0344: 1, |
| | | | | | L0769: 1, L0637: 1, L0761: 1, L0772: 1, L0800: 1, L0374: 1, L0771: 1, L0363: 1, L0768: 1, L0806: 1, L0659: 1, |
| | | | | | L0382: 1, L0809: 1, L0545: 1, L0789: 1, L0666: 1, H0519: 1, H0659: 1, S0152: 1, S0404: 1, L0751: 1, L0747: 1, |
| | | | | | L0750: 1, L0779: 1, S0436: 1, L0608: 1, S0276: 1, H0543: 1, H0506: 1 and H0352: 1. |
| 96 | HJMAV41 | 862029 | 106 | 207-290 | AR104: 44, AR277: 28, AR283: 16, AR219: 12, AR316: 12, AR299: 10, AR240: 10, AR055: 9, AR089: 9, AR218: 9, |
| | | | | | AR185: 9, AR039: 9, AR300: 8, AR313: 8, AR282: 8, AR096: 8, AR060: 7, |
| | | | | | L0742: 15, L0439: 7, S0007: 5, L0741: 4, H0135: 3, L0516: 2, H0052: 2, L0438: 2, L0426: 1, H0402: 1, H0351: 1, |
| | | | | | S0222: 1, H0441: 1, H0333: 1, H0545: 1, S0388: 1, S0038: 1, L0351: 1, L0370: 1, L0770: 1, L0769: 1, L5566: 1, |
| | | | | | L0805: 1, L0659: 1, L0792: 1, L0793: 1, H0547: 1, L0750: 1, L0759: 1, L0366: 1, H0008: 1, H0721: 1 and H0352: 1. |
| 97 | HJMAY90 | 793678 | 107 | 2492-2596 | AR283: 23, AR277: 22, AR089: 21, AR313: 18, AR316: 18, AR282: 18, AR240: 17, AR300: 17, AR185: 16, |
| | | | | | AR096: 14, AR219: 14, AR299: 14, AR218: 14, AR104: 13, AR055: 13, AR039: 12, AR060: 11, |
| | | | | | L0777: 9, L0757: 9, L0764: 8, L0809: 6, L0747: 6, H0674: 4, L0783: 4, L0666: 4, L0748: 4, L0751: 4, L0731: 4, |
| | | | | | L0591: 4, L0770: 3, L0372: 3, L0662: 3, L0775: 3, L0518: 3, H0658: 3, L0604: 3, H0638: 2, S0360: 2, L0769: 2, |
| | | | | | L0761: 2, L0766: 2, L0804: 2, L0663: 2, H0520: 2, S3012: 2, S0027: 2, S0206: 2, L0439: 2, L0750: 2, L0779: 2, |
| | | | | | L0759: 2, L0600: 2, S6024: 1, H0295: 1, H0341: 1, S0001: 1, S0356: 1, S0376: 1, H0580: 1, H0735: 1, S0222: 1, |
| | | | | | H0455: 1, H0574: 1, H0632: 1, H0427: 1, H0599: 1, H0318: 1, H0052: 1, H0263: 1, H0231: 1, H0546: 1, H0545: 1, |
| | | | | | H0009: 1, H0620: 1, H0083: 1, H0687: 1, H0252: 1, H0615: 1, H0029: 1, H0032: 1, H0673: 1, H0135: 1, H0100: 1, |
| | | | | | L0564: 1, H0641: 1, H0646: 1, H0652: 1, S0426: 1, L0640: 1, L0638: 1, L0667: 1, L0772: 1, L0800: 1, L0768: 1, |
| | | | | | L0784: 1, L0805: 1, L0655: 1, L0659: 1, L0517: 1, L0526: 1, S0052: 1, L0438: 1, H0682: 1, S0330: 1, S0380: 1, |
| | | | | | H0521: 1, L0740: 1, L0786: 1, L0780: 1, L0752: 1, S0436: 1, L0605: 1, L0599: 1, S0026: 1 and : 1. |
| 98 | HJPBE39 | 801960 | 108 | 170-226 | AR214: 33, AR171: 25, AR217: 24, AR223: 24, AR225: 23, AR168: 21, AR170: 21, AR172: 20, AR215: 19, |
| | | | | | AR216: 18, AR169: 16, AR237: 13, AR224: 13, AR222: 10, AR233: 10, AR238: 10, AR239: 10, AR221: 9, |
| | | | | | AR061: 8, AR228: 7, AR231: 7, AR257: 7, AR165: 7, AR089: 6, AR218: 6, AR164: 6, AR163: 6, AR162: 6, |
| | | | | | AR285: 6, AR161: 6, AR166: 6, AR210: 6, AR286: 6, AR269: 6, AR294: 5, AR247: 5, AR055: 5, AR309: 5, |
| | | | | | AR297: 5, AR234: 5, AR316: 5, AR275: 5, AR229: 5, AR312: 5, AR287: 5, AR181: 5, AR190: 4, AR179: 4, |
| | | | | | AR270: 4, AR240: 4, AR282: 4, AR104: 4, AR175: 4, AR199: 4, AR300: 4, AR060: 4, AR258: 4, AR173: 4, |
| | | | | | AR293: 4, AR180: 4, AR291: 4, AR219: 4, AR189: 4, AR205: 4, AR299: 4, AR182: 4, AR193: 4, AR243: 4, |
| | | | | | AR255: 4, AR283: 4, AR200: 4, AR204: 4, AR311: 4, AR295: 4, AR203: 4, AR289: 4, AR290: 4, AR242: 4, |
| | | | | | AR262: 4, AR185: 4, AR176: 4, AR254: 3, AR250: 3, AR188: 3, AR227: 3, AR288: 3, AR296: 3, AR313: 3, |
| | | | | | AR264: 3, AR268: 3, AR174: 3, AR201: 3, AR053: 3, AR096: 3, AR177: 3, AR261: 3, AR178: 3, AR232: 3, |
| | | | | | AR236: 3, AR308: 3, AR260: 3, AR235: 3, AR277: 3, AR191: 3, AR197: 3, AR213: 3, AR226: 3, AR183: 3, |
| | | | | | AR253: 3, AR263: 3, AR267: 3, AR211: 3, AR246: 3, AR033: 3, AR212: 3, AR195: 2, AR196: 2, AR039: 2, |
| | | | | | AR256: 2, AR266: 2, AR271: 2, AR230: 2, AR192: 2, AR207: 2, AR272: 2, AR198: 1, |
| | | | | | L0375: 8, L0809: 7, L0794: 6, S0410: 5, L0803: 5, H0309: 4, S0003: 4, S0422: 4, L0592: 4, S0358: 3, H0747: 3, |
| | | | | | H0251: 3, H0494: 3, L0065: 3, S0438: 3, H0529: 3, S0378: 3, S0044: 3, S0406: 3, L0439: 3, L0751: 3, L0747: 3, |
| | | | | | L0731: 3, S0436: 3, L0608: 3, H0685: 2, S0114: 2, S0408: 2, T0008: 2, S0278: 2, H0497: 2, L0622: 2, H0046: 2, |
| | | | | | S0050: 2, H0083: 2, T0006: 2, H0166: 2, H0413: 2, H0625: 2, S0144: 2, S0344: 2, L0369: 2, L0763: 2, L0800: 2, |
| | | | | | L0764: 2, L0768: 2, L0499: 2, L0804: 2, L0775: 2, L0376: 2, L0518: 2, L4508: 2, L0666: 2, L0663: 2, L0438: 2, |
| | | | | | H0518: 2, L0750: 2, L0777: 2, L0753: 2, L0755: 2, L0758: 2, L0759: 2, H0445: 2, L0591: 2, L0599: 2, H0624: 1, |
| | | | | | H0170: 1, L0615: 1, S0134: 1, H0650: 1, S0116: 1, H0306: 1, H0402: 1, S0420: 1, S0356: 1, S0376: 1, S0444: 1, |
| | | | | | S0360: 1, H0580: 1, S0007: 1, S0046: 1, H0393: 1, L0717: 1, H0351: 1, H0453: 1, H0592: 1, H0586: 1, S0005: 1, |
| | | | | | H0559: 1, L0586: 1, H0013: 1, S0280: 1, H0618: 1, T0048: 1, H0318: 1, H0052: 1, H0085: 1, H0231: 1, H0544: 1, |
| | | | | | H0081: 1, S0388: 1, S0051: 1, H0071: 1, H0375: 1, H0266: 1, H0188: 1, S0214: 1, L0055: 1, H0674: 1, L0455: 1, |
| | | | | | H0124: 1, H0040: 1, T0042: 1, H0429: 1, S0352: 1, S0440: 1, S0142: 1, H0538: 1, S0002: 1, L0520: 1, L0371: 1, |
| | | | | | L0770: 1, L3904: 1, L0761: 1, L0667: 1, L0772: 1, L0646: 1, L0642: 1, L0374: 1, L0648: 1, L0662: 1, L0381: 1, |
| | | | | | L0650: 1, L0774: 1, L0805: 1, L0653: 1, L0776: 1, L0606: 1, L0657: 1, L0659: 1, L0517: 1, L0542: 1, L0384: 1, |
| | | | | | L0382: 1, L0543: 1, L5622: 1, L5623: 1, L0791: 1, L5286: 1, L0665: 1, L2257: 1, L2263: 1, L0710: 1, L2264: 1, |
| | | | | | T0068: 1, H0684: 1, H0435: 1, H0670: 1, H0648: 1, H0672: 1, H0539: 1, H0754: 1, H0710: 1, S0152: 1, H0555: 1, |
| | | | | | H0626: 1, S3012: 1, L0742: 1, L0748: 1, L0779: 1, S0434: 1, L0596: 1, L0361: 1, S0192: 1, H0542: 1, H0543: 1, |
| | | | | | H0422: 1, S0424: 1, L3563: 1, H0775: 1 and H0352: 1. |
| 99 | HJPCH08 | 840365 | 109 | 374-727 | AR277: 9, AR055: 9, AR218: 8, AR060: 6, AR219: 6, AR283: 5, AR300: 5, AR104: 5, AR240: 5, AR316: 5, |
| | | | | | AR185: 5, AR313: 5, AR299: 4, AR089: 3, AR096: 3, AR039: 3, AR282: 2, |
| | | | | | L0758: 9, L0777: 8, H0618: 6, L0794: 6, L0749: 6, L0774: 4, L0748: 4, L0750: 4, S0418: 3, S0358: 3, H0266: 3, |
| | | | | | L0770: 3, L0766: 3, L0759: 3, S0360: 2, H0150: 2, H0087: 2, L0369: 2, L0769: 2, L0771: 2, L0789: 2, L0663: 2, |
| | | | | | L0665: 2, H0422: 2, H0556: 1, H0295: 1, H0370: 1, H0331: 1, H0013: 1, L0021: 1, L0022: 1, H0253: 1, H0052: 1, |
| | | | | | H0204: 1, H0544: 1, H0012: 1, H0620: 1, H0024: 1, H0083: 1, H0510: 1, H0416: 1, H0252: 1, H0424: 1, H0617: 1, |
| | | | | | L0564: 1, H0494: 1, S0144: 1, L0372: 1, L0646: 1, L0800: 1, L0641: 1, L0764: 1, L0649: 1, L0803: 1, L0650: 1, |
| | | | | | L0775: 1, L0776: 1, L0655: 1, L0659: 1, L0809: 1, L0666: 1, L0664: 1, H0144: 1, H0521: 1, H0436: 1, S3012: 1, |
| | | | | | L0747: 1, L0786: 1, L0757: 1, L0608: 1 and L0595: 1. |
| 100 | HKGBF25 | 738797 | 110 | 261-371 | AR313: 16, AR039: 12, AR300: 10, AR299: 9, AR096: 9, AR218: 8, AR277: 8, AR089: 6, AR185: 5, AR316: 5, |
| | | | | | AR219: 5, AR104: 4, AR282: 3, AR240: 3, AR055: 3, AR060: 2, |
| | | | | | H0538: 1 |
| 101 | HKIXC44 | 716213 | 111 | 572-682 | AR104: 28, AR055: 19, AR240: 15, AR219: 11, AR218: 11, AR185: 10, AR060: 9, AR299: 7, AR089: 7, AR283: 7, |
| | | | | | AR282: 6, AR096: 5, AR316: 5, AR300: 5, AR313: 5, AR039: 4, AR277: 3, |
| | | | | | L0770: 7, L0742: 5, L0439: 4, L0776: 3, S0358: 2, H0619: 2, S0222: 2, L0769: 2, L0638: 2, L0796: 2, L0805: 2, |
| | | | | | H0593: 2, L0753: 2, L0485: 2, L0608: 2, H0329: 1, H0351: 1, H0441: 1, H0611: 1, H0370: 1, H0013: 1, H0196: 1, |
| | | | | | H0052: 1, H0251: 1, H0041: 1, H0024: 1, H0622: 1, S0366: 1, H0623: 1, L0648: 1, L0523: 1, L0806: 1, L0788: 1, |
| | | | | | L0666: 1, L0663: 1, H0648: 1, H0539: 1, S0152: 1, L0612: 1, L0777: 1, L0599: 1 and S0242: 1. |
| 102 | HKTAB41 | 695732 | 112 | 172-204 | AR277: 83, AR283: 74, AR219: 65, AR313: 56, AR316: 50, AR089: 49, AR218: 47, AR282: 46, AR104: 45, |
| | | | | | AR055: 42, AR185: 41, AR299: 40, AR096: 35, AR039: 31, AR240: 31, AR060: 26, AR300: 25, |
| | | | | | L0794: 5, H0574: 1 and H0239: 1. |
| 103 | HLDBG17 | 855953 | 113 | 184-309 | AR313: 205, AR096: 153, AR240: 136, AR282: 133, AR219: 128, AR218: 116, AR299: 111, AR316: 101, |
| | | | | | AR277: 94, AR089: 89, AR039: 84, AR300: 83, AR283: 82, AR185: 77, AR060: 59, AR104: 50, AR055: 37, |
| | | | | | L0581: 185, H0509: 97, H0510: 36, H0014: 25, H0355: 18, H0393: 14, L0748: 13, H0574: 12, H0331: 9, H0057: 5, |
| | | | | | H0144: 5, H0015: 3, L0605: 3, H0357: 2, H0427: 2, L0663: 2, L0749: 2, L0756: 2, H0662: 1, H0351: 1, H0349: 1, |
| | | | | | H0047: 1, H0038: 1, L0521: 1, L0518: 1, L0809: 1, L0787: 1, L0438: 1, L0439: 1, L0747: 1, L0759: 1 and S0412: 1. |
| 104 | HLDQU79 | 740755 | 114 | 99-1142 | AR253: 8, AR171: 7, AR245: 6, AR243: 5, AR183: 5, AR263: 5, AR264: 4, AR250: 4, AR269: 4, AR060: 4, |
| | | | | | AR180: 4, AR270: 4, AR309: 4, AR162: 4, AR268: 4, AR161: 4, AR165: 4, AR192: 4, AR176: 4, AR164: 4, |
| | | | | | AR055: 4, AR163: 4, AR213: 4, AR195: 4, AR271: 4, AR166: 3, AR275: 3, AR240: 3, AR282: 3, AR312: 3, |
| | | | | | AR246: 3, AR178: 3, AR181: 3, AR311: 3, AR168: 3, AR289: 3, AR182: 3, AR193: 3, AR217: 3, AR179: 3, |
| | | | | | AR212: 3, AR237: 3, AR238: 3, AR299: 3, AR199: 3, AR252: 3, AR229: 3, AR242: 2, AR185: 2, AR300: 2, |
| | | | | | AR277: 2, AR175: 2, AR293: 2, AR257: 2, AR308: 2, AR177: 2, AR198: 2, AR061: 2, AR214: 2, AR174: 2, |
| | | | | | AR104: 2, AR231: 2, AR316: 2, AR201: 2, AR233: 2, AR230: 2, AR224: 2, AR236: 2, AR239: 2, AR228: 2, |
| | | | | | AR188: 2, AR223: 2, AR189: 2, AR247: 2, AR294: 2, AR226: 2, AR266: 2, AR221: 2, AR285: 2, AR191: 2, |
| | | | | | AR089: 2, AR216: 2, AR200: 2, AR207: 2, AR272: 2, AR232: 2, AR190: 2, AR290: 2, AR283: 2, AR096: 2, |
| | | | | | AR222: 2, AR296: 2, AR039: 2, AR267: 2, AR205: 2, AR211: 1, AR196: 1, AR173: 1, AR033: 1, AR218: 1, |
| | | | | | AR295: 1, AR255: 1, AR262: 1, AR215: 1, AR227: 1, AR254: 1, AR234: 1, AR313: 1, AR203: 1, AR256: 1, |
| | | | | | AR169: 1, AR225: 1, AR210: 1, AR170: 1, |
| | | | | | L0748: 9, L0731: 7, L0771: 6, L0759: 6, H0013: 5, L0764: 4, L0747: 4, L0758: 4, H0265: 3, H0039: 3, H0038: 3, |
| | | | | | L0769: 3, L0766: 3, L0775: 3, H0144: 3, L0755: 3, S0444: 2, S0476: 2, H0318: 2, H0050: 2, L0471: 2, H0266: 2, |
| | | | | | L0374: 2, L0649: 2, L0805: 2, L0663: 2, L0664: 2, H0547: 2, S0126: 2, H0670: 2, L0740: 2, L0754: 2, L0750: 2, |
| | | | | | L0593: 2, H0667: 2, H0170: 1, H0171: 1, H0685: 1, H0662: 1, S0354: 1, S0360: 1, H0580: 1, H0728: 1, H0151: 1, |
| | | | | | H0747: 1, L3388: 1, H0357: 1, H0586: 1, H0331: 1, H0574: 1, H0635: 1, H0575: 1, H0263: 1, H0596: 1, H0545: 1, |
| | | | | | H0012: 1, H0620: 1, H0350: 1, H0355: 1, H0510: 1, H0428: 1, H0604: 1, H0031: 1, H0553: 1, S0366: 1, H0040: 1, |
| | | | | | H0063: 1, H0059: 1, H0560: 1, H0561: 1, S0440: 1, S0422: 1, H0529: 1, L0640: 1, L0637: 1, L0761: 1, L0772: 1, |
| | | | | | L0646: 1, L4556: 1, L0774: 1, L0375: 1, L0653: 1, L0382: 1, L5622: 1, L0793: 1, L4501: 1, H0723: 1, L0352: 1, |
| | | | | | S0152: 1, S0350: 1, H0521: 1, H0696: 1, S0044: 1, H0627: 1, S0027: 1, L0749: 1, L0752: 1, H0595: 1, S0436: 1, |
| | | | | | L0591: 1, L0595: 1, L0361: 1, S0011: 1, S0194: 1, S0276: 1 and H0423: 1. |
| | HLDQU79 | 837599 | 253 | 75-1121 | |
| 105 | HLDRT09 | 830544 | 115 | 522-719 | AR283: 10, AR277: 8, AR104: 8, AR282: 7, AR185: 7, AR039: 7, AR313: 6, AR089: 6, AR316: 6, AR060: 5, |
| | | | | | AR299: 5, AR300: 5, AR096: 5, AR055: 5, AR240: 4, AR219: 4, AR218: 3, |
| | | | | | L0493: 15, L0511: 11, L0500: 7, L0508: 6, L0514: 6, L0510: 6, L0504: 4, L0794: 4, L0499: 4, L0758: 4, L0507: 3, |
| | | | | | L0497: 3, L0439: 3, H0509: 2, L0505: 2, L0502: 2, L0503: 2, L0501: 2, L0509: 2, L0779: 2, H0265: 1, H0717: 1, |
| | | | | | H0656: 1, S0116: 1, H0483: 1, S0360: 1, H0431: 1, H0370: 1, L0015: 1, L0021: 1, H0744: 1, H0510: 1, H0181: 1, |
| | | | | | H0617: 1, H0708: 1, H0040: 1, H0633: 1, L0769: 1, L0639: 1, L3905: 1, L0667: 1, L0521: 1, L0662: 1, L0768: 1, |
| | | | | | L0649: 1, L0803: 1, L0804: 1, L0775: 1, L0515: 1, L0809: 1, L5622: 1, L0789: 1, L0791: 1, L0666: 1, H0144: 1, |
| | | | | | H0682: 1, H0659: 1, H0660: 1, H0672: 1, H0696: 1, L0748: 1, L0750: 1, S0192: 1 and L0697: 1. |
| 106 | HLHAP05 | 638476 | 116 | 45-89 | L0005: 3, H0024: 2, H0209: 1 and H0445: 1. |
| 107 | HLHCS23 | 560663 | 117 | ‘25-129 | AR055: 5, AR060: 4, AR185: 3, AR218: 3, AR240: 3, AR300: 3, AR282: 3, AR299: 2, AR039: 2, AR283: 2, |
| | | | | | AR089: 2, AR219: 2, AR316: 2, AR104: 2, AR096: 1, AR277: 1, |
| | | | | | H0024: 1 |
| 108 | HLIBO72 | 883431 | 118 | 167-550 | AR313: 63, AR241: 58, AR039: 49, AR192: 37, AR218: 35, AR183: 34, AR229: 32, AR096: 31, AR280: 31, |
| | | | | | AR299: 31, AR258: 30, AR219: 28, AR226: 28, AR300: 27, AR177: 27, AR293: 27, AR198: 27, AR240: 26, |
| | | | | | AR312: 26, AR238: 26, AR185: 25, AR275: 24, AR089: 24, AR175: 24, AR247: 23, AR249: 23, AR292: 23, |
| | | | | | AR259: 22, AR314: 21, AR316: 21, AR233: 20, AR243: 20, AR053: 20, AR179: 19, AR052: 18, AR231: 18, |
| | | | | | AR315: 18, AR237: 18, AR294: 18, AR104: 17, AR256: 17, AR265: 17, AR248: 17, AR281: 17, AR234: 17, |
| | | | | | AR213: 16, AR309: 15, AR271: 15, AR277: 15, AR251: 15, AR282: 14, AR033: 14, AR295: 13, AR204: 13, |
| | | | | | AR186: 13, AR244: 13, AR263: 13, AR227: 13, AR253: 12, AR310: 12, AR194: 11, AR267: 11, AR273: 11, |
| | | | | | AR274: 11, AR060: 11, AR269: 10, AR270: 10, AR268: 9, AR232: 8, AR184: 7, AR246: 7, AR206: 7, AR205: 7, |
| | | | | | AR182: 7, AR266: 6, AR290: 6, AR055: 5, AR202: 5, AR296: 4, AR291: 4, AR283: 4, AR289: 3, AR061: 3, |
| | | | | | AR285: 3, AR284: 3, AR298: 3, AR286: 3, |
| | | | | | L0764: 2, L0662: 2, L0748: 2, L0731: 2, L0758: 2, S0212: 1, S0442: 1, S0376: 1, S0444: 1, S0360: 1, T0039: 1, |
| | | | | | H0545: 1, H0355: 1, S0214: 1, H0553: 1, L0055: 1, H0090: 1, H0551: 1, H0412: 1, H0413: 1, H0494: 1, S0438: 1, |
| | | | | | H0509: 1, H0652: 1, S0142: 1, L0772: 1, L0767: 1, L0794: 1, L0803: 1, L0659: 1, L0383: 1, L0545: 1, L0664: 1, |
| | | | | | H0682: 1, H0670: 1, S0380: 1, H0521: 1, H0522: 1, H0436: 1, S3014: 1, S0027: 1, L0754: 1, L0752: 1, S0434: 1, |
| | | | | | L0593: 1, H0653: 1, H0665: 1 and S0196: 1. |
| 109 | HLICE88 | 840321 | 119 | 708-716 | AR185: 21, AR240: 19, AR104: 13, AR039: 13, AR060: 13, AR089: 13, AR300: 12, AR282: 11, AR096: 11, |
| | | | | | AR055: 10, AR316: 10, AR219: 10, AR218: 9, AR299: 7, AR283: 7, AR313: 7, AR277: 4, |
| | | | | | H0014: 72, L3388: 60, H0509: 49, L0581: 44, H0355: 43, H0574: 32, H0393: 30, H0632: 21, H0510: 18, S0438: 18, |
| | | | | | H0098: 15, H0144: 14, H0331: 13, H0015: 8, L0748: 8, H0722: 7, L3387: 7, H0741: 5, H0013: 5, H0147: 4, T0078: 4, |
| | | | | | L0615: 3, H0357: 3, S0440: 3, H0730: 2, H0349: 2, H0350: 2, H0057: 2, H0644: 2, H0647: 2, L0605: 2, L0599: 2, |
| | | | | | H0170: 1, L0448: 1, H0149: 1, L0393: 1, S0444: 1, L3645: 1, H0749: 1, L2255: 1, H0351: 1, H0642: 1, H0427: 1, |
| | | | | | H0003: 1, H0575: 1, H0199: 1, H0040: 1, H0745: 1, L0787: 1, L0747: 1 and S0436: 1. |
| 110 | HLICO10 | 658740 | 120 | 441-659 | AR096: 23, AR313: 20, AR299: 19, AR219: 19, AR089: 17, AR240: 17, AR218: 16, AR316: 15, AR060: 13, |
| | | | | | AR282: 12, AR039: 11, AR185: 11, AR104: 10, AR283: 9, AR277: 9, AR300: 7, AR055: 7, |
| | | | | | L0766: 9, L0758: 8, L0747: 7, L0749: 7, L0771: 6, L0776: 6, L0439: 6, L0748: 5, L0596: 5, L0770: 4, L0740: 4, |
| | | | | | H0622: 3, L0483: 3, L0662: 3, L0666: 3, S0418: 2, S0376: 2, S0360: 2, S0408: 2, H0747: 2, H0251: 2, L0646: 2, |
| | | | | | L0764: 2, L0768: 2, L0774: 2, L0806: 2, L0517: 2, L0663: 2, L0664: 2, L0744: 2, L0750: 2, L0756: 2, L0752: 2, |
| | | | | | L0731: 2, L0757: 2, L0759: 2, H0265: 1, L3643: 1, L0002: 1, L0785: 1, S0001: 1, H0661: 1, H0662: 1, S0420: 1, |
| | | | | | S0354: 1, S0222: 1, H0333: 1, H0635: 1, H0156: 1, H0002: 1, H0042: 1, H0575: 1, L0105: 1, H0374: 1, H0052: 1, |
| | | | | | H0085: 1, L0471: 1, T0010: 1, H0355: 1, H0060: 1, T0006: 1, H0111: 1, H0561: 1, S0440: 1, S0142: 1, L0763: 1, |
| | | | | | L0769: 1, L4747: 1, L0796: 1, L5565: 1, L0761: 1, L0372: 1, L0377: 1, L0381: 1, L0375: 1, L0655: 1, L0657: 1, |
| | | | | | L0793: 1, L0532: 1, L0665: 1, L0438: 1, H0519: 1, H0690: 1, S0330: 1, S0380: 1, S0152: 1, S0406: 1, H0555: 1, |
| | | | | | L0754: 1, L0745: 1, L0755: 1, H0444: 1, S0434: 1, S0436: 1, L0599: 1, L0362: 1, L0601: 1, H0543: 1 and L0600: 1. |
| 111 | HLJBS28 | 658742 | 121 | 359-412 | AR313: 15, AR316: 9, AR096: 9, AR218: 7, AR299: 7, AR039: 7, AR300: 7, AR089: 5, AR219: 5, AR282: 5, |
| | | | | | AR055: 5, AR104: 4, AR185: 4, AR277: 4, AR060: 3, AR283: 2, |
| | | | | | L0766: 8, L0803: 3, H0659: 3, L0758: 3, L0598: 2, L0649: 2, L0805: 2, L0655: 2, L0731: 2, L0759: 2, S0342: 1, |
| | | | | | H0657: 1, L3388: 1, L0021: 1, H0375: 1, H0615: 1, H0428: 1, L0638: 1, L0637: 1, L0651: 1, L0659: 1, L0791: 1, |
| | | | | | H0648: 1, S0328: 1, H0752: 1, L0744: 1, L0747: 1, L0756: 1, L0752: 1, H0423: 1 and H0422: 1. |
| 112 | HLMJB64 | 658699 | 122 | 12-161 | H0521: 11, L0751: 9, L0777: 9, H0255: 8, L0747: 8, S0360: 7, L0766: 7, H0542: 7, L0754: 6, L0749: 6, L0757: 6, |
| | | | | | H0265: 5, H0052: 5, L0659: 5, L0665: 5, S0126: 5, H0539: 5, L0748: 5, L0439: 5, L0740: 5, L0758: 5, L0759: 5, |
| | | | | | H0624: 4, H0717: 4, H0046: 4, H0024: 4, H0551: 4, L0776: 4, L0438: 4, L0602: 4, L0743: 4, L0779: 4, H0575: 3, |
| | | | | | H0253: 3, H0545: 3, H0266: 3, H0284: 3, H0039: 3, H0068: 3, H0509: 3, L0770: 3, L0769: 3, L0662: 3, L0774: 3, |
| | | | | | L0809: 3, L0666: 3, L0663: 3, H0435: 3, H0672: 3, H0522: 3, S0406: 3, S0028: 3, L0752: 3, L0731: 3, H0543: 3, |
| | | | | | H0171: 2, H0556: 2, H0716: 2, S0212: 2, H0638: 2, S0376: 2, H0586: 2, H0333: 2, L0021: 2, H0599: 2, H0036: 2, |
| | | | | | H0618: 2, H0581: 2, H0050: 2, L0163: 2, H0644: 2, H0040: 2, H0087: 2, S0038: 2, H0494: 2, S0144: 2, S0002: 2, |
| | | | | | L0369: 2, L0763: 2, L0637: 2, L0800: 2, L0773: 2, L0803: 2, L0375: 2, L0806: 2, L0655: 2, L0657: 2, H0144: 2, |
| | | | | | L0565: 2, H0689: 2, H0660: 2, H0436: 2, L0750: 2, S0436: 2, L0596: 2, L0589: 2, L0485: 2, L0604: 2, S0192: 2, |
| | | | | | S0242: 2, L0718: 2, S0040: 1, H0713: 1, S0134: 1, S0430: 1, H0341: 1, H0483: 1, H0671: 1, S0418: 1, S0420: 1, |
| | | | | | L0005: 1, S0442: 1, S0354: 1, S0358: 1, H0637: 1, S0045: 1, S0046: 1, S0140: 1, S0132: 1, S0476: 1, H0645: 1, |
| | | | | | H0351: 1, H0549: 1, H0550: 1, S0222: 1, H0441: 1, H0370: 1, L0468: 1, H0592: 1, H0587: 1, H0497: 1, H0559: 1, |
| | | | | | L0622: 1, T0114: 1, H0013: 1, H0069: 1, H0635: 1, H0427: 1, H0097: 1, H0042: 1, T0082: 1, H0318: 1, H0546: 1, |
| | | | | | H0123: 1, L0471: 1, H0620: 1, H0014: 1, H0051: 1, H0201: 1, S0051: 1, H0510: 1, H0286: 1, H0428: 1, T0006: 1, |
| | | | | | H0424: 1, H0628: 1, H0606: 1, H0673: 1, H0124: 1, H0038: 1, H0634: 1, H0063: 1, H0379: 1, H0272: 1, H0488: 1, |
| | | | | | H0412: 1, H0413: 1, S0382: 1, S0438: 1, S0142: 1, S0344: 1, S0210: 1, S0426: 1, L0506: 1, L0639: 1, L0761: 1, |
| | | | | | L0772: 1, L0646: 1, L0643: 1, L0644: 1, L0771: 1, L0648: 1, L0521: 1, L0794: 1, L0649: 1, L0775: 1, L0651: 1, |
| | | | | | L0378: 1, L0805: 1, L0807: 1, L0518: 1, L0783: 1, L0791: 1, L0664: 1, S0052: 1, S0216: 1, H0702: 1, H0701: 1, |
| | | | | | S0374: 1, H0520: 1, H0682: 1, H0683: 1, H0658: 1, H0670: 1, H0666: 1, S0328: 1, S0380: 1, S0404: 1, H0555: 1, |
| | | | | | H0576: 1, H0627: 1, L0612: 1, S3012: 1, S0037: 1, L0780: 1, S0031: 1, H0444: 1, H0445: 1, S0434: 1, L0588: 1, |
| | | | | | L0593: 1, S0011: 1, S0026: 1, H0667: 1, S0194: 1, S0196: 1, H0423: 1, H0422: 1, S0042: 1 and H0506: 1. |
| 113 | HLWAV47 | 897769 | 123 | 200-298 | AR277: 35, AR283: 29, AR282: 27, AR316: 23, AR313: 20, AR219: 19, AR089: 18, AR104: 17, AR240: 17, |
| | | | | | AR299: 16, AR055: 16, AR218: 16, AR300: 16, AR185: 15, AR096: 15, AR039: 11, AR060: 10, |
| | | | | | L0754: 7, L0803: 4, H0553: 3, H0478: 2, L0745: 2, L0753: 2, H0170: 1, H0057: 1, L0163: 1, S6028: 1, L0598: 1, |
| | | | | | L0666: 1, L0663: 1 and H0144: 1. |
| 114 | HLYDF73 | 566869 | 124 | 363-434 | AR277: 12, AR283: 9, AR282: 6, AR316: 6, AR300: 5, AR055: 5, AR089: 5, AR104: 4, AR299: 4, AR185: 4, |
| | | | | | AR096: 4, AR218: 4, AR313: 4, AR240: 4, AR039: 3, AR219: 3, AR060: 2, |
| | | | | | H0445: 1 |
| 115 | HLYGE16 | 651339 | 125 | 406-627 | AR055: 2, AR185: 2, AR316: 1, AR060: 1, AR283: 1, |
| | | | | | H0255: 5, H0144: 3, H0429: 2, L0662: 2, L0794: 2, L0803: 2, L0809: 2, L0758: 2, L0599: 2, H0542: 2, S0040: 1, |
| | | | | | H0650: 1, S0442: 1, H0642: 1, L0157: 1, H0571: 1, H0673: 1, H0494: 1, L0771: 1, L0766: 1, L0776: 1, L0629: 1, |
| | | | | | L0657: 1, L0659: 1, L0792: 1, L0565: 1, H0345: 1, L0748: 1, L0754: 1, L0747: 1, L0749: 1, H0445: 1 and S0242: 1. |
| 116 | HLYGY91 | 658703 | 126 | 211-339 | AR313: 6, AR316: 5, AR218: 3, AR300: 3, AR299: 3, AR055: 3, AR185: 2, AR039: 2, AR096: 2, AR277: 2, |
| | | | | | AR219: 1, AR089: 1, |
| | | | | | H0692: 10, L0777: 10, L0805: 5, L0803: 3, L2497: 2, H0328: 2, L0662: 2, L0794: 2, L0809: 2, L3832: 2, L0748: 2, |
| | | | | | L0752: 2, L0599: 2, H0170: 1, H0402: 1, S0444: 1, S0360: 1, H0747: 1, L2486: 1, L3503: 1, H0427: 1, H0644: 1, |
| | | | | | H0038: 1, L0800: 1, L0648: 1, L0804: 1, H0670: 1, H0478: 1, L0731: 1, L0758: 1, H0445: 1, S0434: 1, L0591: 1 and |
| | | | | | L0362: 1. |
| 117 | HMCFH60 | 654853 | 127 | 211-357 | AR104: 113, AR219: 90, AR218: 87, AR089: 82, AR283: 79, AR277: 79, AR313: 78, AR055: 75, AR240: 71, |
| | | | | | AR316: 70, AR185: 63, AR282: 60, AR299: 59, AR096: 54, AR039: 50, AR060: 48, AR300: 38, |
| | | | | | L0659: 10, T0040: 9, L0665: 9, L0759: 9, L0519: 8, L0776: 7, S0436: 7, L0744: 6, L0747: 6, L0749: 6, L0758: 6, |
| | | | | | S0418: 5, H0052: 5, H0457: 5, H0150: 5, L0769: 5, L0766: 5, L0748: 5, H0265: 4, S0420: 4, S0356: 4, S0360: 4, |
| | | | | | S0046: 4, S0010: 4, H0545: 4, H0687: 4, H0494: 4, S0440: 4, L0662: 4, L0768: 4, L0774: 4, L0775: 4, L0751: 4, |
| | | | | | L0754: 4, L0779: 4, H0484: 3, H0734: 3, H0549: 3, H0599: 3, H0421: 3, H0620: 3, S0051: 3, L0764: 3, L0666: 3, |
| | | | | | H0435: 3, H0648: 3, H0539: 3, L0596: 3, H0543: 3, H0624: 2, H0171: 2, H0556: 2, H0295: 2, H0657: 2, H0656: 2, |
| | | | | | S0354: 2, S0358: 2, S0376: 2, S0408: 2, S0007: 2, S0132: 2, S0476: 2, S0222: 2, H0486: 2, T0039: 2, H0635: 2, |
| | | | | | H0156: 2, H0618: 2, T0048: 2, H0581: 2, H0544: 2, H0373: 2, H0428: 2, T0006: 2, H0604: 2, H0031: 2, H0551: 2, |
| | | | | | T0067: 2, H0264: 2, H0647: 2, S0344: 2, L0638: 2, L0372: 2, L0641: 2, L0806: 2, L0653: 2, L0527: 2, L0809: 2, |
| | | | | | L0565: 2, L0438: 2, H0519: 2, H0689: 2, H0658: 2, H0672: 2, S0330: 2, S0406: 2, H0436: 2, S0027: 2, L0750: 2, |
| | | | | | S0434: 2, L0605: 2, S0194: 2, H0506: 2, H0685: 1, H0713: 1, H0717: 1, H0740: 1, H0294: 1, S0212: 1, S0110: 1, |
| | | | | | S0282: 1, H0483: 1, S0442: 1, H0637: 1, H0733: 1, S0468: 1, H0747: 1, L3388: 1, H0351: 1, H0550: 1, H0587: 1, |
| | | | | | H0642: 1, H0559: 1, L0622: 1, L3653: 1, H0013: 1, H0250: 1, H0069: 1, S0280: 1, H0706: 1, S0346: 1, H0705: 1, |
| | | | | | H0318: 1, S0049: 1, H0748: 1, L0040: 1, H0597: 1, L0738: 1, H0009: 1, H0563: 1, H0123: 1, H0050: 1, L0471: 1, |
| | | | | | H0012: 1, H0024: 1, H0014: 1, S0388: 1, H0239: 1, H0594: 1, S6028: 1, H0271: 1, H0292: 1, H0213: 1, H0628: 1, |
| | | | | | H0673: 1, H0068: 1, S0036: 1, H0135: 1, H0090: 1, H0038: 1, H0634: 1, H0087: 1, H0488: 1, H0268: 1, H0412: 1, |
| | | | | | H0413: 1, S0038: 1, T0042: 1, H0560: 1, H0641: 1, S0210: 1, S0422: 1, S0002: 1, H0529: 1, L0770: 1, L0637: 1, |
| | | | | | L3905: 1, L5566: 1, L0761: 1, L0772: 1, L0646: 1, L0374: 1, L0771: 1, L4500: 1, L0651: 1, L0784: 1, L0807: 1, |
| | | | | | L0657: 1, L0658: 1, L0656: 1, L0782: 1, L0783: 1, L0530: 1, L0647: 1, L0788: 1, L0663: 1, L0664: 1, S0216: 1, |
| | | | | | H0693: 1, L3826: 1, H0520: 1, H0547: 1, S0126: 1, H0682: 1, H0659: 1, S0328: 1, S0380: 1, H0710: 1, H0521: 1, |
| | | | | | H0522: 1, H0627: 1, S0028: 1, L0741: 1, L0742: 1, L0439: 1, L0740: 1, L0756: 1, L0786: 1, L0780: 1, L0755: 1, |
| | | | | | L0581: 1, L0595: 1, L0601: 1, H0667: 1, S0192: 1, H0542: 1, L0718: 1 and S0424: 1. |
| 118 | HMDAB29 | 584789 | 128 | 97-177 | AR313: 127, AR039: 86, AR299: 64, AR089: 56, AR185: 51, AR096: 50, AR277: 50, AR300: 42, AR316: 37, |
| | | | | | AR240: 33, AR218: 27, AR219: 25, AR104: 22, AR060: 22, AR282: 20, AR055: 16, AR283: 9, |
| | | | | | H0346: 1, H0598: 1 and S0330: 1. |
| 119 | HMDAD44 | 566854 | 129 | 135-161 | AR277: 44, AR283: 35, AR219: 28, AR316: 26, AR089: 24, AR218: 23, AR313: 22, AR282: 22, AR055: 22, |
| | | | | | AR104: 21, AR299: 20, AR185: 19, AR240: 19, AR096: 17, AR039: 16, AR060: 14, AR300: 14, |
| | | | | | L0749: 3, H0346: 1, H0370: 1, H0427: 1 and L0439: 1. |
| 120 | HMEDI90 | 840077 | 130 | 622-675 | AR104: 7, AR316: 6, AR055: 5, AR060: 5, AR300: 4, AR185: 4, AR218: 4, AR282: 3, AR283: 3, AR240: 3, |
| | | | | | AR089: 3, AR219: 2, AR299: 2, AR039: 1, AR313: 1, AR096: 1, AR277: 1, |
| | | | | | L0439: 8, S6028: 2, H0266: 2, L0438: 2, L0745: 2, L0717: 1, S0222: 1, H0052: 1, H0194: 1, H0009: 1, T0010: 1, |
| | | | | | S0036: 1, L0776: 1, L0789: 1, S0028: 1, L0756: 1 and L0779: 1. |
| 121 | HMIAK10 | 562774 | 131 | 195-290 | AR055: 7, AR218: 7, AR060: 6, AR219: 6, AR185: 4, AR283: 4, AR240: 4, AR300: 4, AR104: 3, AR089: 3, |
| | | | | | AR299: 3, AR039: 3, AR316: 2, AR277: 2, AR096: 2, AR313: 2, AR282: 2, |
| | | | | | S6028: 1 |
| 122 | HMIBF07 | 603528 | 132 | 229-249 | AR055: 5, AR060: 4, AR240: 4, AR300: 3, AR299: 3, AR104: 3, AR283: 3, AR219: 2, AR218: 2, AR185: 2, |
| | | | | | AR039: 2, AR089: 2, AR277: 2, AR096: 2, AR316: 2, AR282: 1, AR313: 1, |
| | | | | | S6028: 1 |
| 123 | HMICI80 | 827318 | 133 | 1149-1247 | AR104: 21, AR316: 11, AR055: 6, AR060: 6, AR282: 5, AR218: 5, AR299: 4, AR185: 4, AR300: 4, AR240: 3, |
| | | | | | AR089: 3, AR039: 3, AR283: 3, AR096: 2, AR313: 2, AR277: 2, AR219: 1, |
| | | | | | L0439: 17, H0569: 3, L0438: 3, L0415: 2, H0156: 2, S0049: 2, H0052: 2, S0388: 2, L0805: 2, L0809: 2, L0748: 2, |
| | | | | | L0777: 2, L0592: 2, S0045: 1, S0222: 1, S0346: 1, H0563: 1, S0051: 1, S6028: 1, S0036: 1, L0789: 1, L0756: 1 and |
| | | | | | L0755: 1. |
| 124 | HMJAK70 | 610099 | 134 | 273-305 | AR251: 4, AR052: 3, AR263: 3, AR269: 3, AR265: 2, AR282: 2, AR253: 2, AR309: 2, AR238: 2, AR271: 2, |
| | | | | | AR186: 2, AR247: 2, AR270: 2, AR266: 1, AR277: 1, AR312: 1, AR053: 1, AR295: 1, AR241: 1, AR237: 1, |
| | | | | | AR310: 1, AR213: 1, AR182: 1, AR175: 1, AR313: 1, AR268: 1, AR226: 1, AR096: 1, |
| | | | | | H0391: 1 |
| 125 | HMTAB77 | 847411 | 135 | 769-915 | AR297: 10, AR287: 9, AR288: 9, AR225: 9, AR291: 7, AR171: 5, AR221: 5, AR296: 5, AR285: 5, AR255: 5, |
| | | | | | AR193: 4, AR178: 4, AR294: 4, AR168: 4, AR169: 4, AR217: 4, AR295: 4, AR170: 4, AR235: 4, AR224: 4, |
| | | | | | AR223: 4, AR216: 4, AR180: 4, AR261: 4, AR245: 4, AR293: 3, AR222: 3, AR308: 3, AR262: 3, AR243: 3, |
| | | | | | AR289: 3, AR257: 3, AR195: 3, AR270: 3, AR253: 3, AR162: 3, AR163: 3, AR205: 3, AR286: 3, AR161: 3, |
| | | | | | AR173: 3, AR290: 3, AR184: 3, AR254: 3, AR165: 3, AR192: 3, AR236: 3, AR172: 3, AR164: 3, AR179: 2, |
| | | | | | AR269: 2, AR181: 2, AR183: 2, AR166: 2, AR267: 2, AR260: 2, AR190: 2, AR312: 2, AR201: 2, AR175: 2, |
| | | | | | AR258: 2, AR039: 2, AR212: 2, AR247: 2, AR096: 2, AR174: 2, AR282: 2, AR292: 2, AR191: 2, AR268: 2, |
| | | | | | AR189: 2, AR266: 2, AR313: 2, AR316: 1, AR089: 1, AR213: 1, AR264: 1, AR277: 1, AR219: 1, AR060: 1, |
| | | | | | AR299: 1, AR263: 1, AR188: 1, AR182: 1, AR200: 1, AR300: 1, AR196: 1, AR226: 1, AR240: 1, AR210: 1, |
| | | | | | AR177: 1, AR234: 1, |
| | | | | | H0436: 65, L0747: 25, H0521: 12, L0754: 11, L0471: 7, L0439: 7, S0358: 6, S0360: 5, L0809: 5, H0520: 5, L0731: 5, |
| | | | | | L0757: 5, L0599: 5, H0580: 4, H0581: 4, S0003: 4, H0551: 4, S0440: 4, L0803: 4, L0775: 4, L0517: 4, H0547: 4, |
| | | | | | H0519: 4, H0539: 4, L0750: 4, S0436: 4, H0624: 3, H0717: 3, L3001: 3, L2491: 3, H0575: 3, S0474: 3, H0373: 3, |
| | | | | | H0428: 3, H0090: 3, H0616: 3, H0529: 3, L2654: 3, H0144: 3, H0518: 3, L0744: 3, L0752: 3, L0758: 3, S0192: 3, |
| | | | | | H0171: 2, H0716: 2, S0001: 2, H0669: 2, S0418: 2, S0420: 2, L0562: 2, S0356: 2, S0442: 2, S0354: 2, S0444: 2, |
| | | | | | H0393: 2, S0222: 2, H0592: 2, H0586: 2, H0333: 2, L3816: 2, T0040: 2, H0156: 2, S0049: 2, H0052: 2, H0046: 2, |
| | | | | | H0457: 2, H0687: 2, L0455: 2, H0040: 2, H0412: 2, H0560: 2, S0208: 2, S0422: 2, L0520: 2, L0770: 2, L0769: 2, |
| | | | | | L3905: 2, L0764: 2, L0648: 2, L0662: 2, L0794: 2, L0805: 2, L0518: 2, L0783: 2, L0789: 2, L2264: 2, L2675: 2, |
| | | | | | L3829: 2, H0658: 2, S0152: 2, S0406: 2, H0555: 2, L0748: 2, L0740: 2, L0759: 2, H0445: 2, S0434: 2, L0362: 2, |
| | | | | | S0026: 2, S0194: 2, H0542: 2, H0543: 2, S0424: 2, H0352: 2, H0149: 1, S0040: 1, H0583: 1, L0453: 1, L3814: 1, |
| | | | | | L2910: 1, H0341: 1, S0212: 1, H0671: 1, H0663: 1, L2289: 1, L3659: 1, H0638: 1, L0005: 1, H0735: 1, S0045: 1, |
| | | | | | H0749: 1, H0619: 1, H0411: 1, H0175: 1, H0369: 1, H0431: 1, H0392: 1, H0455: 1, H0612: 1, H0587: 1, H0331: 1, |
| | | | | | L0622: 1, H0486: 1, H0635: 1, H0599: 1, H0098: 1, S0010: 1, H0318: 1, H0310: 1, H0263: 1, T0110: 1, H0545: 1, |
| | | | | | N0006: 1, H0123: 1, H0050: 1, H0011: 1, H0620: 1, L0163: 1, T0010: 1, H0083: 1, H0375: 1, S6028: 1, H0028: 1, |
| | | | | | S0250: 1, S0214: 1, H0328: 1, H0039: 1, H0031: 1, H0553: 1, H0124: 1, H0598: 1, S0036: 1, H0038: 1, H0063: 1, |
| | | | | | T0067: 1, H0264: 1, H0413: 1, H0623: 1, S0038: 1, H0100: 1, L0564: 1, T0042: 1, H0494: 1, H0625: 1, H0561: 1, |
| | | | | | S0150: 1, L0598: 1, L0763: 1, L0761: 1, L0667: 1, L0641: 1, L0650: 1, L0375: 1, L0523: 1, L0654: 1, L0776: 1, |
| | | | | | L0807: 1, L0647: 1, L0792: 1, L0793: 1, L0666: 1, L0664: 1, L0665: 1, L2657: 1, L2260: 1, H0699: 1, L2439: 1, |
| | | | | | S0374: 1, L0438: 1, L3827: 1, L3210: 1, H0689: 1, H0435: 1, H0659: 1, H0670: 1, H0660: 1, L0602: 1, L3832: 1, |
| | | | | | H0627: 1, S0037: 1, S0027: 1, L3327: 1, L0743: 1, L0749: 1, L0779: 1, L2138: 1, H0595: 1, L0605: 1, L0485: 1, |
| | | | | | L0604: 1, L0593: 1, L0594: 1, S0196: 1, S0412: 1, L3566: 1 and L3378: 1. |
| 126 | HMUAE26 | 747403 | 136 | 710-802 | AR277: 29, AR283: 26, AR282: 19, AR316: 17, AR240: 16, AR219: 15, AR313: 14, AR300: 14, AR089: 14, |
| | | | | | AR096: 13, AR218: 13, AR104: 13, AR299: 13, AR185: 11, AR055: 11, AR039: 10, AR060: 9, |
| | | | | | S0406: 5, H0305: 3, S0422: 3, L0743: 3, H0617: 2, L0770: 2, L0794: 2, L0384: 2, L0666: 2, L0777: 2, L0591: 2, |
| | | | | | L0595: 2, H0556: 1, H0717: 1, S0418: 1, S0358: 1, S0410: 1, H0734: 1, S0045: 1, H0497: 1, H0493: 1, H0618: 1, |
| | | | | | H0318: 1, H0581: 1, H0012: 1, H0620: 1, H0014: 1, T0010: 1, H0292: 1, S0250: 1, H0615: 1, H0428: 1, H0087: 1, |
| | | | | | H0551: 1, L0351: 1, H0560: 1, H0132: 1, H0529: 1, L5565: 1, L3905: 1, L0761: 1, L0644: 1, L0375: 1, L0524: 1, |
| | | | | | L0653: 1, L0655: 1, L0656: 1, L0809: 1, L0791: 1, H0520: 1, H0547: 1, H0690: 1, H0682: 1, H0670: 1, H0672: 1, |
| | | | | | S0404: 1, H0555: 1, L0749: 1, L0779: 1, L0780: 1, L0731: 1, H0445: 1, H0653: 1, S0192: 1 and H0542: 1. |
| 127 | HMUAN45 | 833072 | 137 | 239-922 | AR236: 442, AR228: 429, AR211: 336, AR230: 331, AR287: 325, AR191: 311, AR239: 297, AR174: 289, |
| | | | | | AR233: 252, AR232: 252, AR190: 238, AR288: 237, AR176: 228, AR203: 222, AR262: 218, AR260: 210, |
| | | | | | AR199: 209, AR181: 193, AR173: 191, AR163: 186, AR178: 181, AR200: 175, AR162: 165, AR189: 164, |
| | | | | | AR297: 164, AR166: 154, AR161: 154, AR164: 149, AR188: 148, AR227: 147, AR234: 145, AR261: 144, |
| | | | | | AR311: 142, AR257: 141, AR210: 140, AR179: 139, AR165: 137, AR272: 136, AR295: 134, AR226: 134, |
| | | | | | AR255: 130, AR231: 129, AR180: 129, AR285: 127, AR196: 127, AR308: 126, AR275: 123, AR286: 123, |
| | | | | | AR177: 118, AR238: 117, AR258: 116, AR235: 114, AR237: 104, AR294: 100, AR175: 99, AR264: 98, AR182: 96, |
| | | | | | AR212: 96, AR293: 93, AR185: 92, AR291: 90, AR267: 79, AR229: 78, AR061: 75, AR240: 74, AR060: 74, |
| | | | | | AR256: 73, AR269: 65, AR104: 64, AR247: 63, AR274: 60, AR201: 60, AR300: 59, AR033: 56, AR263: 53, |
| | | | | | AR289: 51, AR183: 49, AR193: 48, AR290: 43, AR195: 41, AR316: 40, AR270: 40, AR296: 37, AR282: 36, |
| | | | | | AR312: 34, AR197: 33, AR218: 33, AR277: 29, AR299: 29, AR055: 28, AR089: 28, AR250: 27, AR268: 27, |
| | | | | | AR207: 26, AR309: 25, AR053: 25, AR252: 24, AR266: 21, AR213: 20, AR242: 19, AR224: 19, AR219: 19, |
| | | | | | AR313: 18, AR223: 18, AR169: 18, AR222: 17, AR171: 17, AR168: 16, AR172: 16, AR205: 15, AR217: 14, |
| | | | | | AR096: 14, AR245: 14, AR214: 14, AR204: 12, AR225: 12, AR170: 11, AR246: 11, AR254: 11, AR198: 11, |
| | | | | | AR283: 10, AR192: 10, AR216: 10, AR271: 9, AR253: 9, AR215: 8, AR221: 7, AR039: 5, AR243: 4, AR184: 1, |
| | | | | | AR310: 1, |
| | | | | | H0271: 5, H0083: 3, L0794: 3, H0656: 2, H0457: 2, H0179: 2, L0791: 2, H0521: 2, L0744: 2, H0707: 2, H0265: 1, |
| | | | | | H0556: 1, H0657: 1, H0449: 1, H0580: 1, S0046: 1, H0411: 1, H0437: 1, H0333: 1, H0486: 1, H0250: 1, S6028: 1, |
| | | | | | H0615: 1, H0628: 1, L0055: 1, H0040: 1, H0634: 1, S0144: 1, H0529: 1, L0769: 1, L0768: 1, L0766: 1, L0803: 1, |
| | | | | | L0653: 1, L0793: 1, L0666: 1, S0052: 1, H0689: 1, H0522: 1, H0436: 1, L0743: 1, L0749: 1, L0779: 1, H0445: 1 and |
| | | | | | H0542: 1. |
| 128 | HMVBC31 | 825598 | 138 | 1437-1559 | AR055: 5, AR316: 4, AR218: 3, AR282: 3, AR104: 2, AR283: 2, AR185: 2, AR096: 2, AR313: 2, AR240: 2, |
| | | | | | AR060: 2, AR300: 2, AR299: 1, AR277: 1, AR089: 1, AR039: 1, |
| | | | | | L0748: 10, H0556: 5, S0442: 5, L0438: 4, L0439: 4, L0754: 4, H0050: 3, H0040: 3, L0769: 3, L0806: 3, L0757: 3, |
| | | | | | L0759: 3, L0601: 3, T0002: 2, S0418: 2, S0358: 2, S0360: 2, H0580: 2, S0476: 2, H0549: 2, H0644: 2, H0529: 2, |
| | | | | | L0773: 2, L0768: 2, L0766: 2, L0805: 2, L0776: 2, L0663: 2, L0740: 2, L0747: 2, L0749: 2, S0436: 2, H0717: 1, |
| | | | | | S0212: 1, H0484: 1, H0661: 1, S0376: 1, H0729: 1, H0733: 1, S0007: 1, H0643: 1, L0622: 1, L3653: 1, H0013: 1, |
| | | | | | H0042: 1, H0052: 1, L0157: 1, L0471: 1, H0373: 1, H0083: 1, H0266: 1, T0006: 1, H0090: 1, H0268: 1, H0494: 1, |
| | | | | | H0509: 1, H0633: 1, H0646: 1, S0422: 1, S0002: 1, L0761: 1, L0772: 1, L0643: 1, L0644: 1, L0794: 1, L0803: 1, |
| | | | | | L0555: 1, L0659: 1, L0783: 1, L0809: 1, L5622: 1, H0690: 1, H0658: 1, S0328: 1, S0330: 1, S0152: 1, H0521: 1, |
| | | | | | H0696: 1, S0044: 1, S0027: 1, L0780: 1, L0752: 1, L0753: 1, L0755: 1, S0434: 1, L0485: 1, H0667: 1, S0276: 1 and |
| | | | | | S0456: 1. |
| 129 | HMWBL03 | 822861 | 139 | 137-1327 | AR313: 27, AR299: 16, AR219: 16, AR218: 14, AR316: 12, AR300: 6, AR039: 5, AR089: 5, AR055: 5, AR060: 4, |
| | | | | | AR240: 4, AR096: 4, AR282: 4, AR283: 3, AR277: 3, AR185: 3, AR104: 2, |
| | | | | | S0422: 18, L0766: 7, H0341: 5, S0356: 5, H0543: 5, H0591: 4, H0656: 3, S0354: 3, H0013: 3, T0042: 3, H0659: 3, |
| | | | | | L0748: 3, L0750: 3, L0777: 3, S0418: 2, S0442: 2, S0444: 2, S0410: 2, L0471: 2, H0040: 2, H0063: 2, H0494: 2, |
| | | | | | L0646: 2, L0626: 2, L0806: 2, L0655: 2, L0663: 2, S0374: 2, H0547: 2, S0206: 2, L0756: 2, S0436: 2, L0588: 2, |
| | | | | | H0624: 1, H0171: 1, S0342: 1, H0650: 1, S0360: 1, T0008: 1, H0733: 1, S0046: 1, H0257: 1, H0263: 1, L0738: 1, |
| | | | | | H0046: 1, L0157: 1, H0039: 1, H0068: 1, H0135: 1, H0090: 1, T0041: 1, H0560: 1, S0440: 1, H0529: 1, L0640: 1, |
| | | | | | L0771: 1, L0768: 1, L0634: 1, L0529: 1, L5623: 1, L0666: 1, L0665: 1, H0520: 1, H0519: 1, S0328: 1, S0152: 1, |
| | | | | | S0406: 1, L0751: 1, L0747: 1, L0759: 1, L0591: 1, L0608: 1, H0542: 1, H0423: 1 and H0721: 1. |
| 130 | HMWCG28 | 847413 | 140 | 78-200 | L0439: 19, L0740: 16, L0748: 15, L0766: 12, H0052: 7, L0761: 7, L0741: 7, L0747: 7, H0135: 6, L0769: 6, L0438: 6, |
| | | | | | S0036: 4, L0770: 4, L0806: 4, L0752: 4, L0731: 4, H0327: 3, H0012: 3, T0010: 3, L0794: 3, L0803: 3, L0783: 3, |
| | | | | | L0809: 3, L0744: 3, L0758: 3, L0601: 3, H0341: 2, H0550: 2, H0333: 2, L0622: 2, H0599: 2, H0618: 2, H0318: 2, |
| | | | | | H0051: 2, S0388: 2, S0051: 2, H0100: 2, L0772: 2, L0774: 2, L0664: 2, S0380: 2, L0751: 2, L0745: 2, L0779: 2, |
| | | | | | L0777: 2, L0753: 2, L0485: 2, H0265: 1, H0381: 1, H0483: 1, S0418: 1, S0354: 1, S0444: 1, S0360: 1, S0046: 1, |
| | | | | | S0278: 1, H0261: 1, H0455: 1, H0438: 1, H0574: 1, H0559: 1, L0623: 1, H0706: 1, T0048: 1, H0581: 1, H0251: 1, |
| | | | | | H0597: 1, H0544: 1, H0046: 1, H0457: 1, H0009: 1, H0081: 1, H0620: 1, H0200: 1, H0095: 1, H0275: 1, H0083: 1, |
| | | | | | H0354: 1, H0266: 1, H0328: 1, H0428: 1, H0070: 1, T0023: 1, H0673: 1, H0124: 1, H0038: 1, H0087: 1, L0351: 1, |
| | | | | | L0564: 1, H0560: 1, H0130: 1, S0344: 1, L0369: 1, L0763: 1, L0637: 1, L5575: 1, L5565: 1, L3905: 1, L0667: 1, |
| | | | | | L0641: 1, L0645: 1, L0764: 1, L0775: 1, L0376: 1, L0776: 1, L0606: 1, L0659: 1, L0789: 1, L0666: 1, L0663: 1, |
| | | | | | L0665: 1, H0693: 1, H0547: 1, H0660: 1, H0539: 1, S0044: 1, H0436: 1, L0742: 1, L0749: 1, L0755: 1, L0759: 1, |
| | | | | | S0031: 1, S0260: 1, H0445: 1, H0707: 1, S0434: 1, L0581: 1, L0593: 1, S0194: 1, H0543: 1, H0423: 1 and H0506: 1. |
| 131 | HNECW49 | 639117 | 141 | 316-489 | AR055: 8, AR060: 7, AR240: 6, AR185: 5, AR300: 5, AR218: 5, AR104: 5, AR283: 5, AR089: 4, AR299: 4, |
| | | | | | AR282: 4, AR316: 3, AR039: 3, AR313: 3, AR096: 3, AR277: 2, AR219: 2, |
| | | | | | H0179: 2 and H0402: 1. |
| 132 | HNFCY57 | 877653 | 142 | 317-2206 | H0271: 3, H0575: 2, H0416: 2, H0518: 2, L0748: 2, S6022: 1, L0021: 1, H0024: 1, H0179: 1, S0002: 1, L0794: 1, |
| | | | | | S0053: 1 and S0216: 1. |
| 133 | HNFGR08 | 825417 | 143 | 314-445 | AR055: 5, AR060: 4, AR185: 3, AR240: 3, AR300: 2, AR104: 2, AR282: 2, AR089: 2, AR283: 2, AR219: 2, |
| | | | | | AR218: 2, AR316: 1, AR039: 1, AR096: 1, |
| | | | | | H0271: 1 |
| 134 | HNGAK51 | 603910 | 144 | 248-346 | AR313: 60, AR039: 47, AR299: 29, AR277: 29, AR089: 26, AR185: 24, AR096: 23, AR240: 20, AR300: 19, |
| | | | | | AR316: 17, AR218: 14, AR060: 14, AR219: 14, AR104: 14, AR055: 11, AR282: 10, AR283: 6, |
| | | | | | S0052: 1 |
| 135 | HNGAM58 | 688114 | 145 | 68-412 | AR313: 88, AR039: 72, AR299: 41, AR185: 40, AR300: 34, AR089: 34, AR277: 32, AR096: 31, AR218: 23, |
| | | | | | AR316: 23, AR240: 23, AR104: 21, AR219: 20, AR060: 16, AR282: 14, AR055: 9, AR283: 6, |
| | | | | | S0052: 1 |
| 136 | HNGDX18 | 1145071 | 146 | 237-965 | AR228: 8, AR176: 7, AR161: 6, AR162: 6, AR163: 6, AR251: 5, AR223: 5, AR181: 5, AR171: 5, AR225: 4, |
| | | | | | AR060: 4, AR267: 4, AR055: 4, AR216: 4, AR261: 4, AR235: 4, AR236: 4, AR268: 4, AR230: 4, AR269: 4, |
| | | | | | AR288: 4, AR191: 4, AR052: 4, AR182: 4, AR221: 4, AR239: 4, AR254: 3, AR242: 3, AR255: 3, AR312: 3, |
| | | | | | AR233: 3, AR287: 3, AR272: 3, AR262: 3, AR165: 3, AR271: 3, AR244: 3, AR178: 3, AR229: 3, AR164: 3, |
| | | | | | AR173: 3, AR257: 3, AR290: 3, AR274: 3, AR266: 3, AR061: 3, AR297: 3, AR166: 3, AR282: 3, AR198: 3, |
| | | | | | AR053: 3, AR231: 3, AR199: 3, AR291: 3, AR177: 3, AR201: 3, AR214: 3, AR264: 3, AR247: 3, AR196: 3, |
| | | | | | AR224: 3, AR190: 3, AR174: 3, AR270: 3, AR296: 2, AR286: 2, AR300: 2, AR309: 2, AR203: 2, AR089: 2, |
| | | | | | AR200: 2, AR294: 2, AR289: 2, AR249: 2, AR311: 2, AR240: 2, AR168: 2, AR293: 2, AR238: 2, AR188: 2, |
| | | | | | AR217: 2, AR175: 2, AR285: 2, AR179: 2, AR234: 2, AR310: 2, AR185: 2, AR033: 2, AR298: 2, AR260: 2, |
| | | | | | AR226: 2, AR316: 2, AR227: 2, AR222: 2, AR313: 2, AR265: 2, AR197: 2, AR277: 2, AR237: 2, AR189: 2, |
| | | | | | AR295: 2, AR299: 2, AR193: 2, AR283: 2, AR172: 2, AR183: 2, AR275: 2, AR232: 2, AR211: 2, AR253: 2, |
| | | | | | AR210: 2, AR104: 2, AR096: 2, AR213: 1, AR258: 1, AR292: 1, AR308: 1, AR273: 1, AR194: 1, AR180: 1, |
| | | | | | AR184: 1, AR284: 1, AR252: 1, AR205: 1, |
| | | | | | H0457: 4, S0052: 4, H0271: 3, L0766: 3, H0543: 3, H0255: 2, H0402: 2, H0253: 2, L0805: 2, L0754: 2, H0422: 2, |
| | | | | | H0583: 1, H0650: 1, H0656: 1, H0484: 1, H0483: 1, H0254: 1, L3659: 1, S0442: 1, S0360: 1, H0580: 1, S0140: 1, |
| | | | | | H0747: 1, H0393: 1, H0486: 1, H0250: 1, H0618: 1, H0050: 1, H0630: 1, H0719: 1, H0182: 1, H0063: 1, H0087: 1, |
| | | | | | H0264: 1, H0488: 1, H0487: 1, L0351: 1, T0042: 1, S0448: 1, S0002: 1, L0761: 1, L0378: 1, L0655: 1, L4501: 1, |
| | | | | | H0539: 1, S0188: 1, S0146: 1, H0707: 1, L0599: 1, H0136: 1, H0423: 1 and H0677: 1. |
| 137 | HNGEQ75 | 535723 | 147 | 30-98 | H0052: 2, H0406: 1, S0052: 1 and L0439: 1. |
| 138 | HNGFR54 | 695748 | 148 | 73-231 | S0052: 2 |
| 139 | HNGGA68 | 638116 | 149 | 184-282 | AR055: 6, AR060: 6, AR218: 6, AR300: 4, AR185: 4, AR240: 4, AR299: 3, AR104: 3, AR219: 3, AR089: 3, |
| | | | | | AR282: 3, AR283: 3, AR316: 3, AR096: 2, AR039: 2, AR313: 2, AR277: 2, |
| | | | | | H0419: 1, H0305: 1 and S0052: 1. |
| 140 | HNGHZ69 | 899289 | 150 | 25-54 | H0445: 2 and S0052: 1. |
| 141 | HNGKT41 | 836061 | 151 | 415-552 | AR316: 11, AR055: 6, AR060: 6, AR277: 5, AR300: 5, AR282: 5, AR104: 4, AR240: 4, AR185: 4, AR218: 3, |
| | | | | | AR283: 3, AR313: 3, AR039: 3, AR089: 3, AR219: 3, AR096: 2, AR299: 2, |
| | | | | | S0428: 1 |
| 142 | HNGMW45 | 838613 | 152 | 452-583 | AR316: 3, |
| | | | | | S0428: 1 |
| 143 | HNGNO53 | 836063 | 153 | 467-571 | AR055: 7, AR060: 6, AR240: 5, AR300: 5, AR218: 5, AR185: 4, AR283: 4, AR299: 4, AR277: 4, AR089: 4, |
| | | | | | AR104: 3, AR316: 3, AR096: 3, AR219: 2, AR313: 2, AR039: 2, AR282: 1, |
| | | | | | S0428: 2 and L0439: 1. |
| 144 | HNGPJ25 | 834942 | 154 | 544-621 | AR060: 7, AR055: 7, AR218: 6, AR240: 6, AR282: 5, AR185: 5, AR277: 5, AR300: 5, AR299: 4, AR283: 3, |
| | | | | | AR089: 3, AR104: 3, AR316: 3, AR096: 3, AR039: 2, AR313: 2, AR219: 2, |
| | | | | | H0251: 8, H0624: 4, L0752: 4, H0286: 1, L0598: 1, S0428: 1 and H0144: 1. |
| 145 | HNHFE71 | 834487 | 155 | 598-663 | AR055: 9, AR060: 8, AR218: 6, AR300: 5, AR185: 5, AR240: 5, AR277: 5, AR299: 5, AR282: 5, AR104: 5, |
| | | | | | AR283: 4, AR089: 4, AR039: 4, AR316: 4, AR096: 3, AR313: 3, AR219: 2, |
| | | | | | S0053: 1 |
| 146 | HNHGK22 | 597451 | 156 | 239-433 | AR060: 7, AR055: 6, AR240: 5, AR218: 4, AR185: 4, AR299: 4, AR300: 4, AR089: 4, AR104: 4, AR282: 4, |
| | | | | | AR283: 3, AR039: 3, AR316: 3, AR313: 3, AR096: 3, AR219: 3, |
| | | | | | S0053: 2 |
| 147 | HNHKS19 | 778392 | 157 | 192-317 | L0789: 2, H0616: 1, S0216: 1 and L0758: 1. |
| 148 | HNHKV56 | 800877 | 158 | 294-494 | S0216: 1 and L0746: 1. |
| 149 | HOACG07 | 792928 | 159 | 778-1149 | AR202: 138, AR194: 120, AR315: 99, AR281: 99, AR198: 98, AR244: 88, AR246: 86, AR243: 85, AR205: 85, |
| | | | | | AR192: 82, AR241: 80, AR280: 79, AR204: 73, AR265: 70, AR283: 66, AR206: 63, AR310: 59, AR263: 57, |
| | | | | | AR271: 57, AR314: 56, AR273: 54, AR053: 50, AR052: 49, AR282: 49, AR033: 48, AR277: 47, AR275: 46, |
| | | | | | AR213: 45, AR274: 44, AR312: 43, AR316: 43, AR309: 42, AR104: 40, AR240: 40, AR300: 40, AR289: 39, |
| | | | | | AR096: 39, AR266: 38, AR251: 37, AR247: 36, AR089: 36, AR299: 36, AR284: 35, AR313: 35, AR186: 34, |
| | | | | | AR039: 33, AR055: 33, AR175: 32, AR219: 31, AR295: 31, AR291: 29, AR177: 28, AR218: 28, AR185: 27, |
| | | | | | AR268: 26, AR285: 26, AR270: 25, AR286: 25, AR253: 24, AR183: 24, AR060: 24, AR232: 23, AR061: 23, |
| | | | | | AR292: 23, AR298: 23, AR258: 22, AR256: 20, AR248: 20, AR296: 19, AR182: 19, AR238: 18, AR269: 18, |
| | | | | | AR290: 18, AR294: 18, AR267: 17, AR231: 17, AR226: 17, AR259: 17, AR229: 16, AR227: 16, AR234: 16, |
| | | | | | AR293: 15, AR233: 15, AR237: 14, AR249: 13, AR184: 13, AR179: 11, |
| | | | | | L0748: 4, L0749: 4, H0265: 3, S0442: 2, H0587: 2, H0427: 2, S0142: 2, L0769: 2, L0761: 2, L0800: 2, L0794: 2, |
| | | | | | L0657: 2, L0659: 2, L0663: 2, L0665: 2, H0689: 2, L0731: 2, H0677: 2, H0713: 1, H0716: 1, H0657: 1, H0661: 1, |
| | | | | | H0638: 1, S0360: 1, H0722: 1, H0122: 1, H0545: 1, H0009: 1, H0123: 1, S0388: 1, H0252: 1, T0023: 1, T0006: 1, |
| | | | | | H0135: 1, H0163: 1, H0412: 1, L0351: 1, S0440: 1, H0529: 1, L0372: 1, L0646: 1, L0645: 1, L0764: 1, L0662: 1, |
| | | | | | L0767: 1, L0766: 1, L0649: 1, L0803: 1, L0776: 1, L0655: 1, L0382: 1, L0809: 1, L0789: 1, H0672: 1, H0627: 1, |
| | | | | | L0751: 1, L0750: 1, L0753: 1, L0757: 1, L0758: 1 and L0759: 1. |
| 150 | HODBB70 | 520196 | 160 | 173-256 | AR055: 7, AR218: 6, AR060: 5, AR104: 5, AR240: 4, AR300: 4, AR299: 4, AR096: 4, AR219: 4, AR283: 4, |
| | | | | | AR039: 3, AR185: 3, AR089: 3, AR316: 3, AR282: 3, AR277: 2, |
| | | | | | H0328: 1, L0789: 1, L0742: 1 and L0439: 1. |
| 151 | HOEBK60 | 789396 | 161 | 1714-1845 | AR219: 21, AR218: 19, AR316: 12, AR313: 10, AR039: 9, AR096: 8, AR089: 8, AR299: 7, AR240: 7, AR055: 7, |
| | | | | | AR300: 7, AR060: 7, AR282: 6, AR185: 5, AR283: 5, AR104: 4, AR277: 4, |
| | | | | | L0439: 10, L0731: 7, L0605: 6, L0766: 5, L0803: 5, L0471: 4, L0655: 4, L0659: 4, L0756: 4, S0408: 3, S0440: 3, |
| | | | | | H0648: 3, L0777: 3, H0170: 2, S0420: 2, L0021: 2, H0014: 2, T0010: 2, L0143: 2, H0090: 2, H0591: 2, H0641: 2, |
| | | | | | L0638: 2, L0662: 2, L0794: 2, L0776: 2, L0657: 2, L0809: 2, L0666: 2, L0663: 2, H0547: 2, S0126: 2, H0518: 2, |
| | | | | | L0751: 2, L0755: 2, L0758: 2, L0588: 2, H0543: 2, H0624: 1, H0740: 1, S0430: 1, H0657: 1, H0656: 1, S0212: 1, |
| | | | | | S0110: 1, H0661: 1, H0663: 1, S0442: 1, S0358: 1, S0376: 1, S0360: 1, S0476: 1, L0717: 1, L0586: 1, T0114: 1, |
| | | | | | H0427: 1, L0105: 1, H0318: 1, S0474: 1, H0581: 1, H0052: 1, H0309: 1, L0157: 1, H0024: 1, H0071: 1, H0275: 1, |
| | | | | | H0354: 1, S6028: 1, H0266: 1, S0003: 1, H0328: 1, H0615: 1, H0428: 1, H0031: 1, H0169: 1, H0163: 1, H0038: 1, |
| | | | | | H0040: 1, H0551: 1, H0272: 1, T0041: 1, S0014: 1, S0438: 1, H0646: 1, S0142: 1, S0210: 1, S0426: 1, H0529: 1, |
| | | | | | L0372: 1, L0645: 1, L0764: 1, L0651: 1, L0656: 1, L5623: 1, L0789: 1, L0665: 1, H0520: 1, H0689: 1, H0682: 1, |
| | | | | | H0435: 1, H0659: 1, S0380: 1, H0696: 1, L0740: 1, L0754: 1, L0746: 1, L0750: 1, L0779: 1, L0752: 1, S0260: 1, |
| | | | | | S0434: 1, S0436: 1, L0485: 1 and H0423: 1. |
| 152 | HOFNB74 | 762821 | 162 | 138-257 | AR277: 18, AR283: 18, AR282: 14, AR313: 12, AR316: 11, AR055: 9, AR089: 9, AR240: 8, AR104: 8, AR218: 8, |
| | | | | | AR299: 8, AR096: 8, AR219: 8, AR300: 7, AR185: 7, AR039: 6, AR060: 5, |
| | | | | | H0415: 1 |
| 153 | HOSDO75 | 862049 | 163 | 88-174 | AR060: 6, AR055: 6, AR218: 6, AR240: 5, AR277: 5, AR300: 4, AR185: 4, AR299: 4, AR283: 4, AR089: 4, |
| | | | | | AR282: 3, AR104: 3, AR316: 3, AR096: 3, AR313: 2, AR039: 2, AR219: 2, |
| | | | | | L0766: 2, L0362: 2, S0358: 1, H0580: 1, S0046: 1, H0266: 1, S0003: 1, H0553: 1, S0344: 1, L0761: 1, L0794: 1, |
| | | | | | S0152: 1, L0777: 1 and L0755: 1. |
| 154 | HOSEI81 | 562778 | 164 | 203-454 | AR055: 5, AR060: 5, AR104: 4, AR282: 4, AR300: 4, AR299: 3, AR185: 3, AR089: 3, AR240: 3, AR039: 3, |
| | | | | | AR283: 2, AR218: 2, AR096: 2, AR316: 2, AR219: 2, AR313: 2, AR277: 2, |
| | | | | | L0777: 2, S0214: 1 and H0539: 1. |
| 155 | HOUDE92 | 580866 | 165 | 70-336 | H0052: 17, L0745: 11, L0748: 10, H0547: 7, L0439: 7, L0755: 6, L0771: 5, L0774: 5, L0662: 4, L0746: 4, L0777: 4, |
| | | | | | S0474: 3, L0163: 3, H0059: 3, H0100: 3, L0775: 3, L0741: 3, H0261: 2, H0333: 2, H0194: 2, H0545: 2, H0012: 2, |
| | | | | | H0617: 2, H0135: 2, L0770: 2, L0665: 2, L0438: 2, H0520: 2, L0747: 2, L0752: 2, L0753: 2, S0040: 1, L0717: 1, |
| | | | | | H0437: 1, H0550: 1, S6016: 1, H0497: 1, H0574: 1, H0599: 1, H0575: 1, H0618: 1, H0253: 1, H0041: 1, H0620: 1, |
| | | | | | H0373: 1, H0188: 1, H0124: 1, H0068: 1, H0040: 1, H0561: 1, S0448: 1, S0210: 1, L0763: 1, L0644: 1, L0767: 1, |
| | | | | | L0768: 1, L0375: 1, L0651: 1, L0659: 1, L0540: 1, L5622: 1, H0144: 1, H0593: 1, S0126: 1, H0539: 1, S0152: 1, |
| | | | | | H0694: 1, S0390: 1, S0028: 1, L0749: 1, L0786: 1, L0780: 1, L0731: 1, L0757: 1, L0758: 1, S0436: 1, L0592: 1 and |
| | | | | | S0276: 1. |
| 156 | HOVBD85 | 827362 | 166 | 252-332 | AR218: 13, AR219: 12, AR096: 5, AR313: 2, AR316: 2, AR055: 1, AR060: 1, AR282: 1, AR240: 1, |
| | | | | | H0252: 1, H0428: 1 and L0439: 1. |
| 157 | HPCAB41 | 758003 | 167 | 184-261 | AR104: 4, AR055: 4, AR277: 3, AR218: 3, AR282: 2, AR039: 2, AR299: 2, AR185: 2, AR283: 2, AR089: 2, |
| | | | | | AR060: 2, AR316: 2, AR219: 2, AR313: 1, AR300: 1, AR096: 1, |
| | | | | | L0754: 4, L0471: 1, L0662: 1, L0766: 1, H0521: 1, S0146: 1, L0758: 1 and H0422: 1. |
| 158 | HPEAD23 | 773409 | 168 | 188-469 | AR277: 68, AR283: 65, AR219: 61, AR316: 49, AR218: 41, AR089: 41, AR104: 39, AR299: 38, AR055: 36, |
| | | | | | AR185: 36, AR039: 34, AR282: 33, AR240: 31, AR096: 31, AR313: 31, AR060: 30, AR300: 25, |
| | | | | | H0585: 18, L0779: 3, L0775: 2, S0374: 2, H0341: 1, S0358: 1, S0360: 1, S0408: 1, H0559: 1, T0039: 1, H0156: 1, |
| | | | | | H0253: 1, S0182: 1, H0318: 1, H0545: 1, H0083: 1, H0165: 1, L0768: 1, L0774: 1, L0750: 1, L0752: 1 and S0031: 1. |
| 159 | HPFCI36 | 855966 | 169 | 94-153 | AR218: 18, AR219: 16, AR313: 14, AR089: 9, AR055: 7, AR282: 6, AR060: 6, AR316: 6, AR185: 6, AR299: 5, |
| | | | | | AR240: 5, AR039: 5, AR300: 4, AR104: 4, AR283: 4, AR096: 4, AR277: 2, |
| | | | | | L0591: 4, L0754: 3, H0450: 2, H0486: 2, H0046: 2, S0003: 2, H0494: 2, S0422: 2, L0659: 2, S0126: 2, H0659: 2, |
| | | | | | L0750: 2, L0601: 2, H0170: 1, H0556: 1, H0657: 1, S0420: 1, S0354: 1, H0734: 1, H0749: 1, H0455: 1, H0403: 1, |
| | | | | | H0600: 1, H0013: 1, H0156: 1, H0599: 1, H0744: 1, H0082: 1, S0214: 1, H0622: 1, H0031: 1, H0673: 1, H0169: 1, |
| | | | | | H0090: 1, H0038: 1, H0022: 1, H0560: 1, L0643: 1, L0771: 1, L0773: 1, L0655: 1, L0807: 1, L3872: 1, L0792: 1, |
| | | | | | L0665: 1, L3811: 1, S0378: 1, H0518: 1, S0152: 1, H0521: 1, L0748: 1, L0749: 1, L0757: 1, L0759: 1, S0434: 1, |
| | | | | | L0596: 1, L0605: 1 and H0653: 1. |
| 160 | HPFDI37 | 862056 | 170 | 38-91 | AR055: 5, AR218: 5, AR060: 4, AR299: 3, AR300: 3, AR283: 3, AR104: 3, AR282: 3, AR240: 3, AR039: 2, |
| | | | | | AR219: 2, AR277: 2, AR185: 2, AR316: 2, AR089: 2, AR313: 2, AR096: 1, |
| | | | | | L0771: 13, L0752: 12, L0748: 9, L0731: 7, S0360: 6, L0769: 6, S0358: 5, H0318: 5, L0770: 5, L0747: 5, L0758: 5, |
| | | | | | L0599: 5, H0140: 4, H0545: 4, H0673: 4, L0774: 4, L0655: 4, L0659: 4, L0664: 4, L0665: 4, H0659: 4, H0648: 4, |
| | | | | | L0740: 4, L0754: 4, L0588: 4, H0662: 3, H0169: 3, H0413: 3, L0638: 3, L0775: 3, L0783: 3, L0666: 3, L0663: 3, |
| | | | | | H0660: 3, H0521: 3, L0749: 3, L0750: 3, L0757: 3, H0543: 3, H0170: 2, S0110: 2, H0574: 2, H0581: 2, H0535: 2, |
| | | | | | L0065: 2, H0647: 2, S0344: 2, L0763: 2, L0764: 2, L0662: 2, L0767: 2, L0803: 2, L0806: 2, L0776: 2, S0374: 2, |
| | | | | | S0328: 2, S0380: 2, H0576: 2, S0028: 2, L0591: 2, H0352: 2, H0265: 1, T0002: 1, H0686: 1, H0685: 1, H0295: 1, |
| | | | | | H0657: 1, L0760: 1, S0212: 1, H0484: 1, H0177: 1, H0638: 1, L0617: 1, L0005: 1, S0442: 1, S0376: 1, H0637: 1, |
| | | | | | H0411: 1, H0370: 1, H0587: 1, H0632: 1, T0109: 1, H0156: 1, H0085: 1, H0327: 1, H0530: 1, H0046: 1, H0041: 1, |
| | | | | | S0388: 1, H0630: 1, H0271: 1, H0644: 1, H0628: 1, H0181: 1, H0617: 1, H0674: 1, H0068: 1, H0040: 1, H0488: 1, |
| | | | | | L0564: 1, T0041: 1, H0494: 1, H0633: 1, S0144: 1, S0210: 1, S0422: 1, L0369: 1, L0762: 1, L0372: 1, L0646: 1, |
| | | | | | L0765: 1, L0363: 1, L0768: 1, L0651: 1, L0653: 1, L0629: 1, L0657: 1, L0526: 1, L0532: 1, S0053: 1, S0216: 1, |
| | | | | | H0144: 1, H0519: 1, S0126: 1, H0689: 1, H0690: 1, H0684: 1, S0027: 1, L0742: 1, L0756: 1, L0780: 1, L0755: 1, |
| | | | | | H0444: 1, H0445: 1, L0596: 1, L0605: 1, L0592: 1, L0593: 1, L0362: 1, L0603: 1 and H0136: 1. |
| 161 | HPIAA80 | 829972 | 171 | 314-427 | AR218: 13, AR219: 11, AR282: 9, AR089: 8, AR055: 8, AR240: 7, AR104: 6, AR060: 6, AR283: 6, AR277: 6, |
| | | | | | AR039: 6, AR316: 5, AR299: 5, AR096: 4, AR185: 4, AR300: 4, AR313: 3, |
| | | | | | L0750: 3, H0672: 2, L0744: 2, H0587: 1, L0021: 1, S0010: 1, H0024: 1, H0266: 1, S0364: 1, H0068: 1, H0038: 1, |
| | | | | | T0004: 1, H0625: 1, S0150: 1, L0769: 1, L0667: 1, L0649: 1, L0784: 1, L0526: 1, L0790: 1, L0792: 1, L0793: 1, |
| | | | | | L0663: 1, H0696: 1, L0747: 1, L0608: 1 and S0276: 1. |
| 162 | HPJCW58 | 612866 | 172 | 177-263 | AR055: 8, AR060: 6, AR282: 6, AR218: 5, AR104: 4, AR300: 4, AR240: 4, AR283: 4, AR219: 4, AR299: 3, |
| | | | | | AR089: 3, AR185: 3, AR316: 3, AR096: 3, AR039: 2, AR277: 2, AR313: 1, |
| | | | | | S0152: 1 |
| 163 | HPMFH77 | 702014 | 173 | 251-358 | AR089: 24, AR282: 22, AR060: 6, AR277: 5, AR055: 5, AR104: 4, AR240: 4, AR316: 4, AR299: 4, AR300: 4, |
| | | | | | AR313: 4, AR283: 4, AR039: 3, AR218: 2, AR096: 2, AR185: 2, |
| | | | | | L0750: 4, L0809: 3, L0747: 3, L0803: 2, L0776: 2, L0740: 2, L0754: 2, S0045: 1, S0010: 1, H0581: 1, T0010: 1, |
| | | | | | H0687: 1, H0031: 1, S0440: 1, L0770: 1, L0764: 1, L0375: 1, L0748: 1 and L0731: 1. |
| 164 | HPQCB83 | 740761 | 174 | 85-189 | AR055: 2, AR060: 2, AR282: 2, AR277: 1, AR185: 1, AR283: 1, AR240: 1, |
| | | | | | S0136: 15 |
| 165 | HPRBH85 | 695752 | 175 | 684-1088 | AR284: 14, AR295: 10, AR271: 8, AR293: 7, AR246: 7, AR243: 7, AR291: 7, AR244: 6, AR286: 6, AR290: 6, |
| | | | | | AR241: 6, AR285: 6, AR206: 6, AR310: 5, AR249: 5, AR273: 5, AR198: 5, AR280: 5, AR312: 5, AR186: 5, |
| | | | | | AR270: 5, AR294: 5, AR204: 5, AR269: 5, AR251: 5, AR202: 5, AR292: 5, AR275: 4, AR033: 4, AR253: 4, |
| | | | | | AR053: 4, AR182: 4, AR314: 4, AR259: 4, AR315: 4, AR298: 4, AR265: 4, AR309: 4, AR282: 4, AR274: 4, |
| | | | | | AR183: 4, AR061: 4, AR205: 4, AR296: 4, AR289: 4, AR052: 4, AR313: 4, AR175: 3, AR213: 3, AR238: 3, |
| | | | | | AR268: 3, AR248: 3, AR055: 3, AR177: 3, AR247: 3, AR231: 3, AR104: 3, AR256: 3, AR226: 2, AR185: 2, |
| | | | | | AR283: 2, AR277: 2, AR267: 2, AR227: 2, AR300: 2, AR096: 2, AR089: 2, AR258: 2, AR219: 2, AR263: 2, |
| | | | | | AR299: 2, AR237: 2, AR240: 2, AR060: 2, AR316: 2, AR218: 2, AR281: 2, AR039: 2, AR233: 1, AR232: 1, |
| | | | | | AR184: 1, AR234: 1, AR266: 1, AR192: 1, |
| | | | | | L0439: 5, L0740: 4, L0777: 4, L0755: 4, L0794: 2, L0803: 2, L0438: 2, L0602: 2, L0752: 2, L0599: 2, H0713: 1, |
| | | | | | H0583: 1, S0360: 1, L3653: 1, L0471: 1, H0510: 1, H0032: 1, H0488: 1, H0413: 1, L0662: 1, L0804: 1, L0775: 1, |
| | | | | | L0805: 1, L0655: 1, L0809: 1, L0519: 1, S0148: 1, H0547: 1, L0747: 1, L0686: 1 and H0665: 1. |
| 166 | HPRCD35 | 853551 | 176 | 265-372 | AR104: 14, AR089: 11, AR055: 11, AR185: 10, AR219: 10, AR299: 10, AR218: 10, AR313: 10, AR282: 10, |
| | | | | | AR240: 9, AR316: 9, AR283: 9, AR096: 8, AR060: 7, AR039: 6, AR300: 5, AR277: 5, |
| | | | | | L0748: 5, L0754: 5, L0803: 4, L0805: 4, L0777: 4, L0662: 3, L0766: 3, H0556: 2, H0013: 2, H0551: 2, H0264: 2, |
| | | | | | L0800: 2, L0806: 2, L0664: 2, L0439: 2, L0756: 2, L0758: 2, S0192: 2, H0657: 1, S0442: 1, S0358: 1, S0045: 1, |
| | | | | | S0046: 1, H0747: 1, H0550: 1, H0392: 1, S0280: 1, H0575: 1, H0545: 1, H0046: 1, H0050: 1, H0644: 1, H0617: 1, |
| | | | | | L0055: 1, H0032: 1, H0212: 1, H0038: 1, H0560: 1, S0438: 1, S0210: 1, L0769: 1, L0796: 1, L5575: 1, L0768: 1, |
| | | | | | L0794: 1, L0649: 1, L0776: 1, L0659: 1, L0542: 1, L0526: 1, L0663: 1, H0144: 1, L0565: 1, L3811: 1, H0683: 1, |
| | | | | | H0659: 1, S0152: 1, H0521: 1, H0522: 1, H0540: 1, S0118: 1, S0032: 1, L0731: 1, L0759: 1 and H0668: 1. |
| 167 | HPTRM02 | 812879 | 177 | 885-1127 | H0617: 7, H0087: 6, H0657: 5, S0410: 3, L0754: 3, S0356: 2, L0717: 2, H0150: 2, H0687: 2, H0424: 2, H0551: 2, |
| | | | | | L0769: 2, L0774: 2, L0743: 2, L0758: 2, L0592: 2, H0556: 1, T0002: 1, H0686: 1, H0685: 1, T0049: 1, H0663: 1, |
| | | | | | S0442: 1, S0444: 1, S0360: 1, S0476: 1, H0550: 1, H0486: 1, H0250: 1, L0021: 1, T0048: 1, S0474: 1, S0049: 1, |
| | | | | | H0052: 1, H0309: 1, H0597: 1, H0544: 1, H0014: 1, H0107: 1, S6028: 1, H0622: 1, H0644: 1, H0102: 1, S0038: 1, |
| | | | | | L0351: 1, S0450: 1, S0344: 1, S0002: 1, L0764: 1, L0766: 1, L0805: 1, L0776: 1, L0655: 1, L0661: 1, L0657: 1, |
| | | | | | L0809: 1, L0666: 1, L0665: 1, L2652: 1, L2260: 1, L2261: 1, H0689: 1, H0435: 1, H0521: 1, H0696: 1, H0555: 1, |
| | | | | | L0744: 1, L0439: 1, L0749: 1, L0777: 1, L0755: 1, L0759: 1, S0436: 1, L0597: 1, L0599: 1, L0366: 1 and S0196: 1. |
| 168 | HRADA42 | 827302 | 178 | 122-256 | AR283: 35, AR219: 34, AR277: 32, AR316: 28, AR218: 25, AR282: 24, AR313: 23, AR104: 22, AR089: 22, |
| | | | | | AR096: 20, AR185: 19, AR299: 19, AR055: 17, AR300: 16, AR240: 16, AR039: 15, AR060: 13, |
| | | | | | L0771: 7, S0358: 4, L0768: 4, L0779: 4, L0766: 3, L0775: 3, L0748: 3, L0754: 3, L0763: 2, L0769: 2, L0764: 2, |
| | | | | | L0649: 2, L0774: 2, L0809: 2, L0747: 2, H0657: 1, S0116: 1, H0671: 1, S0418: 1, L0005: 1, S0360: 1, S0408: 1, |
| | | | | | H0733: 1, S0045: 1, H0393: 1, H0370: 1, H0333: 1, H0150: 1, T0003: 1, H0266: 1, S0003: 1, L0055: 1, H0038: 1, |
| | | | | | H0040: 1, H0100: 1, S0440: 1, H0646: 1, S0344: 1, S0210: 1, S0422: 1, H0529: 1, L0770: 1, L0646: 1, L0767: 1, |
| | | | | | L0381: 1, L0378: 1, L0776: 1, L0655: 1, L0659: 1, L2264: 1, S0126: 1, H0659: 1, H0670: 1, H0648: 1, H0710: 1, |
| | | | | | H0555: 1, S0028: 1, L0740: 1, L0750: 1, L0777: 1, L0752: 1, L0755: 1, L0731: 1, L0758: 1, L0759: 1, S0434: 1, |
| | | | | | S0436: 1, L0596: 1, L0588: 1, L0605: 1, L0590: 1, L0608: 1 and H0543: 1. |
| 169 | HRADF49 | 866481 | 179 | 169-930 | AR244: 12, AR296: 6, AR205: 6, AR183: 6, AR292: 6, AR104: 5, AR249: 5, AR291: 5, AR285: 5, AR298: 5, |
| | | | | | AR206: 5, AR289: 4, AR240: 4, AR293: 4, AR275: 4, AR270: 4, AR295: 4, AR294: 4, AR284: 3, AR213: 3, |
| | | | | | AR186: 3, AR060: 3, AR286: 3, AR234: 3, AR229: 3, AR282: 3, AR267: 3, AR184: 3, AR096: 3, AR283: 3, |
| | | | | | AR033: 3, AR251: 3, AR300: 2, AR313: 2, AR316: 2, AR185: 2, AR039: 2, AR299: 2, AR218: 2, AR256: 2, |
| | | | | | AR089: 2, AR219: 2, AR061: 2, AR243: 2, AR055: 2, AR269: 2, AR277: 2, AR233: 2, AR238: 2, AR182: 2, |
| | | | | | AR268: 2, AR175: 2, AR259: 2, AR266: 2, AR232: 2, AR258: 2, AR227: 2, AR315: 2, AR263: 1, AR226: 1, |
| | | | | | AR309: 1, AR314: 1, AR053: 1, AR290: 1, AR052: 1, AR231: 1, |
| | | | | | H0618: 9, L0751: 7, L0754: 6, L0758: 6, H0253: 5, L0748: 5, L0439: 5, H0580: 3, L3816: 3, H0052: 3, L0770: 3, |
| | | | | | L0663: 3, H0556: 2, H0733: 2, H0351: 2, H0706: 2, H0567: 2, H0625: 2, S0142: 2, L0639: 2, L3905: 2, L0659: 2, |
| | | | | | L0543: 2, L5623: 2, L0749: 2, S0436: 2, H0423: 2, L3643: 1, H0381: 1, S0212: 1, H0254: 1, H0663: 1, H0638: 1, |
| | | | | | S0418: 1, H0741: 1, H0735: 1, S0045: 1, S0046: 1, S0476: 1, S6022: 1, H0549: 1, H0550: 1, S0222: 1, H0370: 1, |
| | | | | | H0497: 1, H0574: 1, L0622: 1, L0623: 1, L3655: 1, H0101: 1, H0427: 1, S0280: 1, H0122: 1, H0194: 1, H0596: 1, |
| | | | | | H0570: 1, H0081: 1, H0620: 1, H0014: 1, H0083: 1, H0355: 1, H0510: 1, H0424: 1, H0030: 1, H0553: 1, H0628: 1, |
| | | | | | S0364: 1, S0366: 1, H0038: 1, H0551: 1, H0100: 1, L0351: 1, H0494: 1, S0438: 1, H0633: 1, S0144: 1, S0422: 1, |
| | | | | | L0371: 1, L0769: 1, L3904: 1, L0772: 1, L0648: 1, L0497: 1, L0375: 1, L0511: 1, L0666: 1, L0709: 1, L0710: 1, |
| | | | | | H0144: 1, L3811: 1, L3824: 1, H0520: 1, H0593: 1, H0682: 1, H0670: 1, H0672: 1, H0539: 1, L3833: 1, S0044: 1, |
| | | | | | H0626: 1, H0732: 1, S3012: 1, S3014: 1, S0027: 1, S0028: 1, L0779: 1, L0584: 1, L0608: 1, L0593: 1, H0667: 1 and |
| | | | | | H0542: 1. |
| 170 | HRADN25 | 800628 | 180 | 198-395 | AR277: 30, AR283: 24, AR104: 22, AR219: 21, AR316: 20, AR282: 18, AR218: 18, AR089: 17, AR313: 17, |
| | | | | | AR096: 17, AR240: 16, AR299: 14, AR185: 14, AR300: 13, AR060: 12, AR039: 12, AR055: 12, |
| | | | | | H0556: 10, H0618: 6, H0253: 6, L0748: 6, L0758: 6, H0305: 5, L0742: 5, H0038: 4, L0439: 4, L0592: 3, H0013: 2, |
| | | | | | H0194: 2, H0545: 2, H0009: 2, H0014: 2, H0617: 2, H0087: 2, L0769: 2, L0774: 2, L0776: 2, L0665: 2, L0438: 2, |
| | | | | | H0690: 2, H0539: 2, S0380: 2, L0747: 2, L0779: 2, H0265: 1, H0657: 1, S0420: 1, S0376: 1, H0734: 1, S0278: 1, |
| | | | | | H0455: 1, H0333: 1, H0632: 1, H0581: 1, S0049: 1, H0052: 1, H0123: 1, S0362: 1, H0687: 1, H0688: 1, H0606: 1, |
| | | | | | H0673: 1, H0135: 1, H0090: 1, H0591: 1, H0040: 1, H0616: 1, S0438: 1, S0142: 1, L0638: 1, L4747: 1, L0796: 1, |
| | | | | | L5565: 1, L0761: 1, L0643: 1, L0645: 1, L0662: 1, L0768: 1, L0794: 1, L0775: 1, L0375: 1, L0378: 1, L0655: 1, |
| | | | | | L0382: 1, L0793: 1, L0666: 1, L0663: 1, S0053: 1, S0374: 1, H0547: 1, H0658: 1, H0660: 1, H0651: 1, H0521: 1, |
| | | | | | S0406: 1, H0555: 1, H0436: 1, S0390: 1, S3014: 1, S0027: 1, L0743: 1, L0777: 1, L0731: 1, H0707: 1, S0436: 1, |
| | | | | | H0543: 1 and H0422: 1. |
| 171 | HRDDQ39 | 840405 | 181 | 215-355 | AR313: 36, AR039: 33, AR185: 27, AR299: 20, AR089: 18, AR300: 17, AR096: 17, AR240: 16, AR218: 15, |
| | | | | | AR277: 14, AR316: 13, AR060: 11, AR219: 10, AR104: 9, AR055: 8, AR282: 7, AR283: 7, |
| | | | | | S0001: 2, H0436: 2, S0134: 1, H0657: 1, H0441: 1, H0009: 1, H0123: 1, H0050: 1, H0428: 1, H0124: 1, H0529: 1, |
| | | | | | H0521: 1 and H0352: 1. |
| 172 | HRDER22 | 688056 | 182 | 32-61 | AR283: 14, AR104: 12, AR296: 12, AR289: 11, AR298: 11, AR060: 11, AR089: 10, AR291: 10, AR284: 10, |
| | | | | | AR292: 10, AR266: 10, AR286: 10, AR055: 9, AR270: 9, AR285: 9, AR282: 9, AR247: 9, AR294: 8, AR033: 8, |
| | | | | | AR293: 8, AR243: 8, AR277: 8, AR263: 8, AR238: 8, AR183: 8, AR240: 8, AR295: 8, AR299: 8, AR241: 8, |
| | | | | | AR269: 7, AR281: 7, AR316: 7, AR185: 7, AR192: 7, AR182: 7, AR194: 7, AR218: 7, AR177: 7, AR290: 7, |
| | | | | | AR184: 7, AR061: 7, AR186: 7, AR267: 7, AR219: 6, AR246: 6, AR175: 6, AR202: 6, AR204: 6, AR274: 6, |
| | | | | | AR268: 6, AR229: 6, AR206: 6, AR096: 6, AR251: 6, AR234: 6, AR256: 6, AR232: 6, AR300: 6, AR198: 5, |
| | | | | | AR313: 5, AR039: 5, AR273: 5, AR205: 5, AR259: 5, AR227: 5, AR275: 5, AR310: 5, AR052: 5, AR258: 5, |
| | | | | | AR233: 5, AR226: 5, AR312: 4, AR237: 4, AR271: 4, AR248: 4, AR309: 4, AR253: 4, AR053: 4, AR244: 4, |
| | | | | | AR280: 4, AR231: 4, AR213: 4, AR315: 4, AR179: 3, AR249: 3, AR265: 3, AR314: 2, |
| | | | | | L0769: 5, L0751: 5, L0770: 4, L0758: 3, H0716: 2, H0617: 2, L0771: 2, L0803: 2, L0806: 2, L0809: 2, L0789: 2, |
| | | | | | L0740: 2, L0779: 2, L0600: 2, H0402: 1, S0420: 1, L0005: 1, S0442: 1, S0360: 1, H0637: 1, H0728: 1, H0261: 1, |
| | | | | | S0222: 1, H0370: 1, H0392: 1, H0438: 1, H0592: 1, H0586: 1, L0622: 1, L0623: 1, H0427: 1, L0021: 1, H0575: 1, |
| | | | | | H0618: 1, H0581: 1, H0123: 1, H0012: 1, H0039: 1, H0424: 1, S0364: 1, H0124: 1, H0087: 1, H0412: 1, L0800: 1, |
| | | | | | L0648: 1, L0662: 1, L0774: 1, L0805: 1, L0657: 1, L0658: 1, L0542: 1, L5623: 1, L0788: 1, L0666: 1, L0665: 1, |
| | | | | | L3825: 1, H0547: 1, H0521: 1, S0406: 1, H0576: 1, L0742: 1, L0777: 1 and L0366: 1. |
| 173 | HRDEX93 | 816046 | 183 | 649-867 | AR104: 30, AR218: 25, AR219: 24, AR240: 22, AR096: 21, AR185: 17, AR039: 16, AR316: 16, AR313: 16, |
| | | | | | AR055: 14, AR060: 14, AR299: 13, AR089: 13, AR282: 9, AR277: 9, AR300: 9, AR283: 6, |
| | | | | | H0694: 12, L0748: 10, L0731: 7, L0754: 6, H0556: 5, L0758: 5, H0265: 4, S0420: 4, S0408: 4, L0517: 4, H0657: 3, |
| | | | | | H0618: 3, H0052: 3, H0083: 3, H0553: 3, H0494: 3, L0763: 3, L0666: 3, L0663: 3, S0126: 3, L0747: 3, H0295: 2, |
| | | | | | S0134: 2, S0418: 2, H0637: 2, S0046: 2, H0431: 2, H0545: 2, H0014: 2, H0271: 2, H0039: 2, H0424: 2, H0124: 2, |
| | | | | | H0641: 2, L0764: 2, L0766: 2, L0774: 2, L0775: 2, L0776: 2, L0655: 2, L0783: 2, L0665: 2, H0519: 2, H0522: 2, |
| | | | | | S0044: 2, L0755: 2, S0436: 2, L0595: 2, L0362: 2, H0543: 2, S0040: 1, H0740: 1, H0656: 1, S0212: 1, H0484: 1, |
| | | | | | H0661: 1, H0662: 1, S0360: 1, H0733: 1, H0619: 1, S0222: 1, H0486: 1, H0156: 1, H0575: 1, H0706: 1, H0253: 1, |
| | | | | | S0010: 1, S0346: 1, H0318: 1, H0596: 1, H0231: 1, H0046: 1, H0150: 1, H0081: 1, H0050: 1, H0012: 1, H0620: 1, |
| | | | | | L0163: 1, S0051: 1, T0010: 1, S6028: 1, H0266: 1, H0179: 1, H0292: 1, H0031: 1, H0644: 1, H0182: 1, H0617: 1, |
| | | | | | H0606: 1, H0673: 1, L0455: 1, L0456: 1, H0598: 1, H0038: 1, H0040: 1, H0616: 1, H0087: 1, T0067: 1, H0264: 1, |
| | | | | | T0041: 1, H0131: 1, H0647: 1, S0002: 1, L0772: 1, L0642: 1, L0662: 1, L0767: 1, L0657: 1, L0659: 1, L0382: 1, |
| | | | | | L5623: 1, L0664: 1, S0374: 1, H0593: 1, H0690: 1, H0682: 1, H0659: 1, H0658: 1, H0666: 1, H0651: 1, H0539: 1, |
| | | | | | H0521: 1, S0406: 1, H0576: 1, L0743: 1, L0740: 1, L0750: 1, L0779: 1 and H0445: 1. |
| 174 | HRDFK37 | 840381 | 184 | 120-152 | H0556: 4, L0731: 3, H0124: 2, L0766: 2, L0809: 2, L0747: 2, L0603: 2, S0218: 1, H0657: 1, S0116: 1, H0549: 1, |
| | | | | | H0550: 1, H0250: 1, H0253: 1, H0052: 1, H0083: 1, H0355: 1, L0483: 1, H0181: 1, H0617: 1, H0032: 1, S0364: 1, |
| | | | | | H0264: 1, H0100: 1, H0494: 1, L0065: 1, L0770: 1, L0769: 1, L0772: 1, L0764: 1, L0662: 1, L0768: 1, L0387: 1, |
| | | | | | L0657: 1, L0658: 1, L0541: 1, S0052: 1, S0374: 1, L0565: 1, H0547: 1, S0406: 1, H0478: 1, L0740: 1, L0779: 1, |
| | | | | | L0757: 1, L0759: 1, H0444: 1, H0445: 1, L0592: 1 and L0595: 1. |
| 175 | HRTAP63 | 780698 | 185 | 959-1087 | AR219: 53, AR218: 46, AR313: 33, AR104: 28, AR096: 26, AR089: 25, AR316: 24, AR039: 20, AR299: 19, |
| | | | | | AR185: 18, AR300: 17, AR060: 17, AR282: 16, AR055: 15, AR240: 13, AR277: 10, AR283: 9, |
| | | | | | S0474: 28, H0521: 15, L0758: 14, L0752: 13, L0731: 13, L0755: 10, H0641: 9, L0766: 8, H0179: 6, L0748: 6, |
| | | | | | L0439: 6, L0759: 6, H0638: 5, S0222: 5, H0581: 5, L0662: 5, L0655: 5, H0436: 5, L0740: 5, L0777: 5, S0436: 5, |
| | | | | | H0457: 4, L0775: 4, L0809: 4, H0522: 4, L0742: 4, L0754: 4, L0747: 4, L0749: 4, L0750: 4, L0757: 4, H0580: 3, |
| | | | | | H0619: 3, H0052: 3, S0003: 3, H0038: 3, H0623: 3, L0666: 3, L0663: 3, S0053: 3, S0126: 3, S0434: 3, S0026: 3, |
| | | | | | S0212: 2, S0442: 2, S0408: 2, H0747: 2, S0476: 2, H0156: 2, L0021: 2, H0599: 2, S0010: 2, H0014: 2, S0214: 2, |
| | | | | | H0031: 2, H0644: 2, H0628: 2, S0036: 2, H0090: 2, H0616: 2, S0144: 2, S0002: 2, L0598: 2, L0764: 2, L0768: 2, |
| | | | | | L0774: 2, L0806: 2, L0653: 2, L0657: 2, L0659: 2, H0520: 2, H0547: 2, H0539: 2, H0710: 2, S0027: 2, L0779: 2, |
| | | | | | L0588: 2, L0592: 2, L0594: 2, L0366: 2, H0665: 2, H0739: 1, H0170: 1, T0002: 1, S0342: 1, H0717: 1, H0740: 1, |
| | | | | | S0114: 1, S0218: 1, H0650: 1, H0657: 1, S0282: 1, L3659: 1, S0418: 1, S0420: 1, L0005: 1, T0008: 1, H0742: 1, |
| | | | | | H0722: 1, H0735: 1, S0007: 1, S0046: 1, H0749: 1, L3388: 1, H0351: 1, H0406: 1, S0278: 1, H0461: 1, H0601: 1, |
| | | | | | H0586: 1, H0497: 1, H0574: 1, T0039: 1, L3655: 1, H0013: 1, H0427: 1, H0575: 1, H0590: 1, H0421: 1, S0049: 1, |
| | | | | | H0327: 1, H0545: 1, H0046: 1, H0572: 1, H0570: 1, H0050: 1, L0471: 1, H0373: 1, H0510: 1, H0375: 1, S6028: 1, |
| | | | | | H0266: 1, H0271: 1, H0719: 1, H0416: 1, S0340: 1, S0312: 1, H0615: 1, L0483: 1, T0006: 1, H0169: 1, H0674: 1, |
| | | | | | H0163: 1, H0591: 1, H0551: 1, H0264: 1, H0412: 1, H0059: 1, H0494: 1, S0015: 1, S0344: 1, UNKWN: 1, H0529: 1, |
| | | | | | L0520: 1, L0637: 1, L0761: 1, L0667: 1, L0772: 1, L0641: 1, L0648: 1, L0521: 1, L0794: 1, L0649: 1, L0803: 1, |
| | | | | | L0805: 1, L0783: 1, L0384: 1, L5622: 1, L0793: 1, L0664: 1, L0665: 1, S0052: 1, S0428: 1, S0216: 1, H0144: 1, |
| | | | | | L3811: 1, H0658: 1, H0670: 1, H0666: 1, H0672: 1, H0651: 1, L0355: 1, S0328: 1, S0152: 1, H0696: 1, S0406: 1, |
| | | | | | H0555: 1, S0028: 1, S0032: 1, L0744: 1, L0745: 1, L0780: 1, L0362: 1, H0422: 1 and H0721: 1. |
| 176 | HSAVA08 | 580870 | 186 | 66-146 | AR313: 39, AR039: 39, AR299: 18, AR089: 17, AR096: 17, AR185: 16, AR277: 16, AR300: 16, AR104: 12, |
| | | | | | AR316: 12, AR240: 10, AR219: 10, AR218: 9, AR060: 9, AR282: 9, AR055: 8, AR283: 5, |
| | | | | | S0114: 2 |
| 177 | HSAVW42 | 637660 | 187 | 129-197 | AR277: 28, AR283: 24, AR219: 20, AR055: 17, AR218: 16, AR316: 16, AR282: 16, AR313: 15, AR089: 15, |
| | | | | | AR104: 13, AR299: 12, AR185: 11, AR240: 11, AR096: 11, AR039: 10, AR300: 9, AR060: 8, |
| | | | | | H0412: 2, S0114: 1, S0222: 1, H0169: 1, L0520: 1, L0805: 1, L0776: 1, L0750: 1 and L0777: 1. |
| 178 | HSAYC41 | 688057 | 188 | 106-213 | S0114: 1, H0411: 1, H0179: 1, L0665: 1 and H0435: 1. |
| 179 | HSDZM54 | 637870 | 189 | 445-552 | AR060: 424, AR055: 413, AR299: 314, AR185: 295, AR277: 232, AR104: 224, AR283: 216, AR089: 202, |
| | | | | | AR282: 188, AR300: 180, AR039: 167, AR316: 159, AR240: 126, AR096: 104, AR219: 88, AR218: 76, AR313: 63, |
| | | | | | H0455: 1 |
| 180 | HSHBF76 | 715838 | 190 | 129-161 | L0747: 7, H0599: 5, H0622: 4, L0764: 4, L0794: 4, L0659: 4, L0005: 3, H0144: 3, L0749: 3, L0750: 3, S0046: 2, |
| | | | | | H0013: 2, H0046: 2, H0031: 2, L0770: 2, L0761: 2, L0649: 2, L0806: 2, L0809: 2, L0744: 2, L0754: 2, L0755: 2, |
| | | | | | L0588: 2, L0603: 2, H0171: 1, H0685: 1, S0212: 1, S0376: 1, S0132: 1, H0645: 1, H0619: 1, S6022: 1, H0574: 1, |
| | | | | | L0738: 1, L0157: 1, H0030: 1, H0135: 1, H0616: 1, H0494: 1, L0800: 1, L0771: 1, L0773: 1, L0662: 1, L0803: 1, |
| | | | | | L0783: 1, L0789: 1, L0665: 1, S0374: 1, H0539: 1, S3012: 1, S0037: 1, S0027: 1, L0751: 1, L0756: 1, L0779: 1, |
| | | | | | L0731: 1, L0758: 1, H0653: 1 and H0352: 1. |
| 181 | HSIFG47 | 778378 | 191 | 304-345 | H0590: 1 |
| 182 | HSJBY32 | 702020 | 192 | 257-532 | AR055: 3, AR300: 3, AR277: 3, AR299: 2, AR060: 2, AR185: 2, AR039: 2, AR104: 2, AR282: 1, AR283: 1, |
| | | | | | AR240: 1, AR096: 1, AR316: 1, AR089: 1, |
| | | | | | H0729: 1, H0735: 1, S0222: 1, H0271: 1, L0796: 1, L0766: 1, S0032: 1 and L0747: 1. |
| 183 | HSKDR27 | 580874 | 193 | 473-556 | AR055: 9, AR104: 9, AR218: 7, AR060: 7, AR299: 6, AR185: 6, AR039: 6, AR240: 5, AR089: 5, AR219: 5, |
| | | | | | AR300: 5, AR283: 5, AR316: 4, AR313: 4, AR096: 3, AR277: 3, AR282: 2, |
| | | | | | S0027: 95, S0192: 54, S3014: 53, S0126: 42, S0040: 35, H0424: 23, S0028: 22, S0037: 19, S3012: 16, H0213: 13, |
| | | | | | T0006: 12, H0250: 11, S0032: 11, L0744: 11, T0040: 10, H0124: 10, H0429: 10, L0740: 10, L0588: 10, L0754: 9, |
| | | | | | H0545: 8, H0280: 8, S0194: 8, S0196: 7, H0392: 6, T0039: 6, H0150: 6, H0039: 6, S0206: 6, L0743: 6, L0731: 6, |
| | | | | | S0342: 5, S0212: 5, S0045: 5, H0486: 5, H0575: 5, H0014: 5, H0090: 5, H0551: 5, H0100: 5, S0044: 5, S0011: 5, |
| | | | | | H0255: 4, H0318: 4, H0271: 4, S0022: 4, H0031: 4, H0181: 4, H0032: 4, H0038: 4, T0067: 4, S0124: 4, L0747: 4, |
| | | | | | L0749: 4, H0402: 3, H0309: 3, H0046: 3, S0250: 3, H0068: 3, H0087: 3, H0059: 3, S0142: 3, S0053: 3, H0419: 2, |
| | | | | | S0116: 2, S0408: 2, S0132: 2, S0278: 2, S0222: 2, H0331: 2, T0060: 2, H0069: 2, H0427: 2, H0599: 2, T0082: 2, |
| | | | | | H0253: 2, H0546: 2, H0086: 2, H0123: 2, H0024: 2, H0015: 2, H0510: 2, H0428: 2, T0023: 2, H0163: 2, H0063: 2, |
| | | | | | H0509: 2, L0772: 2, L0805: 2, S0052: 2, H0547: 2, H0518: 2, L0748: 2, L0751: 2, L0745: 2, L0750: 2, L0777: 2, |
| | | | | | L0755: 2, L0757: 2, H0445: 2, L0590: 2, L0599: 2, S0026: 2, S0242: 2, H0171: 1, H0265: 1, H0716: 1, H0294: 1, |
| | | | | | S0298: 1, H0662: 1, H0450: 1, S0360: 1, H0329: 1, S0046: 1, H0411: 1, S6022: 1, H0431: 1, H0357: 1, H0455: 1, |
| | | | | | H0586: 1, H0587: 1, L0021: 1, H0042: 1, T0048: 1, H0505: 1, H0052: 1, H0251: 1, H0235: 1, H0231: 1, H0544: 1, |
| | | | | | H0050: 1, H0051: 1, H0071: 1, H0083: 1, H0060: 1, H0266: 1, H0188: 1, H0292: 1, S0214: 1, H0328: 1, H0033: 1, |
| | | | | | H0417: 1, H0553: 1, H0628: 1, H0617: 1, H0606: 1, H0383: 1, H0212: 1, H0388: 1, H0135: 1, H0040: 1, H0487: 1, |
| | | | | | H0413: 1, T0069: 1, H0560: 1, H0538: 1, S0210: 1, L0763: 1, L0646: 1, L0641: 1, L0649: 1, L0803: 1, L0652: 1, |
| | | | | | L0629: 1, L0659: 1, L0787: 1, L0665: 1, H0435: 1, H0528: 1, H0521: 1, H0555: 1, L0779: 1, L0581: 1, S0276: 1 and |
| | | | | | H0008: 1. |
| 184 | HSNAP85 | 784054 | 194 | 941-955 | AR218: 36, AR219: 31, AR313: 20, AR089: 16, AR055: 16, AR299: 13, AR185: 13, AR316: 10, AR060: 9, |
| | | | | | AR104: 8, AR300: 8, AR282: 8, AR096: 7, AR039: 7, AR277: 6, AR283: 5, AR240: 5, |
| | | | | | L0105: 11, L0754: 10, L0803: 9, L0777: 8, L0740: 6, L0770: 4, L0649: 4, L0805: 4, L0731: 4, S0212: 3, L0766: 3, |
| | | | | | L0752: 3, L0599: 3, H0265: 2, L3643: 2, H0656: 2, S0418: 2, S0444: 2, S0360: 2, H0581: 2, L0157: 2, T0023: 2, |
| | | | | | H0038: 2, H0413: 2, S0422: 2, H0529: 2, L0794: 2, L0774: 2, L0654: 2, L0776: 2, L0666: 2, L0663: 2, L0665: 2, |
| | | | | | H0547: 2, H0696: 2, S0027: 2, L0743: 2, L0744: 2, L0750: 2, L0779: 2, L0759: 2, S0192: 2, S0242: 2, H0624: 1, |
| | | | | | S0134: 1, H0341: 1, H0663: 1, H0664: 1, H0729: 1, H0722: 1, S0045: 1, S0476: 1, H0619: 1, H0610: 1, H0497: 1, |
| | | | | | L3816: 1, H0486: 1, H0013: 1, H0575: 1, H0318: 1, H0545: 1, H0569: 1, L0471: 1, H0328: 1, H0615: 1, H0553: 1, |
| | | | | | H0163: 1, H0040: 1, H0551: 1, H0412: 1, S0370: 1, S0438: 1, L0646: 1, L0521: 1, L0662: 1, L0804: 1, L0775: 1, |
| | | | | | L0655: 1, L0658: 1, L0634: 1, L0809: 1, S0374: 1, L3824: 1, L3826: 1, H0435: 1, H0660: 1, H0672: 1, S0378: 1, |
| | | | | | H0754: 1, H0576: 1, S0390: 1, S3014: 1, S0206: 1, L0747: 1, L0758: 1, L0608: 1, S0026: 1, S0194: 1 and H0506: 1. |
| 185 | HSNBM34 | 635131 | 195 | 1508-1696 | AR185: 18, AR039: 18, AR299: 15, AR104: 11, AR055: 9, AR277: 9, AR060: 8, AR096: 8, AR282: 8, AR300: 7, |
| | | | | | AR218: 7, AR240: 7, AR313: 6, AR316: 6, AR219: 5, AR283: 4, AR089: 4, |
| | | | | | H0599: 9, H0144: 8, H0457: 7, H0266: 7, H0494: 6, H0046: 5, H0031: 5, H0553: 5, L5622: 5, H0593: 5, H0521: 5, |
| | | | | | H0734: 4, H0013: 4, H0135: 4, S0436: 4, S0212: 3, H0069: 3, H0036: 3, H0052: 3, S0022: 3, H0708: 3, H0551: 3, |
| | | | | | H0696: 3, S0434: 3, H0713: 2, H0717: 2, S0418: 2, S0354: 2, H0580: 2, H0728: 2, H0733: 2, H0550: 2, H0587: 2, |
| | | | | | H0559: 2, H0706: 2, H0253: 2, H0355: 2, H0039: 2, S0364: 2, H0038: 2, H0634: 2, H0433: 2, H0560: 2, S0440: 2, |
| | | | | | H0646: 2, L3818: 2, S0002: 2, L0506: 2, L5623: 2, H0547: 2, S0126: 2, H0518: 2, H0436: 2, H0478: 2, S3014: 2, |
| | | | | | L0601: 2, H0506: 2, H0265: 1, H0556: 1, T0002: 1, S0114: 1, H0583: 1, S0116: 1, S0356: 1, S0442: 1, S0358: 1, |
| | | | | | S0376: 1, S0360: 1, S0408: 1, H0340: 1, H0742: 1, H0735: 1, S0132: 1, S0476: 1, H0619: 1, S0278: 1, S0222: 1, |
| | | | | | H0409: 1, H0602: 1, H0592: 1, H0586: 1, H0486: 1, H0270: 1, S0280: 1, H0042: 1, H0575: 1, H0122: 1, H0590: 1, |
| | | | | | S0010: 1, T0048: 1, H0318: 1, S0474: 1, S0049: 1, H0173: 1, H0085: 1, H0597: 1, H0231: 1, H0327: 1, H0544: 1, |
| | | | | | H0123: 1, H0050: 1, H0095: 1, H0373: 1, L0163: 1, H0051: 1, T0010: 1, T0023: 1, H0213: 1, L0142: 1, H0383: 1, |
| | | | | | S0366: 1, H0163: 1, H0040: 1, H0616: 1, H0087: 1, H0379: 1, S0038: 1, T0042: 1, S0150: 1, S0144: 1, H0529: 1, |
| | | | | | L0369: 1, L3905: 1, L0766: 1, L0775: 1, L0532: 1, H0693: 1, H0689: 1, H0670: 1, L0602: 1, H0522: 1, S0044: 1, |
| | | | | | L0611: 1, S0027: 1, S0028: 1, L0741: 1, L0743: 1, L0748: 1, L0439: 1, L0592: 1, L0485: 1, L0608: 1, L0366: 1, |
| | | | | | H0668: 1, H0542: 1, H0543: 1 and H0423: 1. |
| 186 | HSQDO85 | 853393 | 196 | 133-168 | AR219: 50, AR218: 47, AR096: 37, AR316: 34, AR313: 28, AR039: 27, AR299: 25, AR277: 22, AR185: 21, |
| | | | | | AR282: 21, AR089: 21, AR300: 20, AR240: 19, AR104: 18, AR283: 17, AR055: 16, AR060: 15, |
| | | | | | S0026: 1 |
| 187 | HSRBE06 | 871264 | 197 | 128-193 | AR313: 33, AR039: 26, AR299: 17, AR277: 15, AR096: 14, AR089: 14, AR300: 13, AR185: 12, AR316: 11, |
| | | | | | AR282: 10, AR218: 9, AR240: 9, AR104: 9, AR219: 7, AR060: 7, AR055: 5, AR283: 4, |
| | | | | | S0011: 3, H0306: 1, H0402: 1, L0004: 1, H0486: 1, H0050: 1, S0051: 1, H0494: 1 and S0002: 1. |
| 188 | HSSDI26 | 560722 | 198 | 253-318 | AR313: 14, AR039: 11, AR299: 9, AR185: 8, AR089: 8, AR277: 8, AR300: 7, AR218: 6, AR060: 6, AR240: 6, |
| | | | | | AR055: 6, AR096: 6, AR316: 5, AR104: 5, AR283: 4, AR282: 4, AR219: 3, |
| | | | | | H0135: 1 |
| 189 | HSSEA64 | 853395 | 199 | 58-246 | AR240: 12, AR055: 11, AR060: 10, AR277: 9, AR282: 9, AR089: 9, AR096: 8, AR218: 8, AR283: 7, AR219: 7, |
| | | | | | AR104: 6, AR300: 6, AR185: 6, AR316: 6, AR299: 5, AR039: 5, AR313: 4, |
| | | | | | H0052: 17, L0745: 11, L0748: 10, L0777: 8, L0755: 8, H0547: 7, L0439: 7, L0766: 6, L0774: 6, L0771: 5, L0662: 4, |
| | | | | | L0746: 4, S0474: 3, L0163: 3, H0059: 3, H0100: 3, L0770: 3, L0775: 3, L0665: 3, L0741: 3, L0751: 3, L0758: 3, |
| | | | | | L0759: 3, H0261: 2, H0333: 2, H0618: 2, H0194: 2, H0545: 2, H0012: 2, H0617: 2, H0135: 2, L0763: 2, L0769: 2, |
| | | | | | L0768: 2, L0657: 2, L0438: 2, H0520: 2, H0539: 2, S0152: 2, L0747: 2, L0752: 2, L0753: 2, S0436: 2, L0588: 2, |
| | | | | | S0040: 1, T0049: 1, H0657: 1, H0663: 1, S0420: 1, S0358: 1, S0360: 1, H0675: 1, H0645: 1, L0717: 1, H0437: 1, |
| | | | | | H0550: 1, S6016: 1, H0497: 1, H0574: 1, H0599: 1, H0575: 1, H0253: 1, H0041: 1, H0620: 1, H0373: 1, H0375: 1, |
| | | | | | H0188: 1, H0181: 1, H0124: 1, H0068: 1, H0040: 1, H0561: 1, S0448: 1, S0440: 1, S0210: 1, S0002: 1, L0638: 1, |
| | | | | | L0639: 1, L0627: 1, L0644: 1, L0773: 1, L0767: 1, L0387: 1, L0375: 1, L0651: 1, L0806: 1, L0776: 1, L0659: 1, |
| | | | | | L0540: 1, L5622: 1, L2261: 1, H0144: 1, H0593: 1, S0126: 1, H0694: 1, H0134: 1, H0555: 1, S0390: 1, S0028: 1, |
| | | | | | L0749: 1, L0786: 1, L0780: 1, L0731: 1, L0757: 1, L0605: 1, L0592: 1, S0026: 1 and S0276: 1. |
| 190 | HSSEF77 | 658725 | 200 | 184-366 | H0617: 7, L0750: 7, H0556: 5, L0769: 5, L0783: 5, L0758: 5, L0759: 5, L0665: 4, L0741: 4, S0132: 3, L0761: 3, |
| | | | | | L0742: 3, L0439: 3, L0755: 3, L0592: 3, H0618: 2, H0620: 2, H0038: 2, L0771: 2, L0662: 2, L0659: 2, L0666: 2, |
| | | | | | S0126: 2, H0670: 2, S0328: 2, S0380: 2, L0747: 2, L0753: 2, L0731: 2, H0395: 1, H0295: 1, H0294: 1, H0657: 1, |
| | | | | | H0656: 1, H0341: 1, H0484: 1, H0663: 1, H0638: 1, S0356: 1, S0444: 1, H0741: 1, L3271: 1, H0549: 1, H0550: 1, |
| | | | | | H0370: 1, H0455: 1, H0632: 1, H0486: 1, T0039: 1, T0112: 1, H0156: 1, H0581: 1, H0052: 1, H0545: 1, H0046: 1, |
| | | | | | H0150: 1, H0081: 1, S0051: 1, H0107: 1, H0061: 1, H0188: 1, H0288: 1, S0250: 1, H0428: 1, H0135: 1, H0163: 1, |
| | | | | | H0090: 1, H0616: 1, T0004: 1, S0438: 1, L0770: 1, L0796: 1, L0637: 1, L0772: 1, L0372: 1, L0646: 1, L0521: 1, |
| | | | | | L0768: 1, L0766: 1, L5574: 1, L0774: 1, L0775: 1, L0375: 1, L0806: 1, L0776: 1, L0807: 1, L0657: 1, L0658: 1, |
| | | | | | L0540: 1, L0384: 1, L0809: 1, L0663: 1, L0438: 1, H0672: 1, H0754: 1, S0188: 1, S0406: 1, H0436: 1, H0576: 1, |
| | | | | | S3014: 1, L0748: 1, L0779: 1, L0757: 1 and H0506: 1. |
| 191 | HSSFE38 | 742512 | 201 | 264-641 | AR218: 169, AR219: 154, AR240: 64, AR185: 42, AR096: 42, AR039: 40, AR055: 36, AR316: 29, AR104: 24, |
| | | | | | AR299: 23, AR089: 21, AR060: 18, AR313: 17, AR283: 14, AR300: 14, AR282: 10, AR277: 8 |
| 192 | HSXCP38 | 895392 | 202 | 211-255 | AR104: 7, AR055: 5, AR060: 4, AR039: 2, AR185: 2, AR240: 2, AR089: 2, AR282: 2, AR277: 2, AR316: 2, |
| | | | | | AR299: 2, AR313: 2, AR300: 2, AR283: 1, AR218: 1, AR096: 1, |
| | | | | | L0439: 3, L3655: 1, H0050: 1, T0010: 1, S0036: 1, L0438: 1 and L0759: 1. |
| 193 | HT1SC27 | 630647 | 203 | 366-449 | AR313: 10, AR039: 9, AR219: 9, AR218: 8, AR185: 7, AR055: 7, AR060: 6, AR089: 6, AR299: 6, AR277: 5, |
| | | | | | AR282: 5, AR316: 5, AR096: 5, AR240: 4, AR104: 4, AR300: 4, AR283: 3, |
| | | | | | H0218: 20, H0219: 7, H0157: 3, H0207: 2, H0169: 1, S0440: 1 and L0749: 1. |
| 194 | HT4FV41 | 853400 | 204 | 39-452 | AR244: 10, AR185: 10, AR204: 9, AR275: 9, AR202: 9, AR194: 9, AR052: 9, AR271: 8, AR246: 8, AR289: 8, |
| | | | | | AR219: 7, AR316: 7, AR104: 7, AR198: 7, AR089: 7, AR277: 7, AR310: 7, AR060: 7, AR309: 7, AR206: 7, |
| | | | | | AR039: 7, AR229: 7, AR282: 7, AR053: 7, AR283: 7, AR269: 6, AR205: 6, AR270: 6, AR312: 6, AR184: 6, |
| | | | | | AR186: 6, AR299: 6, AR096: 6, AR240: 6, AR251: 6, AR274: 6, AR182: 6, AR055: 6, AR033: 6, AR291: 6, |
| | | | | | AR218: 6, AR243: 6, AR266: 6, AR290: 6, AR192: 5, AR268: 5, AR280: 5, AR247: 5, AR213: 5, AR298: 5, |
| | | | | | AR231: 5, AR273: 5, AR313: 5, AR234: 5, AR284: 5, AR296: 5, AR061: 5, AR248: 5, AR238: 5, AR285: 5, |
| | | | | | AR183: 5, AR253: 5, AR300: 5, AR267: 4, AR286: 4, AR315: 4, AR175: 4, AR293: 4, AR294: 4, AR177: 4, |
| | | | | | AR249: 4, AR281: 3, AR227: 3, AR233: 3, AR292: 3, AR263: 3, AR265: 3, AR232: 3, AR295: 3, AR226: 3, |
| | | | | | AR237: 3, AR258: 2, AR314: 2, AR256: 1, AR259: 1, AR179: 1, AR241: 1, |
| | | | | | L0794: 10, L0800: 7, L0769: 6, L0751: 6, L0761: 4, L0809: 4, H0521: 4, L0439: 4, H0585: 3, H0617: 3, H0494: 3, |
| | | | | | L0659: 3, L0665: 3, L0777: 3, H0265: 2, H0255: 2, S0354: 2, S0376: 2, H0370: 2, H0069: 2, H0083: 2, H0040: 2, |
| | | | | | L0770: 2, L0764: 2, L0662: 2, L5622: 2, L0666: 2, L0663: 2, L0438: 2, L0743: 2, L0780: 2, S0436: 2, H0667: 2, |
| | | | | | H0423: 2, S0040: 1, H0713: 1, H0295: 1, H0254: 1, H0638: 1, S0418: 1, S0420: 1, S0360: 1, H0734: 1, S0046: 1, |
| | | | | | S0476: 1, H0587: 1, H0635: 1, H0575: 1, H0004: 1, H0618: 1, H0052: 1, H0194: 1, H0544: 1, H0545: 1, H0373: 1, |
| | | | | | T0010: 1, H0267: 1, H0179: 1, H0622: 1, L0194: 1, H0181: 1, H0124: 1, H0087: 1, H0412: 1, H0413: 1, H0646: 1, |
| | | | | | S0144: 1, L0369: 1, L0640: 1, L0763: 1, L0772: 1, L0646: 1, L0643: 1, L0644: 1, L0768: 1, L0803: 1, L0805: 1, |
| | | | | | L0655: 1, L0518: 1, L0783: 1, L0384: 1, L0789: 1, S0052: 1, L2263: 1, L0710: 1, H0547: 1, H0682: 1, S0152: 1, |
| | | | | | H0187: 1, H0727: 1, S0390: 1, L0752: 1, L0757: 1, L0758: 1, H0665: 1, H0543: 1, H0422: 1 and S0424: 1. |
| 195 | HT5GR59 | 801930 | 205 | 135-230 | AR240: 19, AR096: 15, AR316: 10, AR300: 9, AR055: 9, AR039: 8, AR313: 8, AR282: 8, AR277: 7, AR185: 7, |
| | | | | | AR060: 7, AR219: 7, AR218: 6, AR299: 6, AR104: 6, AR283: 6, AR089: 5, |
| | | | | | H0584: 36, H0585: 22, H0141: 11, H0167: 9, H0457: 7, H0521: 6, S0474: 4, H0575: 3, L0731: 3, H0265: 2, |
| | | | | | H0556: 2, H0581: 2, L0761: 2, H0543: 2, H0140: 1, H0638: 1, S0358: 1, S0140: 1, H0747: 1, H0619: 1, H0497: 1, |
| | | | | | H0559: 1, H0069: 1, H0635: 1, H0427: 1, S0280: 1, H0252: 1, H0477: 1, L0667: 1, L0768: 1, L0775: 1, L0659: 1, |
| | | | | | L0791: 1, L0792: 1, S0053: 1, L0777: 1, L0758: 1, H0445: 1 and H0506: 1. |
| 196 | HTEAG62 | 812332 | 206 | 1017-1085 | AR310: 2, AR282: 2, AR206: 2, AR273: 2, AR186: 1, AR295: 1, AR294: 1, AR175: 1, |
| | | | | | L0766: 6, H0038: 5, L0758: 4, H0616: 3, S0422: 2, L0779: 2, L0752: 2, H0638: 1, S0376: 1, S0132: 1, L3388: 1, |
| | | | | | H0250: 1, L0564: 1, L0794: 1, L0803: 1, L0666: 1, L0777: 1, L0755: 1, H0595: 1, S0434: 1 and H0542: 1. |
| 197 | HTEEW69 | 764835 | 207 | 182-1153 | AR104: 36, AR283: 28, AR219: 27, AR218: 27, AR316: 21, AR277: 20, AR089: 20, AR055: 19, AR096: 18, |
| | | | | | AR313: 18, AR240: 18, AR282: 18, AR185: 16, AR299: 16, AR060: 15, AR039: 14, AR300: 12, |
| | | | | | H0038: 8, H0616: 4, L0779: 3, L0758: 3, L0753: 2, L0032: 1, T0006: 1, H0040: 1, L0768: 1 and H0547: 1. |
| 198 | HTEGS07 | 827700 | 208 | 493-606 | AR283: 22, AR277: 9, AR055: 8, AR218: 8, AR219: 7, AR060: 6, AR104: 6, AR300: 6, AR282: 5, AR240: 5, |
| | | | | | AR039: 4, AR089: 4, AR316: 4, AR185: 4, AR299: 4, AR096: 4, AR313: 3, |
| | | | | | L0804: 2, L0747: 2, L0485: 2, L0604: 2, L0623: 1, H0708: 1, S0366: 1, H0038: 1, L0794: 1, L0775: 1 and L0779: 1. |
| 199 | HTEGS11 | 862066 | 209 | 173-196 | AR219: 12, AR055: 9, AR218: 9, AR185: 9, AR060: 8, AR300: 7, AR240: 6, AR104: 6, AR089: 6, AR282: 6, |
| | | | | | AR299: 6, AR096: 5, AR039: 5, AR316: 4, AR313: 3, AR283: 3, AR277: 3, |
| | | | | | L0748: 8, L0598: 4, L0747: 4, L0770: 3, L0750: 3, L0756: 3, H0645: 2, H0619: 2, L0794: 2, L0666: 2, L0439: 2, |
| | | | | | L0749: 2, L0777: 2, L0731: 2, H0170: 1, S0040: 1, H0713: 1, H0486: 1, H0196: 1, L0471: 1, H0038: 1, L0769: 1, |
| | | | | | L0637: 1, L0761: 1, L0772: 1, L0766: 1, L0775: 1, L0367: 1, L0789: 1, L0793: 1, H0144: 1, H0547: 1, L0758: 1 and |
| | | | | | L0581: 1. |
| 200 | HTEHU59 | 840385 | 210 | 170-274 | AR313: 11, AR218: 10, AR219: 9, AR039: 7, AR316: 6, AR096: 6, AR104: 6, AR277: 5, AR299: 5, AR055: 5, |
| | | | | | AR282: 4, AR089: 4, AR283: 3, AR300: 3, AR060: 3, AR240: 3, AR185: 3, |
| | | | | | S0422: 6, H0038: 4, L0758: 4, L0754: 3, S0360: 2, H0024: 2, L0598: 2, L0766: 2, L0748: 2, L0747: 2, L0756: 2, |
| | | | | | H0583: 1, H0341: 1, S0418: 1, L0005: 1, H0741: 1, H0437: 1, H0369: 1, H0581: 1, H0194: 1, S0050: 1, H0271: 1, |
| | | | | | H0428: 1, T0006: 1, H0068: 1, H0412: 1, H0056: 1, H0494: 1, S0426: 1, L0772: 1, L0646: 1, L0662: 1, L0803: 1, |
| | | | | | L0806: 1, L0776: 1, L0655: 1, L0789: 1, L0792: 1, H0144: 1, S0374: 1, H0670: 1, H0627: 1, S0026: 1 and S0192: 1. |
| 201 | HTEJD29 | 695798 | 211 | 101-172 | H0038: 2 |
| 202 | HTEKM46 | 862069 | 212 | 171-287 | S0422: 6, H0038: 4, L0758: 4, L0754: 3, S0360: 2, H0024: 2, L0598: 2, L0766: 2, L0748: 2, L0747: 2, L0756: 2, |
| | | | | | H0583: 1, H0341: 1, S0418: 1, L0005: 1, H0741: 1, H0437: 1, H0369: 1, H0581: 1, H0194: 1, S0050: 1, H0271: 1, |
| | | | | | H0428: 1, T0006: 1, H0068: 1, H0412: 1, H0056: 1, H0494: 1, S0426: 1, L0772: 1, L0646: 1, L0662: 1, L0803: 1, |
| | | | | | L0806: 1, L0776: 1, L0655: 1, L0789: 1, L0792: 1, H0144: 1, S0374: 1, H0670: 1, H0627: 1, S0026: 1 and S0192: 1. |
| 203 | HTENR63 | 877952 | 213 | 132-302 | AR277: 32, AR283: 29, AR218: 25, AR219: 22, AR282: 21, AR316: 21, AR089: 20, AR313: 19, AR104: 18, |
| | | | | | AR055: 17, AR299: 16, AR096: 16, AR240: 16, AR185: 15, AR300: 14, AR039: 14, AR060: 11, |
| | | | | | L0748: 9, L0777: 6, L0439: 5, L0749: 5, L0766: 4, L0438: 4, L0755: 4, L0752: 3, L0594: 3, L3814: 2, S0212: 2, |
| | | | | | H0014: 2, H0032: 2, H0598: 2, H0038: 2, H0100: 2, L0775: 2, S0330: 2, L0754: 2, L0750: 2, L0731: 2, L0758: 2, |
| | | | | | L0759: 2, L0485: 2, S0192: 2, S0040: 1, H0583: 1, S0356: 1, H0733: 1, S0046: 1, H0747: 1, L3652: 1, H0613: 1, |
| | | | | | H0024: 1, H0373: 1, H0375: 1, H0179: 1, H0166: 1, H0673: 1, H0591: 1, H0616: 1, H0551: 1, H0412: 1, H0129: 1, |
| | | | | | H0529: 1, L0761: 1, L0771: 1, L0804: 1, L0784: 1, L0806: 1, L0655: 1, L0783: 1, L0666: 1, H0144: 1, L3811: 1, |
| | | | | | S0126: 1, S0328: 1, H0539: 1, S0152: 1, L0740: 1, L0756: 1, L0779: 1, L0757: 1, H0445: 1, L0599: 1 and S0026: 1. |
| 204 | HTGGM44 | 842856 | 214 | 179-433 | AR246: 5, AR244: 5, AR184: 5, AR253: 5, AR309: 4, AR313: 4, AR186: 4, AR052: 3, AR206: 3, AR312: 3, |
| | | | | | AR310: 3, AR204: 3, AR274: 3, AR291: 3, AR060: 3, AR055: 3, AR229: 3, AR053: 3, AR292: 3, AR269: 3, |
| | | | | | AR061: 3, AR243: 3, AR205: 3, AR247: 3, AR213: 2, AR299: 2, AR294: 2, AR089: 2, AR273: 2, AR270: 2, |
| | | | | | AR266: 2, AR263: 2, AR039: 2, AR265: 2, AR293: 2, AR316: 2, AR275: 2, AR282: 2, AR267: 2, AR251: 2, |
| | | | | | AR277: 2, AR231: 2, AR283: 2, AR238: 2, AR284: 2, AR185: 2, AR271: 2, AR300: 2, AR182: 2, AR226: 2, |
| | | | | | AR096: 1, AR237: 1, AR033: 1, AR234: 1, AR290: 1, AR240: 1, AR241: 1, AR259: 1, AR194: 1, AR227: 1, |
| | | | | | AR104: 1, AR298: 1, |
| | | | | | L0748: 8, L0805: 2, L0599: 2, S0218: 1, T0040: 1, H0635: 1, S0250: 1, H0212: 1, H0634: 1, H0063: 1, S0002: 1, |
| | | | | | L0766: 1, H0144: 1, S0126: 1 and H0518: 1. |
| 205 | HTHBZ06 | 832477 | 215 | 318-323 | AR218: 86, AR219: 83, AR089: 54, AR104: 50, AR282: 48, AR313: 44, AR283: 40, AR055: 34, AR316: 31, |
| | | | | | AR240: 29, AR185: 27, AR096: 23, AR060: 22, AR299: 22, AR300: 16, AR039: 15, AR277: 11, |
| | | | | | S0414: 9, L0005: 7, L0065: 7, S0360: 6, S0422: 5, H0545: 4, H0648: 4, L0777: 4, L0758: 4, H0716: 3, H0657: 3, |
| | | | | | S0474: 3, L0770: 3, L0666: 3, L0665: 3, L0600: 3, H0674: 2, H0494: 2, L0769: 2, L0638: 2, L0637: 2, L0768: 2, |
| | | | | | L0803: 2, L0774: 2, L0805: 2, L0664: 2, L0438: 2, H0520: 2, H0696: 2, L0751: 2, L0745: 2, L0749: 2, L0756: 2, |
| | | | | | L0779: 2, L0757: 2, L3643: 1, H0484: 1, H0671: 1, S0358: 1, L3649: 1, H0742: 1, H0741: 1, S0132: 1, L0623: 1, |
| | | | | | H0581: 1, S0214: 1, H0063: 1, H0412: 1, H0413: 1, S0002: 1, L0369: 1, L0796: 1, L0662: 1, L0766: 1, L0375: 1, |
| | | | | | L0656: 1, L0659: 1, L0647: 1, L3872: 1, L0663: 1, H0684: 1, S0328: 1, S0350: 1, H0436: 1, L0743: 1, L0754: 1, |
| | | | | | L0755: 1, L0731: 1, S0031: 1, S0436: 1, L0485: 1, L0608: 1, L0362: 1, H0506: 1 and H0352: 1. |
| 206 | HTLAP64 | 603913 | 216 | 173-235 | AR313: 19, AR039: 14, AR299: 12, AR055: 10, AR185: 9, AR316: 8, AR104: 7, AR096: 7, AR300: 6, AR089: 6, |
| | | | | | AR060: 5, AR218: 5, AR282: 4, AR283: 4, AR277: 4, AR219: 3, AR240: 3, |
| | | | | | L0803: 7, L0756: 6, S0422: 4, L0794: 4, L0809: 4, L0754: 4, L0758: 3, S0003: 2, H0615: 2, L0764: 2, L0375: 2, |
| | | | | | L0659: 2, L0783: 2, L0665: 2, L0748: 2, L0731: 2, L0759: 2, L3643: 1, H0686: 1, S6024: 1, L0002: 1, H0662: 1, |
| | | | | | L0005: 1, L3649: 1, H0734: 1, H0749: 1, H0441: 1, H0574: 1, L3653: 1, H0575: 1, H0253: 1, S0474: 1, H0052: 1, |
| | | | | | H0569: 1, H0081: 1, L0471: 1, H0266: 1, H0687: 1, H0622: 1, L0483: 1, H0628: 1, H0606: 1, H0135: 1, H0591: 1, |
| | | | | | H0059: 1, L0763: 1, L0637: 1, L3904: 1, L0772: 1, L0643: 1, L0768: 1, L0364: 1, L0649: 1, L0774: 1, L4558: 1, |
| | | | | | L0368: 1, L4501: 1, L0663: 1, L0664: 1, L2655: 1, H0144: 1, L0352: 1, H0519: 1, H0593: 1, S0126: 1, H0660: 1, |
| | | | | | H0666: 1, H0696: 1, S0406: 1, S0028: 1, L0740: 1, L0745: 1, L0747: 1, L0750: 1, L0779: 1, S0436: 1, L0587: 1, |
| | | | | | L0597: 1, L0591: 1, S0026: 1, L0097: 1 and S0242: 1. |
| 207 | HTLBT80 | 840045 | 217 | 912-1301 | AR251: 22, AR273: 18, AR053: 18, AR309: 16, AR310: 16, AR183: 15, AR313: 15, AR274: 15, AR263: 15, |
| | | | | | AR247: 15, AR312: 14, AR314: 14, AR266: 14, AR265: 14, AR219: 14, AR175: 13, AR218: 13, AR285: 12, |
| | | | | | AR280: 12, AR182: 12, AR268: 12, AR293: 12, AR213: 12, AR052: 12, AR292: 11, AR290: 11, AR286: 11, |
| | | | | | AR267: 11, AR277: 11, AR289: 11, AR315: 11, AR296: 11, AR256: 11, AR295: 11, AR177: 10, AR291: 10, |
| | | | | | AR269: 10, AR271: 10, AR284: 10, AR096: 9, AR243: 9, AR270: 9, AR299: 9, AR283: 9, AR249: 9, AR300: 9, |
| | | | | | AR033: 9, AR253: 9, AR238: 9, AR184: 8, AR179: 8, AR248: 8, AR231: 8, AR298: 8, AR234: 8, AR061: 8, |
| | | | | | AR226: 8, AR282: 8, AR232: 8, AR229: 8, AR316: 8, AR258: 8, AR259: 7, AR233: 7, AR240: 7, AR186: 7, |
| | | | | | AR294: 7, AR185: 7, AR198: 7, AR237: 7, AR275: 6, AR281: 6, AR039: 6, AR192: 6, AR227: 6, AR089: 6, |
| | | | | | AR104: 6, AR246: 6, AR055: 6, AR244: 6, AR202: 5, AR204: 5, AR060: 5, AR206: 4, AR205: 4, AR241: 4, AR194: 1, |
| | | | | | L0659: 6, H0556: 4, H0521: 4, L0439: 4, L0745: 4, L0759: 4, H0657: 3, S0360: 3, L0761: 3, L0662: 3, L0766: 3, |
| | | | | | L0809: 3, H0549: 2, H0392: 2, H0253: 2, H0581: 2, H0620: 2, H0051: 2, H0551: 2, H0494: 2, L0770: 2, L0794: 2, |
| | | | | | L0649: 2, L0665: 2, H0520: 2, S0032: 2, L0741: 2, L0743: 2, L0748: 2, L0747: 2, L0779: 2, L0758: 2, L0605: 2, |
| | | | | | H0650: 1, H0484: 1, H0254: 1, H0402: 1, S0358: 1, H0580: 1, H0741: 1, S0007: 1, S0132: 1, S0476: 1, H0393: 1, |
| | | | | | H0369: 1, H0550: 1, H0409: 1, H0256: 1, H0250: 1, H0042: 1, H0036: 1, H0318: 1, S0049: 1, H0050: 1, H0014: 1, |
| | | | | | H0375: 1, S6028: 1, H0266: 1, H0292: 1, H0428: 1, H0622: 1, H0031: 1, H0617: 1, L0456: 1, H0135: 1, H0040: 1, |
| | | | | | H0379: 1, H0264: 1, H0056: 1, H0623: 1, H0100: 1, H0633: 1, S0002: 1, H0529: 1, L0762: 1, L5575: 1, L0772: 1, |
| | | | | | L0646: 1, L0771: 1, L0773: 1, L0767: 1, L0768: 1, L0803: 1, L0805: 1, L0653: 1, L5622: 1, L4501: 1, L0666: 1, |
| | | | | | H0689: 1, H0690: 1, H0682: 1, H0670: 1, H0522: 1, S0044: 1, H0436: 1, S0027: 1, L0754: 1, L0749: 1, L0753: 1, |
| | | | | | L0731: 1, S0436: 1, H0653: 1, S0192: 1, H0542: 1, H0543: 1, H0423: 1 and S0424: 1. |
| 208 | HTLDU78 | 637702 | 218 | 219-245 | L0758: 3, H0253: 1 and L0779: 1. |
| 209 | HTLEM16 | 779133 | 219 | 1220-1429 | AR104: 96, AR219: 74, AR277: 67, AR283: 59, AR218: 52, AR185: 51, AR089: 49, AR316: 46, AR096: 44, |
| | | | | | AR240: 44, AR313: 42, AR055: 40, AR299: 37, AR282: 37, AR060: 33, AR039: 33, AR300: 24, |
| | | | | | L0439: 31, L0741: 24, H0056: 13, L0748: 12, H0052: 9, H0521: 9, L0776: 8, L0744: 8, L0438: 7, L0754: 7, S0474: 6, |
| | | | | | L0766: 6, L0742: 6, L0731: 6, L0750: 5, S0278: 4, L5566: 4, L0665: 4, H0522: 4, H0556: 3, H0716: 3, H0657: 3, |
| | | | | | S0358: 3, H0580: 3, H0599: 3, S0049: 3, H0009: 3, H0553: 3, H0641: 3, S0142: 3, L0764: 3, L0659: 3, L0666: 3, |
| | | | | | S0126: 3, L0751: 3, H0717: 2, H0656: 2, S0029: 2, S0420: 2, S0360: 2, S0007: 2, H0497: 2, H0486: 2, H0618: 2, |
| | | | | | H0253: 2, H0581: 2, H0046: 2, S0388: 2, T0010: 2, H0039: 2, H0424: 2, L0456: 2, S0036: 2, H0135: 2, H0551: 2, |
| | | | | | H0623: 2, H0494: 2, S0002: 2, L0770: 2, L0796: 2, L5575: 2, L5565: 2, L0761: 2, L0662: 2, L0650: 2, L0383: 2, |
| | | | | | L0663: 2, H0682: 2, L0758: 2, S0434: 2, L0596: 2, L0581: 2, S0242: 2, S0114: 1, H0583: 1, L0422: 1, S0116: 1, |
| | | | | | H0662: 1, H0305: 1, S0418: 1, L0005: 1, S0444: 1, S0046: 1, S0476: 1, H0645: 1, H0437: 1, H0261: 1, H0392: 1, |
| | | | | | H0600: 1, H0586: 1, H0574: 1, L0623: 1, H0013: 1, H0250: 1, H0427: 1, H0002: 1, H0575: 1, T0082: 1, H0590: 1, |
| | | | | | S0010: 1, H0390: 1, T0048: 1, H0318: 1, H0421: 1, H0251: 1, H0232: 1, H0546: 1, H0150: 1, H0041: 1, H0178: 1, |
| | | | | | H0569: 1, H0620: 1, H0051: 1, S0051: 1, H0510: 1, H0416: 1, H0188: 1, S0312: 1, S0314: 1, H0622: 1, H0213: 1, |
| | | | | | H0031: 1, L0143: 1, H0032: 1, L0455: 1, S0366: 1, H0038: 1, H0087: 1, H0264: 1, H0268: 1, H0022: 1, H0560: 1, |
| | | | | | H0625: 1, H0561: 1, S0438: 1, H0509: 1, H0633: 1, H0649: 1, S0144: 1, S0208: 1, H0529: 1, L0769: 1, L0637: 1, |
| | | | | | L0667: 1, L5568: 1, L0774: 1, L0375: 1, L0805: 1, L0653: 1, L0654: 1, L0661: 1, L0807: 1, L0527: 1, L0382: 1, |
| | | | | | L0809: 1, L0793: 1, S0006: 1, S0428: 1, S0053: 1, S0310: 1, L0352: 1, H0547: 1, H0684: 1, H0670: 1, H0660: 1, |
| | | | | | S0152: 1, H0696: 1, S0406: 1, H0555: 1, H0436: 1, S3014: 1, L0743: 1, L0745: 1, L0747: 1, L0749: 1, L0756: 1, |
| | | | | | L0753: 1, L0755: 1, H0445: 1, S0436: 1, L0485: 1, H0667: 1, H0216: 1, H0543: 1, H0422: 1 and H0008: 1. |
| 210 | HTLFA13 | 535937 | 220 | 209-304 | AR313: 11, AR089: 10, AR039: 9, AR096: 8, AR299: 8, AR282: 7, AR277: 7, AR283: 7, AR104: 7, AR219: 7, |
| | | | | | AR060: 7, AR270: 7, AR316: 6, AR218: 6, AR310: 6, AR300: 6, AR183: 5, AR233: 5, AR294: 5, AR185: 5, |
| | | | | | AR237: 5, AR226: 5, AR055: 5, AR238: 5, AR231: 4, AR227: 4, AR296: 4, AR251: 4, AR312: 4, AR240: 4, |
| | | | | | AR033: 4, AR269: 4, AR290: 3, AR285: 3, AR052: 3, AR184: 3, AR295: 3, AR258: 3, AR186: 3, AR292: 3, |
| | | | | | AR274: 2, AR205: 2, AR179: 2, AR053: 2, AR061: 2, AR206: 2, AR309: 2, AR293: 2, AR266: 2, AR273: 2, |
| | | | | | AR259: 1, AR194: 1, AR234: 1, AR182: 1, AR232: 1, AR241: 1, AR284: 1, |
| | | | | | H0253: 2 and S0011: 1. |
| 211 | HTLGI89 | 835069 | 221 | 1802-1915 | AR283: 67, AR277: 61, AR219: 56, AR282: 51, AR104: 48, AR240: 47, AR316: 46, AR218: 45, AR313: 44, |
| | | | | | AR089: 42, AR096: 40, AR185: 37, AR299: 36, AR055: 34, AR300: 32, AR039: 32, AR060: 31, |
| | | | | | L0758: 16, L0748: 10, H0620: 7, L0731: 6, H0246: 5, S0007: 4, H0253: 4, L0769: 4, L0754: 4, H0052: 3, H0100: 3, |
| | | | | | L0638: 3, L5575: 3, L0766: 3, L0650: 3, L0774: 3, S0152: 3, S3014: 3, L0439: 3, H0265: 2, H0556: 2, T0002: 2, |
| | | | | | S6024: 2, H0656: 2, H0341: 2, S0212: 2, S0376: 2, H0619: 2, H0261: 2, S0222: 2, H0318: 2, H0196: 2, H0012: 2, |
| | | | | | T0010: 2, H0068: 2, H0551: 2, H0413: 2, H0494: 2, L0770: 2, L5565: 2, L3905: 2, L0768: 2, L0776: 2, S3012: 2, |
| | | | | | L0741: 2, L0749: 2, L0750: 2, L0759: 2, S0434: 2, L0608: 2, L0595: 2, H0352: 2, S0040: 1, L0760: 1, S0116: 1, |
| | | | | | S0282: 1, H0638: 1, S0418: 1, S0356: 1, S0444: 1, H0730: 1, H0747: 1, S0476: 1, H0393: 1, H0549: 1, H0550: 1, |
| | | | | | H0592: 1, H0333: 1, H0486: 1, T0114: 1, H0250: 1, H0069: 1, S0280: 1, H0156: 1, H0599: 1, H0575: 1, H0036: 1, |
| | | | | | H0618: 1, H0597: 1, H0178: 1, N0006: 1, H0563: 1, H0197: 1, H0199: 1, H0051: 1, H0083: 1, H0060: 1, H0188: 1, |
| | | | | | H0290: 1, H0284: 1, H0428: 1, H0622: 1, L0483: 1, H0124: 1, H0135: 1, H0163: 1, H0040: 1, H0264: 1, H0412: 1, |
| | | | | | L0564: 1, H0130: 1, H0641: 1, S0144: 1, S0002: 1, L0763: 1, L0761: 1, L0372: 1, L0643: 1, L0764: 1, L0771: 1, |
| | | | | | L0648: 1, L0767: 1, L0803: 1, L0804: 1, L0375: 1, L0378: 1, L0659: 1, L0544: 1, L0665: 1, H0703: 1, L0352: 1, |
| | | | | | H0670: 1, S0328: 1, S0330: 1, H0753: 1, H0522: 1, H0134: 1, S0027: 1, L0747: 1, L0756: 1, L0777: 1, L0753: 1, |
| | | | | | S0260: 1, H0445: 1, S0436: 1, L0597: 1, H0653: 1 and S0194: 1. |
| 212 | HTLIF11 | 843506 | 222 | 933-1049 | H0253: 7, H0618: 4, H0620: 3, L0794: 3, L0769: 2, L0768: 2, L0439: 2, H0327: 1, H0051: 1, S0250: 1, S0036: 1, |
| | | | | | L0639: 1, L0761: 1, L0635: 1, L0791: 1, L0664: 1, L0438: 1, H0539: 1, L0741: 1, L0747: 1, L0750: 1, L0756: 1 and |
| | | | | | L0753: 1. |
| 213 | HTNBK13 | 831967 | 223 | 534-599 | L0779: 5, L0731: 4, L0593: 4, H0046: 3, L0776: 3, L0666: 3, H0031: 2, L0772: 2, L0774: 2, L0805: 2, H0670: 2, |
| | | | | | L0439: 2, L0754: 2, L0777: 2, L0758: 2, L0590: 2, T0002: 1, L0717: 1, H0632: 1, L0622: 1, T0082: 1, H0581: 1, |
| | | | | | H0263: 1, T0115: 1, H0597: 1, L0471: 1, H0012: 1, H0620: 1, H0163: 1, T0067: 1, L0770: 1, L0637: 1, L0388: 1, |
| | | | | | L0657: 1, L0382: 1, L0664: 1, S0126: 1, H0660: 1, S0378: 1, H0521: 1, L0747: 1, L0750: 1, L0756: 1, L0752: 1, |
| | | | | | L0755: 1, L0759: 1, S0031: 1, L0599: 1 and L0603: 1. |
| 214 | HTOAM11 | 664508 | 224 | 89-193 | AR313: 30, AR039: 27, AR185: 18, AR299: 16, AR300: 13, AR277: 13, AR096: 13, AR089: 12, AR218: 11, |
| | | | | | AR219: 11, AR316: 9, AR240: 9, AR104: 8, AR060: 7, AR055: 6, AR282: 6, AR283: 3, |
| | | | | | S0010: 1 and H0264: 1. |
| 215 | HTODH83 | 580884 | 225 | 103-201 | AR055: 4, AR060: 4, AR283: 2, AR039: 2, AR104: 2, AR219: 2, AR299: 2, AR185: 2, AR282: 1, AR089: 1, |
| | | | | | AR316: 1, AR240: 1, AR096: 1, AR277: 1, |
| | | | | | H0264: 1, |
| 216 | HTPCO75 | 853645 | 226 | 73-195 | AR104: 12, AR219: 11, AR089: 9, AR039: 9, AR282: 8, AR218: 8, AR313: 8, AR060: 8, AR300: 8, AR055: 7, |
| | | | | | AR316: 7, AR277: 7, AR299: 7, AR096: 7, AR185: 6, AR240: 5, AR283: 4, |
| | | | | | H0039: 5, L0756: 5, S0448: 3, L0805: 3, L0759: 3, H0265: 2, S0354: 2, L0471: 2, H0674: 2, S0422: 2, L0794: 2, |
| | | | | | L0517: 2, L0666: 2, L0779: 2, L0777: 2, L0758: 2, H0170: 1, H0556: 1, S0342: 1, S0134: 1, H0637: 1, H0599: 1, |
| | | | | | H0318: 1, H0263: 1, H0596: 1, H0252: 1, H0428: 1, H0673: 1, H0040: 1, H0264: 1, H0268: 1, H0773: 1, H0538: 1, |
| | | | | | L0764: 1, L0768: 1, L0766: 1, L0804: 1, L0774: 1, L0652: 1, L0527: 1, L0809: 1, L0519: 1, L0791: 1, H0144: 1, |
| | | | | | H0520: 1, H0519: 1, H0689: 1, H0648: 1, S0028: 1, L0439: 1, L0731: 1, H0444: 1, H0445: 1, S0434: 1, S0026: 1, |
| | | | | | S0242: 1 and H0543: 1. |
| 217 | HTSFJ32 | 637720 | 227 | 93-149 | AR104: 9, AR039: 7, AR277: 5, AR282: 4, AR313: 4, AR299: 4, AR240: 3, AR089: 3, AR283: 3, AR300: 3, |
| | | | | | AR096: 3, AR185: 3, AR055: 2, AR316: 2, AR219: 2, AR218: 2, AR060: 2, |
| | | | | | H0556: 1, S0114: 1, H0087: 1, H0538: 1, H0695: 1 and L0774: 1. |
| 218 | HTTCB60 | 853401 | 228 | 84-884 | L0794: 11, L0809: 11, L0750: 9, L0805: 8, L0791: 7, L0747: 7, L0800: 6, L0758: 6, L0759: 6, H0620: 5, L0749: 5, |
| | | | | | S0358: 4, H0135: 4, L0769: 4, L0659: 4, L0780: 4, H0556: 3, L0471: 3, H0040: 3, L0804: 3, S0360: 2, H0393: 2, |
| | | | | | H0550: 2, H0592: 2, H0333: 2, S0049: 2, H0124: 2, S0438: 2, L0771: 2, L0662: 2, L0803: 2, L4501: 2, H0547: 2, |
| | | | | | L3832: 2, L0779: 2, L0755: 2, L0731: 2, S0434: 2, L0603: 2, H0506: 2, H0713: 1, H0717: 1, H0294: 1, H0662: 1, |
| | | | | | H0729: 1, H0734: 1, S0045: 1, H0607: 1, H0586: 1, H0587: 1, L3816: 1, T0040: 1, L3653: 1, S0280: 1, H0590: 1, |
| | | | | | S0010: 1, H0581: 1, H0251: 1, H0041: 1, H0565: 1, H0570: 1, H0123: 1, H0081: 1, H0050: 1, H0188: 1, H0039: 1, |
| | | | | | H0622: 1, H0038: 1, H0063: 1, H0412: 1, H0413: 1, S0440: 1, S0210: 1, S0002: 1, L0763: 1, L0770: 1, L3905: 1, |
| | | | | | L0761: 1, L0641: 1, L0768: 1, L0766: 1, L0375: 1, L0806: 1, L0776: 1, L0789: 1, L0790: 1, L0666: 1, L0663: 1, |
| | | | | | L0665: 1, L2258: 1, L2654: 1, H0520: 1, H0660: 1, H0672: 1, H0539: 1, S0380: 1, H0521: 1, H0696: 1, H0555: 1, |
| | | | | | L0744: 1, L0748: 1, L0757: 1, H0445: 1, L0584: 1, L0589: 1, S0242: 1, S0194: 1, H0008: 1 and H0352: 1. |
| 219 | HTTEE41 | 840950 | 229 | 1171-1197 | AR219: 84, AR218: 59, AR316: 43, AR313: 32, AR104: 24, AR089: 24, AR185: 24, AR039: 23, AR096: 23, |
| | | | | | AR299: 21, AR055: 20, AR060: 17, AR282: 14, AR300: 14, AR283: 11, AR240: 11, AR277: 10, |
| | | | | | H0040: 17, H0251: 14, L0758: 10, L0748: 8, L0731: 8, H0494: 7, L0666: 7, H0144: 7, H0659: 7, L0747: 7, L0749: 7, |
| | | | | | L0757: 7, H0038: 6, H0529: 6, L0770: 6, L0662: 6, L0659: 6, H0013: 5, H0318: 5, H0616: 5, S0440: 5, L0775: 5, |
| | | | | | L0776: 5, H0519: 5, L0588: 5, L0592: 5, H0341: 4, S0360: 4, H0412: 4, L0663: 4, H0547: 4, L0754: 4, L0595: 4, |
| | | | | | H0542: 4, H0543: 4, H0423: 4, H0171: 3, H0657: 3, H0656: 3, S0045: 3, L3388: 3, H0581: 3, S0049: 3, T0110: 3, |
| | | | | | H0046: 3, H0090: 3, H0591: 3, H0551: 3, H0100: 3, H0022: 3, H0625: 3, H0633: 3, S0422: 3, L0375: 3, L0664: 3, |
| | | | | | H0682: 3, S0406: 3, L0740: 3, H0556: 2, H0241: 2, H0638: 2, S0418: 2, L0005: 2, S0442: 2, S0376: 2, H0722: 2, |
| | | | | | H0393: 2, L0717: 2, S0222: 2, H0574: 2, H0486: 2, T0040: 2, L0471: 2, S0051: 2, S0003: 2, H0252: 2, L0483: 2, |
| | | | | | T0006: 2, H0031: 2, H0032: 2, H0124: 2, H0634: 2, H0264: 2, T0042: 2, S0150: 2, H0646: 2, L0763: 2, L0637: 2, |
| | | | | | L0646: 2, L0374: 2, L0764: 2, L0768: 2, L0653: 2, L0665: 2, H0593: 2, H0435: 2, H0658: 2, H0539: 2, S0152: 2, |
| | | | | | L3832: 2, H0521: 2, S3014: 2, S0027: 2, S0028: 2, L0439: 2, L0750: 2, L0777: 2, S0436: 2, L0596: 2, L0608: 2, |
| | | | | | L0604: 2, L0594: 2, L0362: 2, S0026: 2, H0667: 2, S0452: 2, H0506: 2, L0411: 1, H0624: 1, H0170: 1, H0395: 1, |
| | | | | | H0265: 1, T0002: 1, H0220: 1, H0140: 1, H0159: 1, H0686: 1, H0583: 1, H0650: 1, S0212: 1, H0484: 1, H0664: 1, |
| | | | | | L0481: 1, S0356: 1, S0354: 1, S0358: 1, S0444: 1, S0408: 1, L3649: 1, H0580: 1, H0747: 1, H0437: 1, H0431: 1, |
| | | | | | T0104: 1, H0600: 1, H0592: 1, H0586: 1, L3817: 1, H0642: 1, H0632: 1, L2482: 1, T0114: 1, H0244: 1, H0250: 1, |
| | | | | | H0069: 1, H0156: 1, L0021: 1, H0599: 1, H0036: 1, S0346: 1, H0596: 1, H0544: 1, H0009: 1, N0006: 1, L0157: 1, |
| | | | | | H0569: 1, H0123: 1, H0242: 1, H0024: 1, H0083: 1, H0375: 1, H0328: 1, H0615: 1, H0428: 1, H0039: 1, H0622: 1, |
| | | | | | H0213: 1, H0553: 1, L0142: 1, H0628: 1, H0674: 1, H0388: 1, L0456: 1, H0708: 1, H0068: 1, H0598: 1, S0036: 1, |
| | | | | | H0135: 1, H0087: 1, H0380: 1, H0413: 1, H0056: 1, L0351: 1, T0041: 1, H0334: 1, H0561: 1, H0366: 1, S0448: 1, |
| | | | | | S0294: 1, H0130: 1, H0641: 1, H0649: 1, S0208: 1, S0002: 1, S0426: 1, L0520: 1, L0631: 1, L0769: 1, L0638: 1, |
| | | | | | L5565: 1, L0667: 1, L0772: 1, L0372: 1, L0641: 1, L0626: 1, L0794: 1, L0766: 1, L0381: 1, L0650: 1, L0651: 1, |
| | | | | | L0806: 1, L0655: 1, L0807: 1, L0657: 1, L0636: 1, L0518: 1, L0782: 1, L0382: 1, L0809: 1, L3391: 1, L2263: 1, |
| | | | | | L2259: 1, L2262: 1, L0565: 1, H0693: 1, L3827: 1, H0520: 1, S0126: 1, H0689: 1, H0670: 1, H0660: 1, H0666: 1, |
| | | | | | H0648: 1, L0602: 1, H0710: 1, H0518: 1, S0176: 1, H0134: 1, H0555: 1, H0436: 1, H0478: 1, H0631: 1, L0779: 1, |
| | | | | | L0752: 1, S0434: 1, L0605: 1, L0591: 1, L0599: 1, H0665: 1, S0196: 1, L2368: 1, H0008: 1 and H0352: 1. |
| 220 | HTTEZ02 | 702027 | 230 | 250-336 | AR299: 21, AR096: 20, AR313: 20, AR219: 19, AR218: 19, AR039: 17, AR089: 17, AR316: 17, AR185: 15, |
| | | | | | AR104: 14, AR277: 14, AR055: 13, AR282: 12, AR240: 12, AR300: 12, AR283: 11, AR060: 11, |
| | | | | | S0474: 15, L0777: 12, L0758: 10, H0038: 9, S0406: 9, L0748: 9, L0595: 9, L0439: 8, H0040: 7, H0521: 7, L0740: 7, |
| | | | | | L0779: 7, L0747: 6, L0749: 6, L0659: 5, H0599: 4, H0050: 4, H0634: 4, L0770: 4, L0761: 4, L0776: 4, L0663: 4, |
| | | | | | L0565: 4, H0547: 4, S0436: 4, L0605: 4, H0427: 3, H0673: 3, H0068: 3, L0662: 3, L0766: 3, L0666: 3, H0696: 3, |
| | | | | | H0436: 3, L0751: 3, H0445: 3, L0596: 3, H0713: 2, H0583: 2, S0442: 2, S0358: 2, H0733: 2, S0046: 2, H0749: 2, |
| | | | | | S0132: 2, H0619: 2, L0717: 2, H0586: 2, H0013: 2, H0618: 2, H0253: 2, S0010: 2, H0581: 2, H0457: 2, L0471: 2, |
| | | | | | H0057: 2, H0014: 2, H0039: 2, H0553: 2, H0617: 2, T0041: 2, L0769: 2, L0794: 2, L0649: 2, L0775: 2, L0805: 2, |
| | | | | | L0655: 2, L0665: 2, S0374: 2, H0520: 2, H0682: 2, H0658: 2, H0710: 2, S0404: 2, L0742: 2, L0755: 2, L0731: 2, |
| | | | | | L0759: 2, L0591: 2, L0593: 2, H0543: 2, H0624: 1, H0265: 1, H0685: 1, S0342: 1, S0134: 1, S0116: 1, H0341: 1, |
| | | | | | H0459: 1, S0444: 1, S0360: 1, S0408: 1, H0735: 1, S0045: 1, S0476: 1, S0222: 1, H0392: 1, H0415: 1, H0592: 1, |
| | | | | | H0486: 1, L3385: 1, T0109: 1, H0635: 1, L0021: 1, H0098: 1, H0575: 1, H0318: 1, H0421: 1, H0596: 1, L0118: 1, |
| | | | | | H0012: 1, H0373: 1, S6028: 1, H0179: 1, H0719: 1, H0416: 1, H0687: 1, H0252: 1, H0328: 1, H0622: 1, H0032: 1, |
| | | | | | S0366: 1, S0036: 1, H0090: 1, H0591: 1, H0616: 1, H0412: 1, H0623: 1, H0059: 1, H0641: 1, S0344: 1, L0369: 1, |
| | | | | | L0763: 1, L0796: 1, L0637: 1, L5566: 1, L0372: 1, L0764: 1, L0364: 1, L0774: 1, L0378: 1, L0379: 1, L0657: 1, |
| | | | | | L0526: 1, L0664: 1, H0144: 1, H0519: 1, H0593: 1, H0689: 1, H0659: 1, H0672: 1, S0328: 1, S0152: 1, H0522: 1, |
| | | | | | S0390: 1, S0032: 1, L0750: 1, L0756: 1, L0786: 1, S0031: 1, S0434: 1, L0584: 1, L0608: 1, L0601: 1, S0194: 1, |
| | | | | | S0196: 1 and S0456: 1. |
| 221 | HTWEH94 | 561680 | 231 | 66-311 | AR313: 9, AR039: 7, AR096: 5, AR300: 3, AR185: 3, AR089: 3, AR299: 3, AR277: 2, AR316: 2, AR240: 2, |
| | | | | | AR060: 2, AR104: 2, AR218: 1, AR282: 1, AR055: 1, |
| | | | | | L0766: 1 and H0436: 1. |
| 222 | HTXDC77 | 844258 | 232 | 65-520 | AR096: 676, AR240: 444, AR039: 281, AR316: 255, AR219: 252, AR218: 219, AR089: 164, AR313: 162, |
| | | | | | AR299: 150, AR300: 141, AR185: 127, AR282: 113, AR055: 113, AR060: 110, AR283: 94, AR104: 88, AR277: 62, |
| | | | | | S0344: 14, S0212: 4, S0372: 4, H0555: 4, H0581: 3, S0376: 2, H0597: 2, H0265: 1, S0360: 1, S0222: 1, H0046: 1, |
| | | | | | H0264: 1, S0370: 1, S0144: 1, S0142: 1, H0521: 1 and S0027: 1. |
| 223 | HTXDG92 | 658730 | 233 | 216-416 | AR218: 44, AR277: 37, AR283: 37, AR219: 35, AR055: 31, AR316: 30, AR089: 29, AR104: 23, AR299: 21, |
| | | | | | AR240: 20, AR313: 20, AR039: 19, AR282: 19, AR185: 19, AR096: 18, AR060: 17, AR300: 17, |
| | | | | | L0777: 11, H0618: 7, L0438: 6, H0144: 5, L0758: 5, S0410: 4, H0059: 4, L0601: 4, H0556: 3, H0253: 3, H0052: 3, |
| | | | | | H0620: 3, H0617: 3, L0764: 3, L0768: 3, L0744: 3, L0747: 3, H0265: 2, H0341: 2, S0046: 2, S0222: 2, H0013: 2, |
| | | | | | H0069: 2, S0049: 2, H0150: 2, H0087: 2, L0351: 2, L0771: 2, L0766: 2, L0665: 2, H0547: 2, H0659: 2, L0748: 2, |
| | | | | | L0439: 2, L0754: 2, L0749: 2, H0542: 2, L3643: 1, S0040: 1, H0717: 1, H0716: 1, S0114: 1, T0049: 1, H0583: 1, |
| | | | | | H0657: 1, H0656: 1, H0381: 1, H0663: 1, S0358: 1, H0734: 1, S0007: 1, H0747: 1, S0278: 1, H0261: 1, H0550: 1, |
| | | | | | H0392: 1, H0486: 1, T0114: 1, S0010: 1, H0581: 1, H0374: 1, H0327: 1, H0545: 1, H0457: 1, H0012: 1, H0024: 1, |
| | | | | | H0015: 1, H0510: 1, H0594: 1, H0188: 1, H0292: 1, H0286: 1, H0622: 1, H0181: 1, H0135: 1, H0040: 1, H0063: 1, |
| | | | | | H0100: 1, T0041: 1, H0561: 1, S0440: 1, H0509: 1, H0529: 1, L0640: 1, L0770: 1, L0769: 1, L3905: 1, L5566: 1, |
| | | | | | L0773: 1, L0662: 1, L0363: 1, L0774: 1, L0775: 1, L0806: 1, L0559: 1, L0783: 1, L0383: 1, L5623: 1, H0698: 1, |
| | | | | | S0374: 1, H0520: 1, H0519: 1, S0292: 1, S0126: 1, H0682: 1, S0380: 1, H0696: 1, S0027: 1, L0740: 1, L0731: 1, |
| | | | | | H0445: 1, L0605: 1, L0592: 1 and H0543: 1. |
| 224 | HTXET11 | 581521 | 234 | 178-267 | AR240: 7, AR055: 6, AR060: 5, AR283: 5, AR282: 5, AR300: 4, AR218: 4, AR277: 4, AR089: 3, AR185: 3, |
| | | | | | AR104: 3, AR039: 3, AR096: 3, AR316: 3, AR313: 2, AR299: 2, AR219: 2, |
| | | | | | H0265: 1 and S0442: 1. |
| 225 | HTXFA72 | 853410 | 235 | 192-281 | AR313: 47, AR039: 45, AR299: 26, AR089: 23, AR096: 23, AR185: 22, AR300: 20, AR277: 19, AR219: 17, |
| | | | | | AR316: 16, AR240: 14, AR104: 14, AR060: 12, AR218: 11, AR282: 10, AR055: 8, AR283: 5, |
| | | | | | H0265: 1 |
| 226 | HTXJY08 | 637774 | 236 | 108-158 | AR055: 2, AR060: 2, AR300: 2, AR299: 2, AR313: 2, AR185: 1, AR282: 1, AR089: 1, AR039: 1, AR316: 1, AR219: 1, |
| | | | | | H0556: 1, S0442: 1, H0036: 1, H0590: 1, H0024: 1, H0100: 1, L0769: 1, L0667: 1, L0438: 1, L0740: 1 and L0777: 1. |
| 227 | HTXMZ07 | 834881 | 237 | 319-432 | AR277: 20, AR104: 8, AR060: 7, AR055: 7, AR316: 6, AR283: 6, AR240: 6, AR300: 5, AR299: 5, AR096: 5, |
| | | | | | AR282: 5, AR218: 5, AR185: 4, AR039: 4, AR313: 3, AR089: 3, AR219: 3, |
| | | | | | L0439: 6, H0556: 3, S0007: 2, H0253: 2, L0744: 2, L0740: 2, L0731: 2, H0583: 1, H0656: 1, S0442: 1, H0069: 1, |
| | | | | | L0021: 1, H0618: 1, H0581: 1, H0041: 1, H0488: 1, L0770: 1, L0800: 1, L0766: 1, L0803: 1, L0375: 1, L0807: 1, |
| | | | | | L0382: 1, L0791: 1, L0793: 1, L0352: 1, S0432: 1, L0741: 1 and L0779: 1. |
| 228 | HUKBT67 | 844446 | 238 | 273-392 | AR089: 13, AR104: 13, AR055: 12, AR313: 12, AR282: 12, AR240: 11, AR299: 11, AR283: 10, AR096: 10, |
| | | | | | AR060: 9, AR316: 9, AR185: 9, AR039: 9, AR300: 8, AR277: 8, AR218: 8, AR219: 7, |
| | | | | | S0360: 8, L0748: 8, L0659: 6, L0665: 6, L0759: 6, L0789: 5, L0743: 5, S0346: 4, L0662: 4, L0805: 4, L0752: 4, |
| | | | | | H0749: 3, L0717: 3, H0644: 3, L0761: 3, L0776: 3, S0028: 3, L0744: 3, L0754: 3, L0749: 3, L0757: 3, S0010: 2, |
| | | | | | H0059: 2, L3905: 2, L0771: 2, L0804: 2, L0774: 2, L0806: 2, L0809: 2, L0664: 2, L0747: 2, L0758: 2, H0656: 1, |
| | | | | | S0001: 1, H0734: 1, H0619: 1, L3388: 1, H0392: 1, H0592: 1, H0574: 1, T0082: 1, H0581: 1, H0052: 1, H0544: 1, |
| | | | | | H0009: 1, H0081: 1, H0620: 1, H0286: 1, H0591: 1, H0038: 1, T0004: 1, H0386: 1, S0144: 1, S0344: 1, L0763: 1, |
| | | | | | L0667: 1, L0764: 1, L0773: 1, L0794: 1, L0766: 1, L0803: 1, L0650: 1, L0657: 1, L5622: 1, L0793: 1, L0666: 1, |
| | | | | | H0144: 1, L0352: 1, H0660: 1, H0672: 1, S0328: 1, H0696: 1, S0404: 1, S0406: 1, L0742: 1, L0750: 1, L0779: 1, |
| | | | | | L0731: 1, S0031: 1, L0596: 1 and L0604: 1. |
| 229 | HUKDF20 | 566823 | 239 | 214-315 | AR055: 7, AR218: 6, AR060: 6, AR300: 5, AR282: 4, AR104: 4, AR313: 4, AR283: 4, AR185: 4, AR299: 4, |
| | | | | | AR277: 3, AR219: 3, AR089: 3, AR316: 3, AR039: 3, AR240: 3, AR096: 2, |
| | | | | | H0261: 1, H0266: 1 and H0059: 1. |
| 230 | HUSCJ14 | 894699 | 240 | 74-661 | AR239: 10, AR228: 10, AR227: 9, AR237: 9, AR230: 8, AR233: 8, AR287: 8, AR203: 7, AR288: 7, AR176: 6, |
| | | | | | AR184: 6, AR199: 6, AR229: 6, AR215: 6, AR190: 6, AR200: 5, AR245: 5, AR174: 5, AR234: 5, AR191: 5, |
| | | | | | AR180: 4, AR297: 4, AR232: 4, AR226: 4, AR289: 4, AR298: 4, AR194: 4, AR170: 4, AR257: 4, AR061: 3, |
| | | | | | AR292: 3, AR173: 3, AR231: 3, AR262: 3, AR242: 3, AR284: 3, AR286: 3, AR251: 3, AR179: 3, AR236: 3, |
| | | | | | AR238: 3, AR255: 3, AR161: 3, AR189: 3, AR162: 3, AR235: 3, AR293: 3, AR282: 3, AR188: 3, AR294: 3, |
| | | | | | AR165: 3, AR163: 3, AR164: 3, AR166: 3, AR285: 2, AR201: 2, AR181: 2, AR295: 2, AR177: 2, AR247: 2, |
| | | | | | AR290: 2, AR205: 2, AR300: 2, AR225: 2, AR260: 2, AR198: 2, AR261: 2, AR193: 2, AR291: 2, AR268: 2, |
| | | | | | AR175: 2, AR270: 2, AR183: 2, AR211: 2, AR296: 2, AR196: 2, AR185: 2, AR258: 2, AR250: 2, AR240: 2, |
| | | | | | AR178: 2, AR204: 2, AR195: 2, AR060: 2, AR312: 1, AR311: 1, AR210: 1, AR224: 1, AR243: 1, AR299: 1, |
| | | | | | AR269: 1, AR316: 1, AR275: 1, AR186: 1, AR172: 1, AR039: 1, AR267: 1, AR256: 1, AR263: 1, AR055: 1, |
| | | | | | AR089: 1, AR217: 1, |
| | | | | | L2654: 6, L0741: 4, S0192: 4, H0677: 4, H0556: 3, H0013: 3, H0052: 3, L0766: 3, L0744: 3, L0439: 3, L0757: 3, |
| | | | | | H0265: 2, S0040: 2, S0410: 2, H0599: 2, H0545: 2, H0266: 2, H0030: 2, H0135: 2, L3905: 2, L5622: 2, H0520: 2, |
| | | | | | H0547: 2, H0519: 2, L0748: 2, L0756: 2, L0777: 2, L0780: 2, L0758: 2, L0485: 2, L0604: 2, H0739: 1, H0713: 1, |
| | | | | | S0134: 1, S0218: 1, H0656: 1, L2909: 1, S0212: 1, H0663: 1, S0420: 1, L1562: 1, S0360: 1, S0408: 1, H0742: 1, |
| | | | | | S0132: 1, S0476: 1, H0393: 1, H0587: 1, T0040: 1, H0575: 1, H0309: 1, H0009: 1, L0471: 1, H0620: 1, H0510: 1, |
| | | | | | H0290: 1, S0250: 1, S0022: 1, T0023: 1, H0488: 1, H0268: 1, T0041: 1, T0042: 1, H0538: 1, S0210: 1, L0763: 1, |
| | | | | | L0800: 1, L0771: 1, L0794: 1, L0804: 1, L0774: 1, L0775: 1, L5623: 1, L0793: 1, L2652: 1, L2257: 1, L2260: 1, |
| | | | | | L0710: 1, L2262: 1, H0144: 1, H0593: 1, H0435: 1, H0521: 1, H0555: 1, L0743: 1, L0754: 1, L0779: 1, L0752: 1, |
| | | | | | S0031: 1, S0436: 1, L0596: 1, L0605: 1, L0601: 1, S0106: 1, H0667: 1, S0276: 1 and L3576: 1. |
| 231 | HUSGL67 | 792637 | 241 | 350-493 | AR252: 82, AR250: 77, AR253: 70, AR222: 49, AR219: 44, AR218: 40, AR254: 37, AR169: 32, AR171: 31, |
| | | | | | AR168: 30, AR214: 28, AR217: 27, AR221: 25, AR215: 22, AR309: 22, AR096: 21, AR316: 20, AR170: 20, |
| | | | | | AR216: 19, AR172: 18, AR223: 18, AR264: 17, AR224: 16, AR308: 16, AR312: 15, AR263: 15, AR183: 14, |
| | | | | | AR268: 13, AR313: 13, AR039: 13, AR225: 12, AR311: 11, AR180: 10, AR291: 10, AR271: 10, AR181: 9, |
| | | | | | AR269: 9, AR240: 9, AR177: 9, AR176: 9, AR242: 8, AR299: 8, AR229: 8, AR213: 8, AR173: 8, AR290: 8, |
| | | | | | AR235: 8, AR247: 8, AR179: 8, AR243: 7, AR270: 7, AR266: 7, AR182: 7, AR238: 7, AR178: 7, AR245: 7, |
| | | | | | AR189: 7, AR053: 7, AR246: 6, AR267: 6, AR272: 6, AR190: 6, AR089: 6, AR165: 6, AR175: 6, AR193: 6, |
| | | | | | AR275: 6, AR164: 6, AR162: 6, AR166: 6, AR261: 6, AR212: 6, AR161: 6, AR163: 5, AR289: 5, AR300: 5, |
| | | | | | AR174: 5, AR211: 5, AR199: 5, AR234: 5, AR197: 5, AR297: 5, AR200: 5, AR210: 5, AR296: 5, AR282: 5, |
| | | | | | AR295: 5, AR237: 5, AR198: 5, AR283: 4, AR204: 4, AR287: 4, AR231: 4, AR191: 4, AR288: 4, AR285: 4, |
| | | | | | AR230: 4, AR257: 4, AR274: 4, AR055: 4, AR033: 4, AR195: 4, AR061: 4, AR188: 4, AR196: 4, AR236: 4, |
| | | | | | AR293: 4, AR294: 3, AR185: 3, AR104: 3, AR239: 3, AR286: 3, AR226: 3, AR203: 3, AR277: 3, AR060: 3, |
| | | | | | AR205: 3, AR262: 3, AR255: 3, AR228: 3, AR201: 3, AR256: 3, AR260: 2, AR233: 2, AR258: 2, AR232: 2, |
| | | | | | AR227: 2, AR192: 1, |
| | | | | | S0358: 2, S0116: 1, S0360: 1, S0045: 1, H0497: 1, H0486: 1, H0250: 1, S0010: 1, S0474: 1, H0266: 1, H0271: 1, |
| | | | | | T0006: 1, H0412: 1, L3815: 1, L0766: 1, L2258: 1, H0710: 1, H0518: 1, S3014: 1 and H0543: 1. |
| 232 | HUSGU40 | 684975 | 242 | 500-640 | AR218: 67, AR219: 57, AR096: 53, AR240: 49, AR283: 44, AR313: 43, AR316: 37, AR089: 33, AR039: 32, |
| | | | | | AR185: 29, AR277: 25, AR282: 24, AR104: 24, AR060: 23, AR299: 23, AR300: 22, AR055: 19 |
| 233 | HUSIR18 | 762858 | 243 | 83-151 | L0748: 4, H0622: 3, L0777: 3, H0624: 2, H0013: 2, H0520: 2, H0539: 2, L0439: 2, L0754: 2, L0747: 2, L0757: 2, |
| | | | | | L0758: 2, L0593: 2, L0002: 1, H0664: 1, H0580: 1, S0007: 1, H0497: 1, H0333: 1, H0599: 1, H0581: 1, L0483: 1, |
| | | | | | H0598: 1, H0040: 1, H0412: 1, L0351: 1, T0041: 1, L0769: 1, L0771: 1, L0662: 1, L0767: 1, L0768: 1, L0766: 1, |
| | | | | | L0381: 1, L0806: 1, L0656: 1, L0659: 1, L0809: 1, L0663: 1, L0665: 1, H0672: 1, S0152: 1, L0740: 1, L0749: 1, |
| | | | | | L0750: 1, L0779: 1, L0752: 1, L0480: 1, L0591: 1 and H0543: 1. |
| 234 | HUVDJ48 | 564853 | 244 | 196-213 | AR055: 6, AR060: 5, AR283: 5, AR039: 5, AR185: 4, AR096: 4, AR240: 4, AR104: 4, AR299: 4, AR300: 3, |
| | | | | | AR089: 3, AR316: 3, AR313: 3, AR282: 3, AR218: 2, AR277: 2, AR219: 2, |
| | | | | | H0393: 1, H0056: 1 and L0662: 1. |
| 235 | HWDAC26 | 821335 | 245 | 242-349 | AR096: 144, AR218: 136, AR219: 123, AR316: 112, AR240: 70, AR089: 66, AR104: 55, AR313: 49, AR060: 49, |
| | | | | | AR185: 48, AR299: 46, AR039: 41, AR055: 35, AR283: 22, AR282: 22, AR277: 21, AR300: 19, AR198: 5, |
| | | | | | AR184: 5, AR183: 5, AR194: 4, AR284: 4, AR270: 4, AR229: 4, AR269: 3, AR292: 3, AR310: 3, AR182: 3, |
| | | | | | AR265: 3, AR175: 3, AR238: 3, AR293: 3, AR268: 2, AR294: 2, AR291: 2, AR213: 2, AR192: 2, AR286: 2, |
| | | | | | AR312: 2, AR234: 2, AR226: 2, AR296: 2, AR249: 2, AR1586: 2, AR177: 2, AR053: 2, AR290: 2, AR285: 2, |
| | | | | | AR227: 2, AR258: 2, AR052: 2, AR266: 2, AR205: 1, AR237: 1, AR298: 1, AR179: 1, AR274: 1, AR241: 1, |
| | | | | | AR289: 1, AR233: 1, AR247: 1, AR295: 1, AR256: 1, AR280: 1, AR259: 1, AR231: 1, |
| | | | | | H0580: 1, S0300: 1, H0600: 1, L0783: 1, L0438: 1, L0439: 1 and L0758: 1. |
| 236 | HWDAJ01 | 794016 | 246 | 288-362 | AR282: 2, AR060: 2, AR055: 2, AR185: 2, AR283: 1, AR104: 1, AR316: 1, AR039: 1, AR218: 1, |
| | | | | | H0600: 1 |
| 237 | HBDAB91 | 864374 | 247 | 671-760 | AR282: 3, AR219: 1, |
| | | | | | H0551: 2, L0803: 2, L0439: 2, L0750: 2, S0308: 2, L0644: 1, L0655: 1, L0809: 1, L0780: 1 and L0752: 1. |
| 238 | HILCA24 | 869856 | 248 | 191-1174 | AR316: 4, AR282: 2, AR096: 1, AR299: 1, AR039: 1, |
| | | | | | L0748: 4, H0090: 2, L0659: 2, H0521: 2, L0777: 2, L0608: 2, H0543: 2, T0002: 1, S0114: 1, L3658: 1, S0358: 1, |
| | | | | | S0408: 1, L3649: 1, T0109: 1, H0581: 1, H0622: 1, H0031: 1, H0644: 1, S0002: 1, L0657: 1, L0526: 1, L0789: 1, |
| | | | | | L0664: 1, S0380: 1, H0522: 1, L0749: 1 and L0779: 1. |
| 239 | HYABC84 | 865064 | 249 | 1080-1268 | AR313: 19, AR219: 16, AR218: 13, AR104: 13, AR096: 11, AR316: 11, AR240: 10, AR299: 10, AR089: 10, |
| | | | | | AR282: 9, AR185: 9, AR039: 9, AR283: 8, AR277: 7, AR060: 6, AR055: 5, AR300: 5 |
| 240 | HE2CA60 | 888705 | 250 | 1731-1754 | AR313: 86, AR299: 44, AR277: 42, AR283: 37, AR039: 37, AR316: 36, AR218: 34, AR096: 34, AR219: 34, |
| | | | | | AR089: 32, AR185: 32, AR104: 30, AR282: 23, AR300: 23, AR055: 22, AR060: 16, AR240: 16, |
| | | | | | H0305: 16, L0777: 11, L0471: 10, S0422: 9, L0766: 9, H0624: 8, H0013: 7, H0170: 6, L2551: 6, H0046: 6, L0665: 6, |
| | | | | | L0598: 5, L0662: 5, L0776: 5, H0547: 5, L0758: 5, L0589: 5, H0171: 4, L0659: 4, L0666: 4, L0663: 4, L0756: 4, |
| | | | | | L0731: 4, S0358: 3, L2744: 3, L3655: 3, H0581: 3, H0457: 3, S0406: 3, L0744: 3, L0439: 3, L0752: 3, S0436: 3, |
| | | | | | H0542: 3, H0543: 3, L3643: 2, H0650: 2, H0657: 2, S0116: 2, S0442: 2, S0354: 2, L0717: 2, S0414: 2, H0486: 2, |
| | | | | | T0040: 2, H0318: 2, H0421: 2, H0428: 2, H0553: 2, H0090: 2, H0040: 2, H0063: 2, H0641: 2, L0769: 2, L0761: 2, |
| | | | | | L0764: 2, L0650: 2, L0774: 2, L0805: 2, L0657: 2, H0144: 2, L3811: 2, L3832: 2, H0521: 2, S0404: 2, L0741: 2, |
| | | | | | L0740: 2, L0747: 2, L0759: 2, S0434: 2, L0362: 2, H0685: 1, S0218: 1, L0785: 1, H0341: 1, H0255: 1, H0663: 1, |
| | | | | | H0662: 1, H0402: 1, S0376: 1, S0360: 1, S0410: 1, L3645: 1, L3646: 1, H0637: 1, H0741: 1, H0722: 1, H0735: 1, |
| | | | | | S0046: 1, H0749: 1, S0300: 1, L2758: 1, L2767: 1, L3388: 1, S0222: 1, H0592: 1, H0586: 1, H0587: 1, H0559: 1, |
| | | | | | L3653: 1, H0427: 1, L0021: 1, H0037: 1, H0746: 1, H0263: 1, H0544: 1, H0050: 1, H0057: 1, L0163: 1, H0051: 1, |
| | | | | | S0022: 1, H0328: 1, T0023: 1, H0673: 1, H0674: 1, H0591: 1, H0038: 1, H0551: 1, T0067: 1, H0100: 1, L0065: 1, |
| | | | | | S0440: 1, H0649: 1, H0529: 1, L0369: 1, L0763: 1, L0667: 1, L0630: 1, L0372: 1, L0521: 1, L0533: 1, L0775: 1, |
| | | | | | L0651: 1, L0806: 1, L0655: 1, L0661: 1, L0807: 1, L0656: 1, L0809: 1, L3872: 1, L0790: 1, L0664: 1, L2655: 1, |
| | | | | | L3663: 1, S0374: 1, L2706: 1, H0520: 1, H0435: 1, H0660: 1, H0672: 1, S0328: 1, H0539: 1, S0380: 1, H0753: 1, |
| | | | | | S0004: 1, H0696: 1, L0748: 1, L0754: 1, L0750: 1, L0753: 1, S0031: 1, H0444: 1, L0588: 1, L0605: 1, L0485: 1, |
| | | | | | H0216: 1, S0242: 1, H0423: 1, S0458: 1 and H0721: 1. |
| 241 | HPQAX38 | 845752 | 251 | 295-345 | AR313: 99, AR039: 86, AR300: 47, AR299: 43, AR096: 43, AR185: 41, AR089: 37, AR277: 36, AR104: 30, |
| | | | | | AR240: 30, AR219: 29, AR316: 28, AR218: 23, AR282: 20, AR060: 19, AR055: 12, AR283: 6, |
| | | | | | S0136: 462 and H0413: 1. |
| 242 | HE8FD92 | 901142 | 252 | 2141-2272 | AR055: 6, AR299: 6, AR060: 6, AR240: 5, AR218: 5, AR219: 5, AR300: 5, AR185: 5, AR089: 4, AR316: 3, |
| | | | | | AR096: 3, AR104: 3, AR039: 3, AR277: 3, AR283: 2, AR282: 2, AR313: 2 |

[0106] Table 1C summarizes additional polynucleotides encompassed by the invention (including cDNA clones related to the sequences (Clone ID:), contig sequences (contig identifier (Contig ID:) contig nucleotide sequence identifiers (SEQ ID NO:X)), and genomic sequences (SEQ ID NO:B). The first column provides a unique clone identifier, “Clone ID:”, for a cDNA clone related to each contig sequence. The second column provides the sequence identifier, “SEQ ID NO:X”, for each contig sequence. The third column provides a unique contig identifier, “Contig ID:” for each contig sequence. The fourth column, provides a BAC identifier “BAC ID NO:A” for the BAC clone referenced in the corresponding row of the table. The fifth column provides the nucleotide sequence identifier, “SEQ ID NO:B” for a fragment of the BAC clone identified in column four of the corresponding row of the table. The sixth column, “Exon From-To”, provides the location (i.e., nucleotide position numbers) within the polynucleotide sequence of SEQ ID NO:B which delineate certain polynucleotides of the invention that are also exemplary members of polynucleotide sequences that encode polypeptides of the invention (e.g., polypeptides containing amino acid sequences encoded by the polynucleotide sequences delineated in column six, and fragments and variants thereof).

TABLE 1C

| | | | | SEQ ID | EXON |
|---|---|---|---|---|---|
| cDNA Clone ID | SEQ ID NO: X | CONTIG ID: | BAC ID: A | NO: B | From-To |
| H6BSF56 | 11 | 762968 | AC069362 | 517 | 1-131 |
| H6BSF56 | 11 | 762968 | AC027584 | 518 | 1-162 |
| H6BSF56 | 11 | 762968 | AC011101 | 519 | 1-100 |
| H6BSF56 | 11 | 762968 | AC073446 | 520 | 1-140 |
| H6BSF56 | 11 | 762968 | AC026556 | 521 | 1-114 |
| H6BSF56 | 11 | 762968 | AL136171 | 522 | 1-61 |
| H6BSF56 | 11 | 762968 | AC025975 | 523 | 1-136 |
| H6BSF56 | 11 | 762968 | AC073219 | 524 | 1-123 |
| H6BSF56 | 11 | 762968 | AL162741 | 525 | 1-45 |
| H6BSF56 | 11 | 762968 | AC027584 | 526 | 1-368 |
| H6BSF56 | 11 | 762968 | AC073446 | 527 | 1-52 |
| | | | | | 2626-2925 |
| H6BSF56 | 11 | 762968 | AL162741 | 528 | 1-102 |
| H6EEC72 | 13 | 889401 | AC012314 | 529 | 1-181 |
| | | | | | 1281-1463 |
| | | | | | 2719-2983 |
| | | | | | 3158-3411 |
| | | | | | 3804-6347 |
| | | | | | 6745-6879 |
| | | | | | 7118-7319 |
| | | | | | 7420-7521 |
| | | | | | 7859-8305 |
| | | | | | 8552-8602 |
| | | | | | 9988-10334 |
| | | | | | 10415-10778 |
| | | | | | 11003-11127 |
| | | | | | 11210-11303 |
| | | | | | 11334-11832 |
| | | | | | 13093-13145 |
| | | | | | 13703-13837 |
| | | | | | 13918-14152 |
| | | | | | 15415-15511 |
| | | | | | 15613-15742 |
| | | | | | 15998-16087 |
| | | | | | 16231-16307 |
| | | | | | 16447-17211 |
| | | | | | 18520-18796 |
| | | | | | 21777-22001 |
| H6EEC72 | 13 | 889401 | AC009968 | 530 | 1-180 |
| | | | | | 1275-1457 |
| | | | | | 2712-2976 |
| | | | | | 3150-3403 |
| | | | | | 3796-6332 |
| | | | | | 6730-6864 |
| | | | | | 7103-7303 |
| | | | | | 7404-7505 |
| | | | | | 7843-8289 |
| | | | | | 8536-8586 |
| | | | | | 9970-10312 |
| | | | | | 10393-10756 |
| | | | | | 10981-11105 |
| | | | | | 11188-11805 |
| | | | | | 13068-13120 |
| | | | | | 13678-13812 |
| | | | | | 13905-13994 |
| H6EEC72 | 13 | 889401 | AC012314 | 531 | 1-43 |
| | | | | | 861-1031 |
| | | | | | 1576-1743 |
| | | | | | 1924-2132 |
| | | | | | 2203-2432 |
| | | | | | 2473-2905 |
| | | | | | 3177-3360 |
| | | | | | 3651-4332 |
| | | | | | 4422-4583 |
| | | | | | 4830-4995 |
| | | | | | 5086-5365 |
| H6EEC72 | 13 | 889401 | AC009968 | 532 | 1-43 |
| | | | | | 857-1027 |
| | | | | | 1570-1737 |
| | | | | | 1918-2126 |
| | | | | | 2197-2426 |
| | | | | | 2467-2899 |
| | | | | | 3171-3354 |
| | | | | | 3644-4326 |
| | | | | | 4416-4577 |
| | | | | | 4824-4989 |
| | | | | | 5080-5360 |
| H6EEU40 | 14 | 757048 | AC026285 | 533 | 1-414 |
| | | | | | 440-1918 |
| H6EEU40 | 14 | 757048 | AC023920 | 534 | 1-416 |
| | | | | | 442-1920 |
| H6EEU40 | 14 | 757048 | AC026285 | 535 | 1-1458 |
| | | | | | 1729-1836 |
| H6EEU40 | 14 | 757048 | AC023920 | 536 | 1-1459 |
| | | | | | 1730-1837 |
| HACAB68 | 15 | 584773 | AL160283 | 537 | 1-2811 |
| HACAB68 | 15 | 584773 | AL354793 | 538 | 1-3734 |
| | | | | | 3843-4723 |
| HACAB68 | 15 | 584773 | AL356058 | 539 | 1-3055 |
| | | | | | 3165-4045 |
| HACBJ56 | 16 | 847112 | AC069497 | 540 | 1-117 |
| | | | | | 2470-3367 |
| | | | | | 4908-5262 |
| | | | | | 5641-5756 |
| | | | | | 7886-8200 |
| | | | | | 9815-11138 |
| HACBJ56 | 16 | 847112 | AC007104 | 541 | 1-802 |
| | | | | | 2342-2695 |
| | | | | | 3074-3189 |
| | | | | | 5319-5633 |
| | | | | | 7248-8571 |
| HACBJ56 | 16 | 847112 | AC069497 | 542 | 1-453 |
| HACBJ56 | 16 | 847112 | AC007104 | 543 | 1-453 |
| HADMB15 | 17 | 847116 | AC026666 | 544 | 1-385 |
| | | | | | 406-780 |
| HADMB15 | 17 | 847116 | AC026281 | 545 | 1-114 |
| | | | | | 430-875 |
| | | | | | 896-1262 |
| HAGFS57 | 18 | 847120 | AC021238 | 546 | 1-140 |
| | | | | | 3343-3636 |
| | | | | | 5052-5179 |
| | | | | | 5712-5796 |
| | | | | | 6486-6918 |
| | | | | | 7867-8404 |
| | | | | | 8934-9513 |
| | | | | | 9711-10538 |
| | | | | | 10984-11992 |
| | | | | | 12080-12349 |
| | | | | | 12485-12857 |
| | | | | | 13895-14212 |
| | | | | | 14994-15054 |
| | | | | | 15169-15297 |
| | | | | | 16132-16211 |
| | | | | | 17721-17811 |
| | | | | | 18135-18354 |
| | | | | | 18363-18444 |
| | | | | | 19661-19720 |
| | | | | | 19841-20784 |
| | | | | | 20920-21236 |
| | | | | | 22168-24079 |
| HAGFS57 | 18 | 847120 | AC066613 | 547 | 1-433 |
| | | | | | 1382-1919 |
| | | | | | 2449-3028 |
| | | | | | 3226-4053 |
| | | | | | 4499-5507 |
| | | | | | 5595-5864 |
| | | | | | 6000-6372 |
| | | | | | 7410-7727 |
| | | | | | 8509-8569 |
| | | | | | 8684-8812 |
| | | | | | 9647-9726 |
| | | | | | 11236-11326 |
| | | | | | 11650-11869 |
| | | | | | 11878-11959 |
| | | | | | 13176-13235 |
| | | | | | 13356-14299 |
| | | | | | 14435-14752 |
| | | | | | 15684-17595 |
| HAJAY92 | 21 | 845601 | AL353726 | 548 | 1-2332 |
| HAJAY92 | 21 | 845601 | AL353726 | 549 | 1-115 |
| HAJAY92 | 21 | 845601 | AL353726 | 550 | 1-115 |
| HATCD80 | 23 | 826098 | AL158801 | 551 | 1-1974 |
| HATCD80 | 23 | 826098 | AL158801 | 552 | 1-90 |
| HATEH20 | 24 | 836056 | AC006207 | 553 | 1-2845 |
| HATEH20 | 24 | 836056 | AC006207 | 554 | 1-76 |
| | | | | | 1150-1290 |
| | | | | | 1699-2395 |
| HBAGD86 | 25 | 838799 | AC016755 | 555 | 1-41 |
| | | | | | 1648-1993 |
| | | | | | 2035-3552 |
| | | | | | 3554-6713 |
| HBAGD86 | 25 | 838799 | AC016755 | 556 | 1-161 |
| | | | | | 696-809 |
| | | | | | 2256-2753 |
| | | | | | 6910-6991 |
| | | | | | 7733-7857 |
| | | | | | 9267-9458 |
| | | | | | 10650-10734 |
| | | | | | 11114-11562 |
| | | | | | 11678-11801 |
| | | | | | 12524-12817 |
| | | | | | 14494-15914 |
| HBAGD86 | 25 | 838799 | AC016755 | 557 | 1-217 |
| HBGNC72 | 27 | 892131 | AC016588 | 558 | 1-67 |
| | | | | | 319-423 |
| | | | | | 3335-3462 |
| | | | | | 3594-3680 |
| | | | | | 4721-5143 |
| | | | | | 5551-6677 |
| HBHAA05 | 28 | 603174 | AL353743 | 559 | 1-677 |
| HBHAA05 | 28 | 603174 | AL161453 | 560 | 1-677 |
| HBHAA05 | 28 | 603174 | AL161453 | 561 | 1-339 |
| HBHAA81 | 29 | 846465 | AC006059 | 562 | 1-230 |
| | | | | | 1619-1699 |
| | | | | | 1953-2090 |
| | | | | | 2986-3054 |
| | | | | | 3665-3786 |
| | | | | | 3902-4406 |
| | | | | | 4457-4674 |
| | | | | | 5129-5531 |
| | | | | | 5660-5811 |
| | | | | | 5934-5969 |
| | | | | | 7563-7959 |
| | | | | | 8086-9195 |
| | | | | | 9591-9735 |
| | | | | | 9788-10149 |
| HBHAA81 | 29 | 846465 | AC018471 | 563 | 1-230 |
| | | | | | 1619-1699 |
| | | | | | 1965-2090 |
| | | | | | 2986-3054 |
| | | | | | 3665-3786 |
| | | | | | 3902-4405 |
| | | | | | 4456-4673 |
| | | | | | 5128-5530 |
| | | | | | 5659-5810 |
| | | | | | 5933-5968 |
| | | | | | 7561-7957 |
| | | | | | 8084-9193 |
| | | | | | 9589-9733 |
| | | | | | 9786-10146 |
| HBHAA81 | 29 | 846465 | AC006059 | 564 | 1-340 |
| | | | | | 501-802 |
| HBHAA81 | 29 | 846465 | AC006059 | 565 | 1-661 |
| | | | | | 1538-1684 |
| | | | | | 3489-3680 |
| | | | | | 3832-3933 |
| | | | | | 4241-4410 |
| | | | | | 5782-5872 |
| | | | | | 5998-6150 |
| HBHAA81 | 29 | 846465 | AC018471 | 566 | 1-661 |
| | | | | | 1539-1672 |
| HBHAA81 | 29 | 846465 | AC018471 | 567 | 1-340 |
| | | | | | 501-802 |
| HBJAB02 | 31 | 837309 | AC015651 | 568 | 1-35 |
| | | | | | 159-252 |
| | | | | | 410-783 |
| | | | | | 786-830 |
| | | | | | 953-1035 |
| | | | | | 1452-1553 |
| | | | | | 1651-2071 |
| | | | | | 2161-2264 |
| | | | | | 2352-2454 |
| | | | | | 2494-2758 |
| | | | | | 2847-3006 |
| | | | | | 3135-3272 |
| | | | | | 3477-4138 |
| | | | | | 4907-5738 |
| | | | | | 5972-6059 |
| | | | | | 6132-6367 |
| | | | | | 6650-6834 |
| | | | | | 6915-7010 |
| | | | | | 7091-7658 |
| | | | | | 7662-9457 |
| | | | | | 10122-10222 |
| | | | | | 11415-11534 |
| | | | | | 12386-12418 |
| | | | | | 13253-13584 |
| | | | | | 13635-13867 |
| | | | | | 14881-15326 |
| | | | | | 15851-16013 |
| | | | | | 16529-16816 |
| | | | | | 17430-17529 |
| | | | | | 18140-18269 |
| | | | | | 18634-18734 |
| | | | | | 19189-19369 |
| | | | | | 20434-21105 |
| | | | | | 21912-22008 |
| HBJAB02 | 31 | 837309 | AC015651 | 569 | 1-2097 |
| | | | | | 5308-5495 |
| | | | | | 5696-5742 |
| | | | | | 5890-6249 |
| | | | | | 7370-7525 |
| | | | | | 7850-8236 |
| | | | | | 8359-8463 |
| | | | | | 8597-8770 |
| | | | | | 8919-9028 |
| | | | | | 9213-9353 |
| | | | | | 9517-9639 |
| | | | | | 9765-9874 |
| | | | | | 9944-11023 |
| | | | | | 11124-11219 |
| | | | | | 11315-11613 |
| | | | | | 11708-12241 |
| | | | | | 12431-12666 |
| | | | | | 12744-12802 |
| | | | | | 12976-13087 |
| | | | | | 13374-13914 |
| | | | | | 14728-15500 |
| HBJAC40 | 32 | 841235 | AC007606 | 570 | 1-89 |
| | | | | | 520-616 |
| | | | | | 811-972 |
| | | | | | 1604-1874 |
| | | | | | 1982-5038 |
| | | | | | 5125-5260 |
| | | | | | 6459-6956 |
| | | | | | 7370-7473 |
| | | | | | 7507-7774 |
| | | | | | 8952-9321 |
| HBJAC40 | 32 | 841235 | AC007606 | 571 | 1-403 |
| | | | | | 428-1236 |
| HBJDW56 | 34 | 520401 | AC005532 | 572 | 1-626 |
| HBJDW56 | 34 | 520401 | AC005532 | 573 | 1-516 |
| HBJDW56 | 34 | 520401 | AC005532 | 574 | 1-176 |
| HBMBM96 | 37 | 561935 | AP000786 | 575 | 1-1121 |
| HBMBM96 | 37 | 561935 | AP000786 | 576 | 1-192 |
| HBMTM11 | 38 | 589515 | AC005412 | 577 | 1-5153 |
| HBMTM11 | 38 | 589515 | AC068025 | 578 | 1-5153 |
| HBMTM11 | 38 | 589515 | AC005412 | 579 | 1-401 |
| | | | | | 2025-2517 |
| | | | | | 3932-4032 |
| | | | | | 4495-4619 |
| | | | | | 5190-5319 |
| | | | | | 6731-7210 |
| | | | | | 7410-7747 |
| | | | | | 7885-7989 |
| | | | | | 10428-10528 |
| | | | | | 12252-12623 |
| | | | | | 14008-14169 |
| | | | | | 15102-15535 |
| | | | | | 15963-16112 |
| | | | | | 17178-17644 |
| | | | | | 20468-21126 |
| | | | | | 21810-25012 |
| HBMTM11 | 38 | 589515 | AC005412 | 580 | 1-134 |
| HBMTM11 | 38 | 589515 | AC068025 | 581 | 1-134 |
| HBMTM11 | 38 | 589515 | AC068025 | 582 | 1-3201 |
| HBSAK32 | 41 | 856387 | AL161656 | 583 | 1-325 |
| | | | | | 363-460 |
| | | | | | 507-980 |
| | | | | | 1258-1440 |
| | | | | | 1691-2081 |
| | | | | | 2107-2347 |
| | | | | | 2442-2595 |
| | | | | | 2622-3125 |
| | | | | | 3993-4605 |
| | | | | | 4876-5153 |
| | | | | | 5309-5877 |
| HBSAK32 | 41 | 856387 | AL161656 | 584 | 1-186 |
| | | | | | 511-636 |
| HCDCY76 | 43 | 837972 | AP001528 | 585 | 1-3072 |
| HCDCY76 | 43 | 837972 | AP001528 | 586 | 1-380 |
| HCE1G78 | 45 | 761204 | AC005005 | 587 | 1-148 |
| | | | | | 1171-1291 |
| | | | | | 1870-3004 |
| | | | | | 3641-3752 |
| | | | | | 3952-4068 |
| | | | | | 4387-4561 |
| | | | | | 4980-5091 |
| | | | | | 5243-5349 |
| | | | | | 5497-5683 |
| | | | | | 5962-6073 |
| | | | | | 6855-7088 |
| | | | | | 9649-9785 |
| | | | | | 10127-10269 |
| | | | | | 10438-10506 |
| | | | | | 10631-10739 |
| | | | | | 10938-11726 |
| HCE1G78 | 45 | 761204 | AC005005 | 588 | 1-432 |
| HCE5F78 | 46 | 838101 | AC007318 | 589 | 1-1782 |
| HCE5F78 | 46 | 838101 | AC007318 | 590 | 1-98 |
| HCEEU18 | 49 | 688041 | AC008469 | 591 | 1-169 |
| HCEEU18 | 49 | 688041 | AC026400 | 592 | 1-170 |
| HCEEU18 | 49 | 688041 | AC008469 | 593 | 1-304 |
| | | | | | 420-602 |
| | | | | | 1427-2108 |
| | | | | | 2323-2645 |
| | | | | | 3613-3987 |
| | | | | | 4129-4442 |
| | | | | | 4600-4731 |
| | | | | | 4868-5039 |
| | | | | | 5408-5538 |
| | | | | | 5624-5776 |
| | | | | | 6317-7734 |
| HCEEU18 | 49 | 688041 | AC008469 | 594 | 1-294 |
| HCEEU18 | 49 | 688041 | AC026400 | 595 | 1-98 |
| HCEEU18 | 49 | 688041 | AC026400 | 596 | 1-407 |
| HCEGG08 | 50 | 844506 | AC078898 | 597 | 1-640 |
| HCEGG08 | 50 | 844506 | AC074196 | 598 | 1-606 |
| HCEGG08 | 50 | 844506 | AC077693 | 599 | 1-628 |
| HCEGG08 | 50 | 844506 | AC027037 | 600 | 1-640 |
| HCEGG08 | 50 | 844506 | AC026757 | 601 | 1-513 |
| HCEGG08 | 50 | 844506 | AC027036 | 602 | 1-612 |
| HCEGG08 | 50 | 844506 | AC074108 | 603 | 1-462 |
| HCEGG08 | 50 | 844506 | AC074226 | 604 | 1-640 |
| HCEGG08 | 50 | 844506 | AG073166 | 605 | 1-640 |
| HCEGG08 | 50 | 844506 | AC068667 | 606 | 1-654 |
| HCEGG08 | 50 | 844506 | AC024594 | 607 | 1-414 |
| HCEGG08 | 50 | 844506 | AC024261 | 608 | 1-647 |
| HCEGG08 | 50 | 844506 | AC078893 | 609 | 1-640 |
| HCEGG08 | 50 | 844506 | AC073555 | 610 | 1-640 |
| HCEGG08 | 50 | 844506 | AG069474 | 611 | 1-571 |
| HCEGG08 | 50 | 844506 | AC068924 | 612 | 1-640 |
| HCEGG08 | 50 | 844506 | AC066689 | 613 | 1-639 |
| HCEGG0S | 50 | 844506 | AC035249 | 614 | 1-397 |
| HCEGG08 | 50 | 844506 | AC034258 | 615 | 1-648 |
| HCEGG08 | 50 | 844506 | AC027135 | 616 | 1-434 |
| HCEGG08 | 50 | 844506 | AC027035 | 617 | 1-624 |
| HCEGG08 | 50 | 844506 | AC027034 | 618 | 1-509 |
| HCEGG08 | 50 | 844506 | AC026815 | 619 | 1-654 |
| HCEGG08 | 50 | 844506 | AC025781 | 620 | 1-546 |
| HCEGG08 | 50 | 844506 | AC078894 | 621 | 1-654 |
| HCFLN88 | 51 | 610000 | AC005089 | 622 | 1-594 |
| | | | | | 1779-2065 |
| | | | | | 2224-2411 |
| | | | | | 3295-3588 |
| | | | | | 3962-4463 |
| | | | | | 5317-5561 |
| | | | | | 5835-6210 |
| | | | | | 6750-7793 |
| HCFLN88 | 51 | 610000 | AC005089 | 623 | 1-141 |
| HCFLN88 | 51 | 610000 | AC005089 | 624 | 1-215 |
| HCMSX51 | 53 | 788643 | U96629 | 625 | 1-3014 |
| HCMSX51 | 53 | 788643 | AC040975 | 626 | 1-3014 |
| HCNCO11 | 54 | 775086 | AC011319 | 627 | 1-700 |
| HCNCO11 | 54 | 775086 | AC069204 | 628 | 1-700 |
| HCNCO11 | 54 | 775086 | AC011319 | 629 | 1-354 |
| HCNCO11 | 54 | 775086 | AC011319 | 630 | 1-338 |
| HCNCO11 | 54 | 775086 | AC069204 | 631 | 1-354 |
| HCQBH72 | 56 | 637548 | AC073530 | 632 | 1-1790 |
| HCQBH72 | 56 | 637548 | AC073530 | 633 | 1-106 |
| HCQBH72 | 56 | 637548 | AC073530 | 634 | 1-410 |
| HCUCF89 | 58 | 637986 | AC022554 | 635 | 1-1066 |
| HCUCF89 | 58 | 637986 | AC022554 | 636 | 1-692 |
| HCUCF89 | 58 | 637986 | AC022554 | 637 | 1-643 |
| HCUCK44 | 59 | 790277 | AC007842 | 638 | 1-1118 |
| HCUCK44 | 59 | 790277 | AC007842 | 639 | 1-415 |
| HCUCK44 | 59 | 790277 | AC007842 | 640 | 1-101 |
| HCWAE64 | 61 | 535893 | AL157935 | 641 | 1-1319 |
| | | | | | 2024-2316 |
| | | | | | 2937-2984 |
| | | | | | 3126-3281 |
| | | | | | 5595-5703 |
| | | | | | 5788-6574 |
| | | | | | 6667-6733 |
| | | | | | 6788-6880 |
| | | | | | 6962-7303 |
| | | | | | 8111-11869 |
| | | | | | 12019-12418 |
| | | | | | 12420-12679 |
| | | | | | 13140-13191 |
| HCWAE64 | 61 | 535893 | AL157935 | 642 | 1-1316 |
| HCWAE64 | 61 | 535893 | AL157935 | 643 | 1-309 |
| HDPDI72 | 62 | 897277 | AL139238 | 644 | 1-76 |
| | | | | | 3170-3542 |
| | | | | | 4724-5613 |
| | | | | | 6598-6719 |
| | | | | | 6954-7373 |
| | | | | | 8256-8349 |
| | | | | | 10408-11003 |
| HDPDI72 | 62 | 897277 | AL139238 | 645 | 1-279 |
| HDPIY31 | 65 | 886159 | AL356790 | 646 | 1-114 |
| | | | | | 949-1189 |
| | | | | | 2041-2318 |
| | | | | | 2541-2711 |
| | | | | | 2797-2871 |
| | | | | | 3152-7720 |
| HDPIY31 | 65 | 886159 | AL118506 | 647 | 1-241 |
| | | | | | 1067-1317 |
| | | | | | 1567-1737 |
| | | | | | 1823-1897 |
| | | | | | 2178-6746 |
| HDPIY31 | 65 | 886159 | AL356790 | 648 | 1-104 |
| | | | | | 116-297 |
| HDPIY31 | 65 | 886159 | AL356790 | 649 | 1-481 |
| HDPIY31 | 65 | 886159 | AL118506 | 650 | 1-89 |
| HDPOO76 | 68 | 838594 | AC006483 | 651 | 1-109 |
| | | | | | 132-434 |
| | | | | | 604-3482 |
| HDPOO76 | 68 | 838594 | AC026717 | 652 | 1-1820 |
| HDPOO76 | 68 | 838594 | AC035147 | 653 | 1-1820 |
| HDPOO76 | 68 | 838594 | AC026692 | 654 | 1-1823 |
| HDPOO76 | 68 | 838594 | AC073481 | 655 | 1-2558 |
| HDPOO76 | 68 | 838594 | AC006483 | 656 | 1-216 |
| HDPOO76 | 68 | 838594 | AC006483 | 657 | 1-231 |
| HDPOO76 | 68 | 838594 | AC073481 | 658 | 1-231 |
| HDPPQ30 | 69 | 684292 | AL022315 | 659 | 1-968 |
| HDPPQ30 | 69 | 684292 | AL022315 | 660 | 1-255 |
| HE2CM39 | 71 | 553651 | AC018391 | 661 | 1-3570 |
| | | | | | 3779-3904 |
| | | | | | 4646-5979 |
| | | | | | 6339-6701 |
| | | | | | 6710-8473 |
| HE2CM39 | 71 | 553651 | AC018391 | 662 | 1-438 |
| HE2CM39 | 71 | 553651 | AC018391 | 663 | 1-1402 |
| | | | | | 1586-1871 |
| | | | | | 2685-2797 |
| | | | | | 3088-3503 |
| | | | | | 4900-5170 |
| | | | | | 5789-5882 |
| | | | | | 6089-6195 |
| HE2PO93 | 72 | 771655 | AC020894 | 664 | 1-353 |
| | | | | | 749-1198 |
| | | | | | 2724-2986 |
| | | | | | 4932-5578 |
| | | | | | 7481-7617 |
| | | | | | 8108-8257 |
| | | | | | 8515-8849 |
| | | | | | 9840-9968 |
| | | | | | 10287-10827 |
| | | | | | 11376-14474 |
| | | | | | 14652-15073 |
| | | | | | 15510-17083 |
| | | | | | 17304-20501 |
| HE2PO93 | 72 | 771655 | AC008590 | 665 | 1-648 |
| | | | | | 2551-2687 |
| | | | | | 3178-3327 |
| | | | | | 3585-3919 |
| | | | | | 4910-5038 |
| | | | | | 5357-5897 |
| | | | | | 6446-10147 |
| | | | | | 10584-12159 |
| | | | | | 12380-15574 |
| HE2PO93 | 72 | 771655 | AC021468 | 666 | 1-353 |
| | | | | | 749-1198 |
| | | | | | 2724-2986 |
| | | | | | 4934-5579 |
| | | | | | 7482-7618 |
| | | | | | 8109-8258 |
| | | | | | 8516-8850 |
| | | | | | 9841-9969 |
| | | | | | 10288-10828 |
| | | | | | 11377-13627 |
| | | | | | 13631-13748 |
| | | | | | 13762-15078 |
| | | | | | 15515-17088 |
| | | | | | 17309-20507 |
| HE2PO93 | 72 | 771655 | AC020894 | 667 | 1-372 |
| HE2PO93 | 72 | 771655 | AC020894 | 668 | 1-315 |
| | | | | | 893-1242 |
| HE2PO93 | 72 | 771655 | AC021468 | 669 | 1-350 |
| HB2PO93 | 72 | 771655 | AC021468 | 670 | 1-372 |
| HE6FU11 | 73 | 827236 | AL021578 | 671 | 1-116 |
| | | | | | 2674-2776 |
| | | | | | 3489-4063 |
| | | | | | 7279-7402 |
| | | | | | 9706-10120 |
| | | | | | 10217-10368 |
| | | | | | 12042-12219 |
| | | | | | 12315-12924 |
| | | | | | 14271-14380 |
| | | | | | 14463-14842 |
| | | | | | 16153-16301 |
| HE6FV29 | 74 | 588454 | AL162401 | 672 | 1-1425 |
| HEBDF77 | 77 | 692347 | AL078460 | 673 | 1-1933 |
| HEBDF77 | 77 | 692347 | AL078460 | 674 | 1-269 |
| HEBDF77 | 77 | 692347 | AL078460 | 675 | 1-176 |
| HEBDQ91 | 78 | 840288 | AC008623 | 676 | 1-2883 |
| HBBDQ91 | 78 | 840288 | AC008623 | 677 | 1-350 |
| HEBDQ91 | 78 | 840288 | AC008623 | 678 | 1-555 |
| HEBFR46 | 79 | 847064 | AC006483 | 679 | 1-70 |
| | | | | | 282-644 |
| | | | | | 789-4243 |
| HEBFR46 | 79 | 847064 | AC073481 | 680 | 1-2167 |
| | | | | | 2174-3461 |
| HEBFR46 | 79 | 847064 | AC006483 | 681 | 1-344 |
| HEBFR46 | 79 | 847064 | AC006483 | 682 | 1-195 |
| HEBGE07 | 80 | 798096 | AC021918 | 683 | 1-1899 |
| HEBGE07 | 80 | 798096 | AC021918 | 684 | 1-225 |
| HEGAU15 | 81 | 834379 | AC009404 | 685 | 1-1121 |
| HEGAU15 | 81 | 834379 | AC011638 | 686 | 1-1119 |
| HEGAU15 | 81 | 834379 | AC009404 | 687 | 1-363 |
| HEGAU15 | 81 | 834379 | AC009404 | 688 | 1-446 |
| HEGAU15 | 81 | 834379 | AC011638 | 689 | 1-446 |
| HEGAU15 | 81 | 834379 | AC011638 | 690 | 1-363 |
| HBQBF89 | 82 | 786205 | AL160055 | 691 | 1-801 |
| HEQBF89 | 82 | 786205 | AC009485 | 692 | 1-800 |
| HEQBF89 | 82 | 786205 | AL158827 | 693 | 1-827 |
| HEQBF89 | 82 | 786205 | AC009485 | 694 | 1-100 |
| HEQBF89 | 82 | 786205 | AL158827 | 695 | 1-279 |
| HEQBF89 | 82 | 786205 | AL158827 | 696 | 1-138 |
| | | | | | 152-192 |
| HFCEI04 | 83 | 692438 | AC068996 | 697 | 1-865 |
| HFCEI04 | 83 | 692438 | AC068303 | 698 | 1-865 |
| HFEAY59 | 84 | 658685 | AC005919 | 699 | 1-490 |
| | | | | | 976-1063 |
| | | | | | 1264-1351 |
| | | | | | 1663-1956 |
| | | | | | 2076-2238 |
| | | | | | 2674-2837 |
| | | | | | 2910-3034 |
| | | | | | 4517-4686 |
| | | | | | 4804-5021 |
| | | | | | 5234-5282 |
| | | | | | 5397-5729 |
| | | | | | 7103-7442 |
| HFEAY59 | 84 | 658685 | AC005919 | 700 | 1-155 |
| HFIJA68 | 85 | 847074 | AC010550 | 701 | 1-127 |
| HFKEU12 | 86 | 634006 | AC010443 | 702 | 1-1026 |
| HFKEU12 | 86 | 634006 | AC021087 | 703 | 1-1026 |
| HFKEU12 | 86 | 634006 | AC027825 | 704 | 1-1026 |
| HFKEU12 | 86 | 634006 | AC027825 | 705 | 1-263 |
| HFTDH56 | 89 | 862021 | AC023154 | 706 | 1-1503 |
| | | | | | 1728-2093 |
| | | | | | 2281-2361 |
| | | | | | 3191-3738 |
| | | | | | 3787-4515 |
| HFVHW43 | 90 | 570948 | AL132795 | 707 | 1-253 |
| | | | | | 1142-1455 |
| | | | | | 1576-2150 |
| | | | | | 2529-2966 |
| | | | | | 4374-4471 |
| | | | | | 4991-5361 |
| | | | | | 6514-7738 |
| | | | | | 7936-8053 |
| | | | | | 9858-9979 |
| | | | | | 11930-12101 |
| | | | | | 12401-12525 |
| | | | | | 12531-12712 |
| | | | | | 16593-16786 |
| | | | | | 17053-17214 |
| | | | | | 18919-19396 |
| | | | | | 21174-21327 |
| | | | | | 21724-22296 |
| | | | | | 22515-23071 |
| HFVHW43 | 90 | 570948 | AL132795 | 708 | 1-6181 |
| HPVHW43 | 90 | 570948 | AL132795 | 709 | 1-287 |
| | | | | | 622-861 |
| HGBHP91 | 91 | 693011 | AL356056 | 710 | 1-1048 |
| HGBHP91 | 91 | 693011 | AL136982 | 711 | 1-1048 |
| HGBHP91 | 91 | 693011 | AL356056 | 712 | 1-238 |
| HGBHP91 | 91 | 693011 | AL356056 | 713 | 1-135 |
| HGBHP91 | 91 | 693011 | AL136982 | 714 | 1-238 |
| HGBHP91 | 91 | 693011 | AL136982 | 715 | 1-136 |
| HHEAK45 | 92 | 765278 | AL035690 | 716 | 1-2148 |
| | | | | | 4277-4419 |
| | | | | | 5252-5365 |
| | | | | | 5452-6322 |
| | | | | | 6863-7710 |
| HHEAK45 | 92 | 765278 | AC010388 | 717 | 1-2149 |
| HHEAK45 | 92 | 765278 | AL035690 | 718 | 1-732 |
| HHEAK45 | 92 | 765278 | AL035690 | 719 | 1-86 |
| | | | | | 175-566 |
| HHEGS55 | 93 | 858372 | AC009679 | 720 | 1-565 |
| HHEGS55 | 93 | 858372 | AC016824 | 721 | 1-902 |
| HHFFS40 | 96 | 824059 | AC022423 | 722 | 1-2017 |
| KHFFS40 | 96 | 824059 | AC025178 | 723 | 1-2017 |
| HHFFS40 | 96 | 824059 | AC022444 | 724 | 1-2017 |
| HHGDT26 | 98 | 658692 | AC010754 | 725 | 1-1584 |
| HHGDT26 | 98 | 658692 | AC016127 | 726 | 1-1584 |
| | | | | | 1639-1876 |
| HHGDT26 | 98 | 658692 | AC023989 | 727 | 1-1584 |
| | | | | | 1639-1876 |
| HHPFU28 | 99 | 824573 | AC069200 | 728 | 1-2595 |
| HHPFU28 | 99 | 824573 | AC069200 | 729 | 1-3998 |
| HHPFU28 | 99 | 824573 | AC069200 | 730 | 1-777 |
| HHSBI06 | 100 | 639097 | AF285442 | 731 | 1-1170 |
| | | | | | 1250-1439 |
| | | | | | 1565-1850 |
| | | | | | 2214-2632 |
| HHSBI06 | 100 | 639097 | AF271897 | 732 | 1-1174 |
| | | | | | 1253-1444 |
| | | | | | 1568-1853 |
| | | | | | 2217-2659 |
| | | | | | 4394-4876 |
| | | | | | 5269-6156 |
| | | | | | 7228-8366 |
| | | | | | 8574-8852 |
| HHSBI06 | 100 | 639097 | AC025857 | 733 | 1-1172 |
| | | | | | 1254-1442 |
| | | | | | 1566-1851 |
| | | | | | 2215-2618 |
| | | | | | 4423-4905 |
| | | | | | 5298-6179 |
| | | | | | 7253-8391 |
| | | | | | 8599-8877 |
| HHSBI06 | 100 | 639097 | AF285442 | 734 | 1-483 |
| HHSBI06 | 100 | 639097 | AF285442 | 735 | 1-323 |
| | | | | | 420-676 |
| | | | | | 774-935 |
| | | | | | 1372-1637 |
| HHSBI06 | 100 | 639097 | AF271897 | 736 | 1-522 |
| HHSBI06 | 100 | 639097 | AF271897 | 737 | 1-323 |
| | | | | | 420-676 |
| | | | | | 774-935 |
| | | | | | 1372-1637 |
| HHSBI06 | 100 | 639097 | AC025857 | 738 | 1-522 |
| HHSBI06 | 100 | 639097 | AC025857 | 739 | 1-323 |
| | | | | | 420-676 |
| | | | | | 774-935 |
| | | | | | 1372-1637 |
| HHSBI65 | 101 | 801910 | AF205589 | 740 | 1-1703 |
| | | | | | 1798-2217 |
| | | | | | 2302-3089 |
| HHSBI65 | 101 | 801910 | AF205589 | 741 | 1-531 |
| | | | | | 571-1759 |
| | | | | | 1862-2104 |
| | | | | | 2219-2722 |
| HHSDI53 | 102 | 862028 | AP001456 | 742 | 1-1611 |
| | | | | | 1654-2020 |
| | | | | | 2187-2263 |
| HHSDI53 | 102 | 862028 | AL109936 | 743 | 1-1611 |
| | | | | | 1654-2020 |
| | | | | | 2186-2322 |
| | | | | | 2673-3243 |
| | | | | | 3291-3857 |
| | | | | | 4276-4892 |
| | | | | | 5002-5380 |
| | | | | | 8185-8499 |
| | | | | | 8705-8842 |
| | | | | | 10146-10298 |
| | | | | | 12526-12652 |
| | | | | | 12780-14327 |
| HHSDI53 | 102 | 862028 | AP001456 | 744 | 1-482 |
| HHSDI53 | 102 | 862028 | AL109936 | 745 | 1-188 |
| HISAT67 | 103 | 843549 | AC013403 | 746 | 1-753 |
| | | | | | 852-1545 |
| | | | | | 1734-1816 |
| | | | | | 1930-2061 |
| | | | | | 2259-2428 |
| | | | | | 2573-2648 |
| | | | | | 2685-2987 |
| | | | | | 3135-4126 |
| | | | | | 4242-4543 |
| | | | | | 4732-4905 |
| | | | | | 5033-5145 |
| | | | | | 5298-5341 |
| | | | | | 5530-5715 |
| | | | | | 6059-6126 |
| HISAT67 | 103 | 843549 | AC013403 | 747 | 1-102 |
| HJMAV41 | 106 | 862029 | AC008998 | 748 | 1-239 |
| | | | | | 975-1119 |
| | | | | | 1204-1298 |
| | | | | | 3076-3230 |
| | | | | | 4100-4205 |
| | | | | | 5256-5376 |
| | | | | | 5476-5596 |
| | | | | | 6626-6943 |
| | | | | | 7508-8143 |
| HJPCH08 | 109 | 840365 | AC004826 | 749 | 1-71 |
| | | | | | 475-867 |
| | | | | | 2289-2390 |
| | | | | | 2475-2596 |
| | | | | | 3191-3333 |
| | | | | | 3458-3644 |
| | | | | | 3729-3859 |
| | | | | | 4038-4233 |
| | | | | | 4338-4451 |
| | | | | | 4558-4626 |
| | | | | | 4832-4977 |
| | | | | | 5108-5272 |
| | | | | | 5380-5622 |
| | | | | | 5698-5816 |
| | | | | | 5965-6067 |
| | | | | | 6380-6580 |
| | | | | | 6829-6920 |
| | | | | | 7162-7299 |
| | | | | | 7943-10018 |
| | | | | | 10503-10623 |
| | | | | | 10699-10776 |
| | | | | | 10917-11336 |
| | | | | | 12343-12406 |
| | | | | | 12731-13275 |
| HJPCH08 | 109 | 840365 | AC004826 | 750 | 1-406 |
| | | | | | 862-1119 |
| | | | | | 1423-1689 |
| | | | | | 2886-2989 |
| | | | | | 5361-5431 |
| | | | | | 5969-6059 |
| | | | | | 6874-7181 |
| | | | | | 9823-9980 |
| | | | | | 10928-11194 |
| | | | | | 12667-12838 |
| | | | | | 17063-18165 |
| | | | | | 18168-18649 |
| | | | | | 18785-19579 |
| | | | | | 19733-19780 |
| | | | | | 20247-20355 |
| | | | | | 21063-21415 |
| | | | | | 21546-22630 |
| | | | | | 23320-23541 |
| | | | | | 24276-24323 |
| | | | | | 24510-24602 |
| | | | | | 24903-25357 |
| | | | | | 26015-27115 |
| | | | | | 27309-28272 |
| | | | | | 28601-28879 |
| | | | | | 29413-29552 |
| | | | | | 30539-30602 |
| | | | | | 30728-31110 |
| | | | | | 31231-31353 |
| | | | | | 32257-32325 |
| | | | | | 33895-34173 |
| | | | | | 35081-35392 |
| | | | | | 37763-37860 |
| | | | | | 38789-38822 |
| | | | | | 38920-39119 |
| HJPCH08 | 109 | 840365 | AC004826 | 751 | 1-424 |
| | | | | | 2065-2241 |
| HKGBF25 | 110 | 738797 | AL390999 | 752 | 1-1996 |
| HKGBF25 | 110 | 738797 | AC012079 | 753 | 1-1997 |
| HKIXC44 | 111 | 716213 | AC016240 | 754 | 1-195 |
| | | | | | 476-552 |
| | | | | | 679-763 |
| | | | | | 1040-1119 |
| | | | | | 1998-3764 |
| HKIXC44 | 111 | 716213 | AF261720 | 755 | 1-195 |
| | | | | | 475-551 |
| | | | | | 678-762 |
| | | | | | 1039-1118 |
| | | | | | 1998-3764 |
| HKIXC44 | 111 | 716213 | AC016240 | 756 | 1-423 |
| HKIXC44 | 111 | 716213 | AF261720 | 757 | 1-423 |
| HKIXC44 | 111 | 716213 | AF261720 | 758 | 1-206 |
| HKTAB41 | 112 | 695732 | AC006451 | 759 | 1-737 |
| HLDBG17 | 113 | 855953 | AL161798 | 760 | 1-1403 |
| HLHAP05 | 116 | 638476 | AC009097 | 761 | 1-101 |
| HLHCS23 | 117 | 560663 | AL356385 | 762 | 1-1419 |
| HLHCS23 | 117 | 560663 | AC016501 | 763 | 1-1419 |
| HLHCS23 | 117 | 560663 | AL356385 | 764 | 1-560 |
| HLHCS23 | 117 | 560663 | AC016501 | 765 | 1-560 |
| HLICO10 | 120 | 658740 | AL031685 | 766 | 1-165 |
| | | | | | 1532-2565 |
| | | | | | 2618-3686 |
| | | | | | 4070-4320 |
| | | | | | 4665-5083 |
| | | | | | 5172-5547 |
| | | | | | 5902-6305 |
| | | | | | 7276-9100 |
| | | | | | 9742-9863 |
| | | | | | 10008-10531 |
| | | | | | 11381-11716 |
| | | | | | 12759-13260 |
| | | | | | 15686-17570 |
| HLICO10 | 120 | 658740 | AL031685 | 767 | 1-182 |
| HLICO10 | 120 | 658740 | AL031685 | 768 | 1-113 |
| HLJBS28 | 121 | 658742 | AC026779 | 769 | 1-78 |
| | | | | | 2390-2473 |
| | | | | | 5457-7057 |
| HLJBS28 | 121 | 658742 | AC008482 | 770 | 1-93 |
| | | | | | 1668-1990 |
| | | | | | 3077-4682 |
| HLJBS28 | 121 | 658742 | AC026779 | 771 | 1-651 |
| HLJBS28 | 121 | 658742 | AC008482 | 772 | 1-807 |
| HLMJB64 | 122 | 658699 | AL034550 | 773 | 1-107 |
| | | | | | 122-1264 |
| | | | | | 1513-4478 |
| HLMJB64 | 122 | 658699 | AL034550 | 774 | 1-147 |
| | | | | | 445-569 |
| | | | | | 1012-1217 |
| | | | | | 5637-5681 |
| HLYDF73 | 124 | 566869 | AL122127 | 775 | 1-583 |
| HLYGE16 | 125 | 651339 | AC025594 | 776 | 1-272 |
| | | | | | 301-388 |
| | | | | | 531-1439 |
| | | | | | 1461-3200 |
| HLYGE16 | 125 | 651339 | AC073849 | 777 | 1-272 |
| | | | | | 301-388 |
| | | | | | 531-1439 |
| | | | | | 1461-3200 |
| HLYGE16 | 125 | 651339 | AC025594 | 778 | 1-337 |
| HLYGE16 | 125 | 651339 | AC073849 | 779 | 1-337 |
| HMCFH60 | 127 | 654853 | AL122034 | 780 | 1-785 |
| | | | | | 1072-3055 |
| HMCFH60 | 127 | 654853 | AC073394 | 781 | 1-326 |
| | | | | | 1898-2079 |
| | | | | | 2460-2702 |
| | | | | | 4498-4586 |
| | | | | | 5598-7296 |
| | | | | | 7560-7669 |
| | | | | | 8015-8460 |
| | | | | | 8479-8539 |
| | | | | | 8918-9242 |
| | | | | | 10451-10975 |
| | | | | | 13375-13521 |
| | | | | | 13561-15769 |
| | | | | | 16055-18038 |
| HMCFH60 | 127 | 654853 | AL160264 | 782 | 1-86 |
| | | | | | 1101-2799 |
| | | | | | 3063-3172 |
| | | | | | 3518-3963 |
| | | | | | 3982-4042 |
| | | | | | 4421-4745 |
| | | | | | 5954-6478 |
| | | | | | 8877-9023 |
| | | | | | 9063-11271 |
| | | | | | 11557-13540 |
| HMCFH60 | 127 | 654853 | AC073394 | 783 | 1-309 |
| HMCFH60 | 127 | 654853 | AC073394 | 784 | 1-577 |
| HMDAB29 | 128 | 584789 | AC027264 | 785 | 1-147 |
| HMDAB29 | 128 | 584789 | AC068682 | 786 | 1-153 |
| HMDAB29 | 128 | 584789 | AL354887 | 787 | 1-1433 |
| HMDAB29 | 128 | 584789 | AL157408 | 788 | 1-1434 |
| HMDAB29 | 128 | 584789 | AL354887 | 789 | 1-577 |
| HMDAB29 | 128 | 584789 | AL354887 | 790 | 1-196 |
| HMDAB29 | 128 | 584789 | AL157408 | 791 | 1-577 |
| HMDAB29 | 128 | 584789 | AL157408 | 792 | 1-196 |
| HMDAD44 | 129 | 566854 | AC012370 | 793 | 1-145 |
| | | | | | 2813-4454 |
| HMDAD44 | 129 | 566854 | AC034121 | 794 | 1-1569 |
| HMDAD44 | 129 | 566854 | AC012370 | 795 | 1-787 |
| HMDAD44 | 129 | 566854 | AC012370 | 796 | 1-622 |
| HMIAK10 | 131 | 562774 | AP000817 | 797 | 1-1044 |
| HMIAK10 | 131 | 562774 | AC024177 | 798 | 1-1047 |
| HMIAK10 | 131 | 562774 | AC011009 | 799 | 1-1047 |
| HMIBF07 | 132 | 603528 | AC022833 | 800 | 1-1721 |
| HMICI80 | 133 | 827318 | AC008790 | 801 | 1-2743 |
| HMICI80 | 133 | 827318 | AC066693 | 802 | 1-2743 |
| HMICI80 | 133 | 827318 | AC008790 | 803 | 1-377 |
| HMICI80 | 133 | 827318 | AC066693 | 804 | 1-377 |
| HMWBL03 | 139 | 822861 | AC012052 | 805 | 1-130 |
| | | | | | 548-784 |
| | | | | | 4520-4887 |
| | | | | | 5112-6285 |
| | | | | | 6741-6888 |
| | | | | | 7577-7727 |
| | | | | | 7951-8582 |
| | | | | | 8927-10292 |
| HMWBL03 | 139 | 822861 | AC011667 | 806 | 1-138 |
| | | | | | 1281-1681 |
| | | | | | 2270-2632 |
| | | | | | 3070-3372 |
| | | | | | 3865-3990 |
| | | | | | 4407-4644 |
| | | | | | 8378-8745 |
| | | | | | 8970-10143 |
| | | | | | 10599-10746 |
| | | | | | 11435-11585 |
| | | | | | 11809-12440 |
| | | | | | 12785-14150 |
| HMWBL03 | 139 | 822861 | AC012052 | 807 | 1-303 |
| HNECW49 | 141 | 639117 | AC011864 | 808 | 1-522 |
| HNECW49 | 141 | 639117 | AC011864 | 809 | 1-607 |
| HNECW49 | 141 | 639117 | AC011864 | 810 | 1-741 |
| HNFGR08 | 143 | 825417 | AC006369 | 811 | 1-1423 |
| HNGAK51 | 144 | 603910 | AC013443 | 812 | 1-913 |
| HNGAK51 | 144 | 603910 | AC013443 | 813 | 1-406 |
| HNGAK51 | 144 | 603910 | AC013443 | 814 | 1-297 |
| HNGAM58 | 145 | 688114 | AP000023 | 815 | 1-104 |
| | | | | | 106-313 |
| HNGAM58 | 145 | 688114 | AL353625 | 816 | 1-1881 |
| | | | | | 2735-2808 |
| | | | | | 3883-4043 |
| | | | | | 5519-5602 |
| | | | | | 5702-5845 |
| | | | | | 6903-7175 |
| | | | | | 9926-10120 |
| | | | | | 11625-12238 |
| | | | | | 12343-12673 |
| | | | | | 12887-13212 |
| | | | | | 13309-13473 |
| | | | | | 13482-13691 |
| | | | | | 14962-15187 |
| | | | | | 15799-16641 |
| | | | | | 17298-17447 |
| | | | | | 18403-18517 |
| | | | | | 21404-21557 |
| | | | | | 22366-22603 |
| | | | | | 22625-23551 |
| | | | | | 25581-25730 |
| | | | | | 26277-26682 |
| | | | | | 26765-26975 |
| | | | | | 28188-28352 |
| | | | | | 30552-30705 |
| | | | | | 32576-32797 |
| | | | | | 33083-33326 |
| | | | | | 33654-33791 |
| | | | | | 34515-34643 |
| | | | | | 36494-36685 |
| | | | | | 37580-37916 |
| | | | | | 38168-38308 |
| | | | | | 38903-39515 |
| | | | | | 41650-41749 |
| | | | | | 42020-42153 |
| | | | | | 42920-43144 |
| | | | | | 43218-43346 |
| | | | | | 43937-44019 |
| | | | | | 44180-44379 |
| | | | | | 44623-44800 |
| | | | | | 44905-45050 |
| | | | | | 45835-46036 |
| | | | | | 47456-47567 |
| HNGAM58 | 145 | 688114 | AL136325 | 817 | 1-308 |
| HNGAM58 | 145 | 688114 | AL078472 | 818 | 1-114 |
| | | | | | 116-323 |
| HNGAM58 | 145 | 688114 | AL049776 | 819 | 1-229 |
| | | | | | 1654-1686 |
| | | | | | 1809-1912 |
| | | | | | 3738-4062 |
| HNGAM58 | 145 | 688114 | AL031176 | 820 | 1-310 |
| HNGAM58 | 145 | 688114 | AL022329 | 821 | 1-255 |
| HNGAM58 | 145 | 688114 | AL022302 | 822 | 1-97 |
| | | | | | 591-698 |
| | | | | | 4315-4635 |
| HNGAM58 | 145 | 688114 | AF111169 | 823 | 1-287 |
| HNGAM58 | 145 | 688114 | AF001550 | 824 | 1-313 |
| HNGAM58 | 145 | 688114 | AC009303 | 825 | 1-320 |
| | | | | | 5298-5444 |
| | | | | | 5797-6110 |
| HNGAM58 | 145 | 688114 | AC008958 | 826 | 1-300 |
| | | | | | 1024-1341 |
| | | | | | 2289-2604 |
| HNGAM58 | 145 | 688114 | AC008554 | 827 | 1-306 |
| HNGAM58 | 145 | 688114 | AC008101 | 828 | 1-115 |
| | | | | | 165-466 |
| | | | | | 966-1404 |
| | | | | | 1633-1705 |
| | | | | | 1926-2060 |
| | | | | | 3344-3376 |
| | | | | | 3578-3674 |
| | | | | | 3887-4181 |
| | | | | | 6025-6290 |
| | | | | | 10101-10428 |
| | | | | | 10551-10654 |
| | | | | | 11804-11921 |
| | | | | | 12916-13092 |
| | | | | | 14481-14684 |
| | | | | | 15589-15954 |
| | | | | | 16784-17082 |
| | | | | | 17091-17304 |
| | | | | | 18309-18919 |
| | | | | | 19343-19668 |
| | | | | | 20553-20853 |
| | | | | | 25924-26171 |
| | | | | | 26200-26512 |
| | | | | | 27209-27666 |
| HNGAM58 | 145 | 688114 | AC008079 | 829 | 1-627 |
| | | | | | 2228-2466 |
| | | | | | 3557-3606 |
| | | | | | 4115-4251 |
| | | | | | 4459-4879 |
| | | | | | 5931-6271 |
| | | | | | 6478-6648 |
| | | | | | 7457-7555 |
| | | | | | 9361-9509 |
| | | | | | 9666-9964 |
| | | | | | 10062-10151 |
| | | | | | 12863-13276 |
| | | | | | 13550-13664 |
| | | | | | 13714-14020 |
| | | | | | 14515-14953 |
| | | | | | 15183-15255 |
| | | | | | 15463-15610 |
| | | | | | 16895-16927 |
| | | | | | 17129-17225 |
| | | | | | 17423-17724 |
| | | | | | 19577-19842 |
| | | | | | 23640-23967 |
| | | | | | 24090-24252 |
| | | | | | 26455-26631 |
| | | | | | 29128-29493 |
| | | | | | 30323-30621 |
| | | | | | 30630-30843 |
| | | | | | 31848-32458 |
| | | | | | 32882-33207 |
| | | | | | 34093-34392 |
| | | | | | 39463-39710 |
| | | | | | 39737-40052 |
| | | | | | 40755-41206 |
| HNGAM58 | 145 | 688114 | AC008008 | 830 | 1-315 |
| HNGAM58 | 145 | 688114 | AC007666 | 831 | 1-299 |
| HNGAM58 | 145 | 688114 | AC007619 | 832 | 1-211 |
| HNGAM58 | 145 | 688114 | AC007324 | 833 | 1-299 |
| HNGAM58 | 145 | 688114 | AC006965 | 834 | 1-174 |
| HNGAM58 | 145 | 688114 | AC006946 | 835 | 1-308 |
| HNGAM58 | 145 | 688114 | AC006548 | 836 | 1-308 |
| HNGAM58 | 145 | 688114 | AC005846 | 837 | 1-465 |
| HNGAM58 | 145 | 688114 | AC005598 | 838 | 1-318 |
| HNGAM58 | 145 | 688114 | AC005594 | 839 | 1-1731 |
| | | | | | 2759-3460 |
| | | | | | 4610-4721 |
| | | | | | 6663-6905 |
| | | | | | 7470-7615 |
| | | | | | 7961-8099 |
| | | | | | 8133-8446 |
| | | | | | 9437-9675 |
| | | | | | 10398-10546 |
| | | | | | 11600-11958 |
| | | | | | 12691-12876 |
| | | | | | 13531-13671 |
| | | | | | 14345-14499 |
| | | | | | 15652-15734 |
| | | | | | 17947-18305 |
| | | | | | 18918-19598 |
| | | | | | 20151-20330 |
| | | | | | 22326-22428 |
| HNGAM58 | 145 | 688114 | AC005342 | 840 | 1-210 |
| HNGAM58 | 145 | 688114 | AC005221 | 841 | 1-737 |
| HNGAM58 | 145 | 688114 | AC004477 | 842 | 1-138 |
| HNGAM58 | 145 | 688114 | AC004460 | 843 | 1-290 |
| | | | | | 747-4223 |
| | | | | | 4433-4702 |
| HNGAM58 | 145 | 688114 | AC004019 | 844 | 1-299 |
| HNGAM58 | 145 | 688114 | AC002519 | 845 | 1-295 |
| HNGAM58 | 145 | 688114 | AC002476 | 846 | 1-40 |
| | | | | | 4020-4364 |
| HNGAM58 | 145 | 688114 | AC073220 | 847 | 1-311 |
| | | | | | 766-4242 |
| | | | | | 4507-4721 |
| HNGAM58 | 145 | 688114 | AC019126 | 848 | 1-1000 |
| | | | | | 1425-1500 |
| | | | | | 3144-3288 |
| | | | | | 4770-5081 |
| | | | | | 5584-5635 |
| HNGAM58 | 145 | 688114 | AC016772 | 849 | 1-209 |
| HNGAM58 | 145 | 688114 | AC015804 | 850 | 1-139 |
| HNGAM58 | 145 | 688114 | AC007194 | 851 | 1-108 |
| HNGAM58 | 145 | 688114 | AC011740 | 852 | 1-138 |
| HNGAM58 | 145 | 688114 | AL138740 | 853 | 1-323 |
| HNGAM58 | 145 | 688114 | AL135839 | 854 | 1-115 |
| | | | | | 161-358 |
| HNGAM58 | 145 | 688114 | AC022148 | 855 | 1-427 |
| HNGAM58 | 145 | 688114 | Z82199 | 856 | 1-549 |
| HNGAM58 | 145 | 688114 | AJ239319 | 857 | 1-335 |
| | | | | | 1031-1609 |
| | | | | | 1922-2102 |
| | | | | | 4742-4918 |
| | | | | | 4925-5059 |
| HNGAM58 | 145 | 688114 | AC023221 | 858 | 1-129 |
| HNGAM58 | 145 | 688114 | AC011994 | 859 | 1-1939 |
| HNGAM58 | 145 | 688114 | AC011330 | 860 | 1-139 |
| HNGAM58 | 145 | 688114 | AL121956 | 861 | 1-1881 |
| | | | | | 2735-2808 |
| | | | | | 3883-4043 |
| | | | | | 5519-5602 |
| | | | | | 5702-5845 |
| | | | | | 6903-7175 |
| | | | | | 9926-10120 |
| | | | | | 11625-12238 |
| | | | | | 12343-12673 |
| | | | | | 12887-13212 |
| | | | | | 13309-13473 |
| | | | | | 13482-13691 |
| | | | | | 14962-15187 |
| | | | | | 15799-16641 |
| | | | | | 17298-17447 |
| | | | | | 18403-18517 |
| | | | | | 21404-21557 |
| | | | | | 22366-22603 |
| | | | | | 22625-23551 |
| | | | | | 25581-25730 |
| | | | | | 26277-26682 |
| | | | | | 26765-26975 |
| | | | | | 28188-28352 |
| | | | | | 30552-30705 |
| | | | | | 32576-32797 |
| | | | | | 33083-33326 |
| | | | | | 33654-33791 |
| | | | | | 34515-34643 |
| | | | | | 36494-36685 |
| | | | | | 37580-37916 |
| | | | | | 38168-38308 |
| | | | | | 38903-39515 |
| | | | | | 41650-41749 |
| | | | | | 42020-42153 |
| | | | | | 42920-43144 |
| | | | | | 43218-43346 |
| | | | | | 43937-44019 |
| | | | | | 44180-44379 |
| | | | | | 44623-44800 |
| | | | | | 44905-45050 |
| | | | | | 45835-46036 |
| | | | | | 47456-47567 |
| HNGAM58 | 145 | 688114 | AL354950 | 862 | 1-141 |
| HNGAM58 | 145 | 688114 | AL160471 | 863 | 1-803 |
| | | | | | 1156-1259 |
| | | | | | 3445-3580 |
| | | | | | 3733-3821 |
| | | | | | 8085-13120 |
| | | | | | 13277-13410 |
| | | | | | 14706-14802 |
| | | | | | 16142-16310 |
| | | | | | 16698-16741 |
| | | | | | 17373-17479 |
| | | | | | 20963-21108 |
| | | | | | 21604-21661 |
| | | | | | 21848-21963 |
| | | | | | 22062-22282 |
| | | | | | 22767-22904 |
| | | | | | 28319-28430 |
| | | | | | 31284-31384 |
| | | | | | 34181-34362 |
| | | | | | 35804-36251 |
| | | | | | 38170-38635 |
| | | | | | 39137-39685 |
| | | | | | 39978-40068 |
| | | | | | 40645-41002 |
| | | | | | 41212-41423 |
| | | | | | 43834-43966 |
| | | | | | 46252-46498 |
| | | | | | 47334-48322 |
| | | | | | 49425-49722 |
| | | | | | 50320-50738 |
| | | | | | 54716-54877 |
| HNGAM58 | 145 | 688114 | AC027130 | 864 | 1-312 |
| HNGAM58 | 145 | 688114 | AC021669 | 865 | 1-140 |
| HNGAM58 | 145 | 688114 | AC012620 | 866 | 1-167 |
| HNGAM58 | 145 | 688114 | AC012124 | 867 | 1-741 |
| | | | | | 2154-2713 |
| | | | | | 5013-5152 |
| | | | | | 5488-5667 |
| HNGAM58 | 145 | 688114 | AL157832 | 868 | 1-141 |
| HNGAM58 | 145 | 688114 | AC022454 | 869 | 1-153 |
| HNGAM58 | 145 | 688114 | AL357518 | 870 | 1-131 |
| HNGAM58 | 145 | 688114 | AC004971 | 871 | 1-124 |
| | | | | | 1636-1805 |
| | | | | | 3545-3919 |
| | | | | | 5034-5269 |
| | | | | | 5857-6264 |
| | | | | | 6457-6771 |
| | | | | | 6927-7080 |
| | | | | | 7527-7850 |
| | | | | | 7906-8247 |
| HNGAM58 | 145 | 688114 | AP000023 | 872 | 1-83 |
| HNGAM58 | 145 | 688114 | AL353625 | 873 | 1-354 |
| HNGAM58 | 145 | 688114 | AL136325 | 874 | 1-149 |
| HNGAM58 | 145 | 688114 | AL078472 | 875 | 1-83 |
| HNGAM58 | 145 | 688114 | AL022329 | 876 | 1-636 |
| HNGAM58 | 145 | 688114 | AL022302 | 877 | 1-101 |
| HNGAM58 | 145 | 688114 | AL022302 | 878 | 1-461 |
| HNGAM58 | 145 | 688114 | AF111169 | 879 | 1-101 |
| HNGAM58 | 145 | 688114 | AC009303 | 880 | 1-222 |
| HNGAM58 | 145 | 688114 | AC008958 | 881 | 1-374 |
| HNGAM58 | 145 | 688114 | AC008554 | 882 | 1-100 |
| HNGAM58 | 145 | 688114 | AC008101 | 883 | 1-159 |
| HNGAM58 | 145 | 688114 | AC008079 | 884 | 1-159 |
| HNGAM58 | 145 | 688114 | AC008079 | 885 | 1-73 |
| | | | | | 300-338 |
| | | | | | 801-1164 |
| | | | | | 3740-5359 |
| | | | | | 5459-6041 |
| HNGAM58 | 145 | 688114 | AC008008 | 886 | 1-656 |
| HNGAM58 | 145 | 688114 | AC007666 | 887 | 1-90 |
| | | | | | 145-413 |
| HNGAM58 | 145 | 688114 | AC007324 | 888 | 1-214 |
| | | | | | 1219-1829 |
| HNGAM58 | 145 | 688114 | AC007324 | 889 | 1-300 |
| HNGAM58 | 145 | 688114 | AC006965 | 890 | 1-168 |
| HNGAM58 | 145 | 688114 | AC006946 | 891 | 1-83 |
| HNGAM58 | 145 | 688114 | AC006548 | 892 | 1-83 |
| HNGAM58 | 145 | 688114 | AC005598 | 893 | 1-279 |
| HNGAM58 | 145 | 688114 | AC005598 | 894 | 1-471 |
| HNGAM58 | 145 | 688114 | AC005594 | 895 | 1-232 |
| HNGAM58 | 145 | 688114 | AC005221 | 896 | 1-334 |
| | | | | | 1068-1453 |
| | | | | | 1964-2261 |
| | | | | | 2279-2734 |
| | | | | | 3142-3837 |
| | | | | | 3844-4120 |
| | | | | | 5655-6150 |
| HNGAM58 | 145 | 688114 | AC004477 | 897 | 1-114 |
| HNGAM58 | 145 | 688114 | AC004460 | 898 | 1-327 |
| HNGAM58 | 145 | 688114 | AC004019 | 899 | 1-90 |
| | | | | | 145-413 |
| HNGAM58 | 145 | 688114 | AC002476 | 900 | 1-232 |
| HNGAM58 | 145 | 688114 | AC073220 | 901 | 1-327 |
| HNGAM58 | 145 | 688114 | AC019126 | 902 | 1-84 |
| HNGAM58 | 145 | 688114 | AC019126 | 903 | 1-510 |
| HNGAM58 | 145 | 688114 | AC016772 | 904 | 1-90 |
| | | | | | 270-523 |
| | | | | | 1613-1654 |
| | | | | | 2621-2727 |
| | | | | | 4508-4585 |
| | | | | | 4669-4747 |
| | | | | | 5079-5131 |
| HNGAM58 | 145 | 688114 | AC016772 | 905 | 1-554 |
| HNGAM58 | 145 | 688114 | AC015804 | 906 | 1-456 |
| HNGAM58 | 145 | 688114 | AC015804 | 907 | 1-157 |
| HNGAM58 | 145 | 688114 | AC011740 | 908 | 1-382 |
| | | | | | 1357-2450 |
| | | | | | 4643-5158 |
| HNGAM58 | 145 | 688114 | AC011740 | 909 | 1-125 |
| HNGAM58 | 145 | 688114 | AL135839 | 910 | 1-87 |
| HNGAM58 | 145 | 688114 | AC022148 | 911 | 1-780 |
| HNGAM58 | 145 | 688114 | Z82199 | 912 | 1-1459 |
| HNGAM58 | 145 | 688114 | Z82199 | 913 | 1-396 |
| HNGAM58 | 145 | 688114 | AJ239319 | 914 | 1-129 |
| HNGAM58 | 145 | 688114 | AC023221 | 915 | 1-130 |
| HNGAM58 | 145 | 688114 | AC011330 | 916 | 1-465 |
| HNGAM58 | 145 | 688114 | AL121956 | 917 | 1-354 |
| HNGAM58 | 145 | 688114 | AL354950 | 918 | 1-485 |
| HNGAM58 | 145 | 688114 | AL354950 | 919 | 1-116 |
| HNGAM58 | 145 | 688114 | AL160471 | 920 | 1-244 |
| | | | | | 834-940 |
| | | | | | 969-1079 |
| | | | | | 1473-1628 |
| HNGAM58 | 145 | 688114 | AL160471 | 921 | 1-1366 |
| HNGAM58 | 145 | 688114 | AC021669 | 922 | 1-786 |
| HNGAM58 | 145 | 688114 | AL157832 | 923 | 1-485 |
| HNGAM58 | 145 | 688114 | AL157832 | 924 | 1-116 |
| HNGAM58 | 145 | 688114 | AC004971 | 925 | 1-913 |
| HNGDX18 | 146 | 1145071 | AL391069 | 926 | 1-1403 |
| HNGDX18 | 146 | 1145071 | AL158846 | 927 | 1-193 |
| | | | | | 208-577 |
| | | | | | 894-1167 |
| | | | | | 1401-1629 |
| | | | | | 1918-3320 |
| | | | | | 4039-4082 |
| | | | | | 9400-10337 |
| HNGDX18 | 146 | 1145071 | AL391069 | 928 | 1-274 |
| HNGDX18 | 146 | 1145071 | AL158846 | 929 | 1-117 |
| HNGEQ75 | 147 | 535723 | AC009729 | 930 | 1-1899 |
| HNGEQ75 | 147 | 535723 | AC009729 | 931 | 1-104 |
| HNGFR54 | 148 | 695748 | AC007316 | 932 | 1-456 |
| HNGFR54 | 148 | 695748 | AC007316 | 933 | 1-260 |
| HNGHZ69 | 150 | 899289 | AC011239 | 934 | 1-1190 |
| HNGHZ69 | 150 | 899289 | AC011239 | 935 | 1-432 |
| HNGKT41 | 151 | 836061 | AC008581 | 936 | 1-1099 |
| HNGNO53 | 153 | 836063 | AC023387 | 937 | 1-869 |
| HNGNO53 | 153 | 836063 | AL355500 | 938 | 1-851 |
| HNGPJ25 | 154 | 834942 | AP002781 | 939 | 1-1472 |
| HNHGK22 | 156 | 597451 | AC073193 | 940 | 1-898 |
| HNHGK22 | 156 | 597451 | AC073193 | 941 | 1-306 |
| HNHKV56 | 158 | 800877 | AC009396 | 942 | 1-1605 |
| HODBB70 | 160 | 520196 | AC006322 | 943 | 1-561 |
| HODBB70 | 160 | 520196 | AC073110 | 944 | 1-561 |
| HODBB70 | 160 | 520196 | AC025553 | 945 | 1-561 |
| HODBB70 | 160 | 520196 | AC006322 | 946 | 1-1741 |
| HODBB70 | 160 | 520196 | AC006322 | 947 | 1-354 |
| HODBB70 | 160 | 520196 | AC073110 | 948 | 1-1741 |
| HODBB70 | 160 | 520196 | AC073110 | 949 | 1-354 |
| HOUDE92 | 165 | 580866 | AC005865 | 950 | 1-173 |
| | | | | | 553-629 |
| | | | | | 1941-2042 |
| | | | | | 2757-2891 |
| | | | | | 3294-3378 |
| | | | | | 4606-5498 |
| | | | | | 5550-8125 |
| HOVBD85 | 166 | 827362 | AC026132 | 951 | 1-1111 |
| HOVBD85 | 166 | 827362 | AC026132 | 952 | 1-315 |
| HPCAB41 | 167 | 758003 | AC022702 | 953 | 1-2582 |
| HPCAB41 | 167 | 758003 | AC022702 | 954 | 1-701 |
| | | | | | 1327-1761 |
| | | | | | 2233-2581 |
| | | | | | 2798-3345 |
| HPCAB41 | 167 | 758003 | AC022702 | 955 | 1-262 |
| HPFCI36 | 169 | 855966 | AL161652 | 956 | 1-174 |
| | | | | | 313-4710 |
| HPFDI37 | 170 | 862056 | AC000090 | 957 | 1-29 |
| | | | | | 566-712 |
| | | | | | 1355-1425 |
| | | | | | 3075-3241 |
| | | | | | 3725-3806 |
| | | | | | 4295-4357 |
| | | | | | 5382-5571 |
| | | | | | 6510-7016 |
| | | | | | 7981-8321 |
| HPJCW58 | 172 | 612866 | AC024735 | 958 | 1-1160 |
| HPMFH77 | 173 | 702014 | AL357792 | 959 | 1-78 |
| | | | | | 1506-1910 |
| | | | | | 2138-2352 |
| | | | | | 3564-3655 |
| | | | | | 3894-3990 |
| | | | | | 4679-4802 |
| | | | | | 6730-6826 |
| | | | | | 7263-7346 |
| | | | | | 7463-7531 |
| | | | | | 8845-8944 |
| | | | | | 9220-9407 |
| | | | | | 11682-11793 |
| | | | | | 12453-13057 |
| | | | | | 13114-13869 |
| | | | | | 13880-14347 |
| | | | | | 14370-17543 |
| | | | | | 17664-20113 |
| HPMFH77 | 173 | 702014 | AC012043 | 960 | 1-78 |
| | | | | | 1506-1910 |
| | | | | | 2138-2352 |
| | | | | | 3564-3655 |
| | | | | | 3894-3990 |
| | | | | | 4679-4802 |
| | | | | | 6730-6826 |
| | | | | | 7263-7346 |
| | | | | | 7463-7531 |
| | | | | | 8845-8944 |
| | | | | | 9220-9407 |
| | | | | | 11682-11793 |
| | | | | | 12453-13057 |
| | | | | | 13114-13869 |
| | | | | | 13880-14347 |
| | | | | | 14370-17540 |
| | | | | | 17661-20110 |
| HPMFH77 | 173 | 702014 | AL357792 | 961 | 1-423 |
| HPMFH77 | 173 | 702014 | AL357792 | 962 | 1-974 |
| HPMFH77 | 173 | 702014 | AC012043 | 963 | 1-974 |
| HPMFH77 | 173 | 702014 | AC012043 | 964 | 1-423 |
| HPQCB83 | 174 | 740761 | AC069100 | 965 | 1-2234 |
| HRADA42 | 178 | 827302 | AC011890 | 966 | 1-943 |
| | | | | | 1079-1636 |
| | | | | | 2154-2473 |
| | | | | | 3555-4008 |
| | | | | | 4292-4439 |
| | | | | | 6963-7154 |
| | | | | | 8254-8537 |
| | | | | | 8592-8985 |
| HRADA42 | 178 | 827302 | AC011890 | 967 | 1-478 |
| HRADF49 | 179 | 866481 | AC068946 | 968 | 1-142 |
| | | | | | 359-1108 |
| | | | | | 1191-1345 |
| | | | | | 1445-2140 |
| | | | | | 2314-2935 |
| | | | | | 3040-3156 |
| | | | | | 3395-4126 |
| | | | | | 4311-4460 |
| | | | | | 4749-5820 |
| HRADF49 | 179 | 866481 | AC060820 | 969 | 1-142 |
| | | | | | 359-1109 |
| | | | | | 1193-1348 |
| | | | | | 1448-2142 |
| | | | | | 2318-2944 |
| | | | | | 3056-3166 |
| | | | | | 3405-4136 |
| | | | | | 4321-4472 |
| | | | | | 4762-5836 |
| HRADF49 | 179 | 866481 | AC068946 | 970 | 1-812 |
| | | | | | 1124-1263 |
| | | | | | 1281-2283 |
| | | | | | 2470-2572 |
| | | | | | 2752-2935 |
| | | | | | 3851-3974 |
| | | | | | 4153-4548 |
| | | | | | 4602-4810 |
| | | | | | 4980-5111 |
| | | | | | 5262-5346 |
| | | | | | 5434-5498 |
| | | | | | 5609-5695 |
| | | | | | 5871-5930 |
| | | | | | 6448-6487 |
| HRADF49 | 179 | 866481 | AC060820 | 971 | 1-686 |
| HRDDQ39 | 181 | 840405 | AC009152 | 972 | 1-755 |
| HRDER22 | 182 | 688056 | AC021153 | 973 | 1-554 |
| HRDER22 | 182 | 688056 | AC021153 | 974 | 1-205 |
| HRDFK37 | 184 | 840381 | AL360017 | 975 | 1-1274 |
| HSAVA08 | 186 | 580870 | AC009030 | 976 | 1-1052 |
| HSAVA08 | 186 | 580870 | AC009030 | 977 | 1-431 |
| HSAVW42 | 187 | 637660 | AC021117 | 978 | 1-865 |
| HSAVW42 | 187 | 637660 | AC021117 | 979 | 1-336 |
| | | | | | 397-651 |
| HSAVW42 | 187 | 637660 | AC021117 | 980 | 1-185 |
| HSHBF76 | 190 | 715838 | AC009000 | 981 | 1-479 |
| | | | | | 1244-1408 |
| | | | | | 1653-1763 |
| | | | | | 1845-1991 |
| | | | | | 2826-3064 |
| | | | | | 3330-3422 |
| | | | | | 3438-3788 |
| HSHBF76 | 190 | 715838 | AC009000 | 982 | 1-128 |
| HSHBF76 | 190 | 715838 | AC009000 | 983 | 1-36 |
| | | | | | 1068-1329 |
| | | | | | 1498-2123 |
| | | | | | 3160-3211 |
| HSJBY32 | 192 | 702020 | AC060812 | 984 | 1-834 |
| | | | | | 1161-2914 |
| HSJBY32 | 192 | 702020 | AC060812 | 985 | 1-328 |
| | | | | | 1564-1799 |
| | | | | | 2800-2937 |
| | | | | | 3007-3045 |
| | | | | | 4054-4838 |
| | | | | | 5145-5257 |
| HSJBY32 | 192 | 702020 | AC060812 | 986 | 1-659 |
| | | | | | 700-1802 |
| HSKDR27 | 193 | 580874 | AC008742 | 987 | 1-50 |
| | | | | | 1016-1321 |
| | | | | | 1979-2220 |
| | | | | | 2313-3310 |
| HSKDR27 | 193 | 580874 | AC008742 | 988 | 1-495 |
| HSNAP85 | 194 | 784054 | AC007541 | 989 | 1-94 |
| | | | | | 2363-2658 |
| | | | | | 3490-3979 |
| | | | | | 4019-7173 |
| HSQDO85 | 196 | 853393 | AL022313 | 990 | 1-337 |
| | | | | | 3275-3416 |
| | | | | | 3702-3761 |
| | | | | | 3789-4346 |
| | | | | | 4678-4817 |
| | | | | | 5426-5518 |
| | | | | | 6130-6208 |
| | | | | | 7676-8161 |
| | | | | | 8344-8443 |
| | | | | | 8722-8841 |
| | | | | | 9247-10011 |
| | | | | | 10488-10650 |
| | | | | | 11981-12464 |
| | | | | | 12622-12711 |
| | | | | | 12791-13240 |
| | | | | | 13285-13619 |
| | | | | | 14613-15627 |
| | | | | | 15868-16325 |
| | | | | | 16558-17064 |
| | | | | | 17148-17517 |
| | | | | | 17623-17912 |
| | | | | | 17963-18564 |
| HSQDO85 | 196 | 853393 | AL022313 | 991 | 1-140 |
| HSRBE06 | 197 | 871264 | AP000330 | 992 | 1-1628 |
| HSRBE06 | 197 | 871264 | AP000330 | 993 | 1-526 |
| HSSEA64 | 199 | 853395 | AC005865 | 994 | 1-173 |
| | | | | | 553-629 |
| | | | | | 1941-2042 |
| | | | | | 2757-2891 |
| | | | | | 3294-3378 |
| | | | | | 4606-5498 |
| | | | | | 5550-8125 |
| HSSEF77 | 200 | 658725 | AC005041 | 995 | 1-68 |
| | | | | | 87-493 |
| | | | | | 711-838 |
| | | | | | 997-1167 |
| | | | | | 2227-2960 |
| | | | | | 3326-4641 |
| | | | | | 4768-5786 |
| HSSEF77 | 200 | 658725 | AC005041 | 996 | 1-2920 |
| | | | | | 3439-3667 |
| | | | | | 3839-4332 |
| HSSEF77 | 200 | 658725 | AC005041 | 997 | 1-143 |
| HT1SC27 | 203 | 630647 | AP001077 | 998 | 1-2841 |
| HT1SC27 | 203 | 630647 | AP001077 | 999 | 1-758 |
| HT1SC27 | 203 | 630647 | AP001077 | 1000 | 1-625 |
| HT4FV41 | 204 | 853400 | AC011547 | 1001 | 1-170 |
| | | | | | 793-936 |
| | | | | | 2771-3041 |
| | | | | | 3691-3788 |
| | | | | | 5141-5252 |
| | | | | | 5755-6030 |
| | | | | | 6325-6407 |
| | | | | | 7214-7551 |
| | | | | | 8653-8940 |
| | | | | | 9033-9136 |
| | | | | | 9428-9907 |
| | | | | | 11266-11659 |
| | | | | | 12082-12263 |
| | | | | | 13451-13544 |
| | | | | | 13664-13699 |
| | | | | | 13769-13936 |
| | | | | | 14571-14761 |
| | | | | | 14897-14997 |
| | | | | | 15135-17127 |
| HT4FV41 | 204 | 853400 | AC005331 | 1002 | 1-88 |
| | | | | | 224-324 |
| | | | | | 462-2454 |
| HT4FV41 | 204 | 853400 | AC023470 | 1003 | 1-80 |
| | | | | | 204-242 |
| | | | | | 313-477 |
| | | | | | 1213-1300 |
| | | | | | 1436-1536 |
| | | | | | 1673-3658 |
| HT4FV41 | 204 | 853400 | AC005331 | 1004 | 1-607 |
| HT4FV41 | 204 | 853400 | AC023470 | 1005 | 1-606 |
| HTEGS11 | 209 | 862066 | AC018762 | 1006 | 1-2894 |
| HTEHU59 | 210 | 840385 | AP001003 | 1007 | 1-3207 |
| HTEHU59 | 210 | 840385 | AP001557 | 1008 | 1-3206 |
| HTEHU59 | 210 | 840385 | AP001156 | 1009 | 1-3207 |
| HTEHU59 | 210 | 840385 | AP001003 | 1010 | 1-863 |
| HTEHU59 | 210 | 840385 | AP001003 | 1011 | 1-1399 |
| | | | | | 1504-1948 |
| | | | | | 1956-2672 |
| | | | | | 2761-2905 |
| | | | | | 3007-3135 |
| | | | | | 3290-3445 |
| | | | | | 3537-3653 |
| | | | | | 3746-3913 |
| | | | | | 4010-4131 |
| | | | | | 4251-4428 |
| HTEHU59 | 210 | 840385 | AP001557 | 1012 | 1-863 |
| HTEHU59 | 210 | 840385 | AP001557 | 1013 | 1-1395 |
| | | | | | 1500-1944 |
| | | | | | 1952-2667 |
| | | | | | 2757-2900 |
| | | | | | 3002-3130 |
| | | | | | 3285-3439 |
| HTEHU59 | 210 | 840385 | AP001156 | 1014 | 1-1396 |
| | | | | | 1502-1945 |
| | | | | | 1953-2668 |
| HTEHU59 | 210 | 840385 | AP001156 | 1015 | 1-863 |
| HTEJD29 | 211 | 695798 | AL354733 | 1016 | 1-1292 |
| HTEJD29 | 211 | 695798 | AC007943 | 1017 | 1-1292 |
| HTEJD29 | 211 | 695798 | AL354733 | 1018 | 1-184 |
| HTEJD29 | 211 | 695798 | AL354733 | 1019 | 1-59 |
| | | | | | 1212-1284 |
| | | | | | 1905-1956 |
| | | | | | 2351-2840 |
| | | | | | 4126-5105 |
| | | | | | 5892-6298 |
| | | | | | 6726-7122 |
| | | | | | 7204-7713 |
| | | | | | 7747-7932 |
| HTHBZ06 | 215 | 832477 | AC068768 | 1020 | 1-835 |
| HTLAP64 | 216 | 603913 | AC004556 | 1021 | 1-1668 |
| | | | | | 2186-3003 |
| | | | | | 3754-4253 |
| | | | | | 4400-4483 |
| | | | | | 5365-5868 |
| | | | | | 8438-8508 |
| | | | | | 8913-9031 |
| | | | | | 9113-9151 |
| HTLAP64 | 216 | 603913 | AC051649 | 1022 | 1-1669 |
| | | | | | 2187-3004 |
| | | | | | 3755-4254 |
| | | | | | 4401-4484 |
| | | | | | 5367-5870 |
| | | | | | 8558-8628 |
| | | | | | 9033-9151 |
| | | | | | 9233-9273 |
| HTLBT80 | 217 | 840045 | AL133227 | 1023 | 1-51 |
| | | | | | 476-521 |
| | | | | | 842-1226 |
| | | | | | 1375-1490 |
| | | | | | 3745-4016 |
| | | | | | 4046-4229 |
| | | | | | 4430-4855 |
| | | | | | 5300-6053 |
| | | | | | 6598-6883 |
| | | | | | 7406-7446 |
| | | | | | 7461-8437 |
| | | | | | 8550-8681 |
| | | | | | 8888-8919 |
| | | | | | 8943-9353 |
| | | | | | 9458-9544 |
| | | | | | 9834-10607 |
| | | | | | 11550-11629 |
| | | | | | 12196-12374 |
| | | | | | 13532-14886 |
| HTLBT80 | 217 | 840045 | AL133227 | 1024 | 1-32 |
| | | | | | 712-1071 |
| | | | | | 3453-3870 |
| | | | | | 4197-4326 |
| | | | | | 4639-4751 |
| | | | | | 5131-5202 |
| | | | | | 5588-5638 |
| | | | | | 7454-8108 |
| | | | | | 8670-8767 |
| | | | | | 9511-9692 |
| | | | | | 9754-10134 |
| | | | | | 11109-11226 |
| | | | | | 12456-12607 |
| | | | | | 15237-15316 |
| | | | | | 18143-18311 |
| | | | | | 18429-18478 |
| | | | | | 20682-20982 |
| | | | | | 20988-21295 |
| | | | | | 22686-23061 |
| | | | | | 23358-23495 |
| | | | | | 24076-24612 |
| | | | | | 25196-25334 |
| | | | | | 26760-26926 |
| | | | | | 27041-27152 |
| | | | | | 27271-27379 |
| | | | | | 27697-28289 |
| | | | | | 29024-29340 |
| | | | | | 29761-29840 |
| | | | | | 31168-32681 |
| HTLDU78 | 218 | 637702 | AC011444 | 1025 | 1-1305 |
| HTLDU78 | 218 | 637702 | AC011444 | 1026 | 1-285 |
| HTLDU78 | 218 | 637702 | AC011444 | 1027 | 1-274 |
| HTLFA13 | 220 | 535937 | AC022007 | 1028 | 1-1127 |
| HTLFA13 | 220 | 535937 | AC021995 | 1029 | 1-1115 |
| HTLFA13 | 220 | 535937 | AC007783 | 1030 | 1-1144 |
| HTLFA13 | 220 | 535937 | AC022007 | 1031 | 1-1729 |
| HTLFA13 | 220 | 535937 | AC022007 | 1032 | 1-179 |
| | | | | | 184-696 |
| HTLFA13 | 220 | 535937 | AC021995 | 1033 | 1-106 |
| | | | | | 132-190 |
| | | | | | 674-831 |
| | | | | | 1456-1588 |
| | | | | | 3423-4270 |
| | | | | | 4811-4933 |
| | | | | | 5118-5304 |
| HTLFA13 | 220 | 535937 | AC021995 | 1034 | 1-179 |
| | | | | | 184-696 |
| | | | | | 894-945 |
| HTLFA13 | 220 | 535937 | AC007783 | 1035 | 1-169 |
| | | | | | 180-258 |
| | | | | | 681-859 |
| | | | | | 864-1376 |
| | | | | | 3240-3503 |
| HTLFA13 | 220 | 535937 | AC007783 | 1036 | 1-1729 |
| HTLGI89 | 221 | 835069 | AC048342 | 1037 | 1-130 |
| HTLGI89 | 221 | 835069 | AC009453 | 1038 | 1-143 |
| HTLGI89 | 221 | 835069 | AC022231 | 1039 | 1-151 |
| HTLGI89 | 221 | 835069 | AC009524 | 1040 | 1-151 |
| HTLGI89 | 221 | 835069 | AC048342 | 1041 | 1-118 |
| HTOAM11 | 224 | 664508 | AC002369 | 1042 | 1-586 |
| | | | | | 2559-2651 |
| | | | | | 3329-3426 |
| | | | | | 3756-5088 |
| HTOAM11 | 224 | 664508 | AP001486 | 1043 | 1-1191 |
| HTOAM11 | 224 | 664508 | AP000875 | 1044 | 1-1192 |
| HTOAM11 | 224 | 664508 | AC002369 | 1045 | 1-228 |
| HTOAM11 | 224 | 664508 | AP001486 | 1046 | 1-711 |
| HTOAM11 | 224 | 664508 | AP001486 | 1047 | 1-374 |
| HTOAM11 | 224 | 664508 | AP000875 | 1048 | 1-710 |
| HTODH83 | 225 | 580884 | AC012046 | 1049 | 1-1972 |
| HTODH83 | 225 | 580884 | AC012046 | 1050 | 1-105 |
| HTSFJ32 | 227 | 637720 | AC015734 | 1051 | 1-80 |
| | | | | | 562-915 |
| | | | | | 925-4400 |
| HTSFJ32 | 227 | 637720 | AC015734 | 1052 | 1-463 |
| HTSFJ32 | 227 | 637720 | AC015734 | 1053 | 1-359 |
| HTTEE41 | 229 | 840950 | AC018921 | 1054 | 1-92 |
| | | | | | 318-578 |
| | | | | | 837-912 |
| | | | | | 1091-1249 |
| | | | | | 1321-1387 |
| | | | | | 1862-2192 |
| | | | | | 2485-2579 |
| | | | | | 2708-2831 |
| | | | | | 3685-4257 |
| | | | | | 4547-5127 |
| | | | | | 5811-6037 |
| | | | | | 6562-7076 |
| | | | | | 7541-7678 |
| | | | | | 8069-8191 |
| | | | | | 10100-10207 |
| | | | | | 11102-11688 |
| | | | | | 11721-11847 |
| | | | | | 12201-12335 |
| | | | | | 12532-12641 |
| | | | | | 12888-12991 |
| | | | | | 13027-13546 |
| | | | | | 13637-16146 |
| HTTEE41 | 229 | 840950 | AC018921 | 1055 | 1-100 |
| HTWEH94 | 231 | 561680 | AC004858 | 1056 | 1-1349 |
| | | | | | 1370-1744 |
| HTWEH94 | 231 | 561680 | AC004858 | 1057 | 1-94 |
| HTWEH94 | 231 | 561680 | AC004858 | 1058 | 1-199 |
| HTXDC77 | 232 | 844258 | AC004182 | 1059 | 1-2744 |
| | | | | | 2917-3357 |
| HTXDC77 | 232 | 844258 | AC018433 | 1060 | 1-2744 |
| | | | | | 2917-3357 |
| HTXET11 | 234 | 581521 | AC011802 | 1061 | 1-984 |
| HTXET11 | 234 | 581521 | AC025414 | 1062 | 1-984 |
| HTXET11 | 234 | 581521 | AC011802 | 1063 | 1-36 |
| | | | | | 836-964 |
| | | | | | 4059-5438 |
| | | | | | 6005-6176 |
| | | | | | 6789-7120 |
| | | | | | 7124-7588 |
| | | | | | 7735-7827 |
| | | | | | 7925-8770 |
| | | | | | 9057-9545 |
| HTXET11 | 234 | 581521 | AC025414 | 1064 | 1-36 |
| | | | | | 836-964 |
| | | | | | 4059-5438 |
| | | | | | 6002-6173 |
| | | | | | 6786-7117 |
| | | | | | 7121-7585 |
| | | | | | 7732-7809 |
| HTXFA72 | 235 | 853410 | AP001812 | 1065 | 1-1015 |
| HTXFA72 | 235 | 853410 | AP000822 | 1066 | 1-1015 |
| HTXFA72 | 235 | 853410 | AP001812 | 1067 | 1-130 |
| HTXFA72 | 235 | 853410 | AP000822 | 1068 | 1-527 |
| HTXJY08 | 236 | 637774 | AC005962 | 1069 | 1-2075 |
| HTXJY08 | 236 | 637774 | AC004757 | 1070 | 1-2075 |
| HTXJY08 | 236 | 637774 | AC005962 | 1071 | 1-478 |
| HTXJY08 | 236 | 637774 | AC005962 | 1072 | 1-1011 |
| HTXJY08 | 236 | 637774 | AC004757 | 1073 | 1-478 |
| HTXJY08 | 236 | 637774 | AC004757 | 1074 | 1-1011 |
| HUKBT67 | 238 | 844446 | AC073594 | 1075 | 1-391 |
| | | | | | 604-856 |
| | | | | | 1324-1453 |
| | | | | | 1957-2054 |
| | | | | | 2407-2953 |
| | | | | | 3443-5533 |
| HUKBT67 | 238 | 844446 | AC076968 | 1076 | 1-392 |
| | | | | | 605-858 |
| | | | | | 1326-1455 |
| | | | | | 1959-2056 |
| | | | | | 2409-2956 |
| | | | | | 3447-5543 |
| HUKBT67 | 238 | 844446 | AC010892 | 1077 | 1-391 |
| | | | | | 604-857 |
| | | | | | 1325-1454 |
| | | | | | 1958-2055 |
| | | | | | 2408-2955 |
| | | | | | 3446-5538 |
| HUKBT67 | 238 | 844446 | AC068986 | 1078 | 1-391 |
| | | | | | 604-857 |
| | | | | | 1325-1454 |
| | | | | | 1958-2055 |
| | | | | | 2408-2955 |
| | | | | | 3445-5537 |
| HUKBT67 | 238 | 844446 | AC010892 | 1079 | 1-436 |
| HUKBT67 | 238 | 844446 | AC010892 | 1080 | 1-368 |
| HUKBT67 | 238 | 844446 | AC068986 | 1081 | 1-436 |
| HUSCJ14 | 240 | 894699 | AC007040 | 1082 | 1-149 |
| | | | | | 394-889 |
| | | | | | 1061-1139 |
| | | | | | 2097-2249 |
| | | | | | 2852-3007 |
| | | | | | 5021-5089 |
| | | | | | 5217-5919 |
| | | | | | 6119-8896 |
| HUSCJ14 | 240 | 894699 | AC007040 | 1083 | 1-854 |
| HUSCJ14 | 240 | 894699 | AC007040 | 1084 | 1-397 |
| HUSGU40 | 242 | 684975 | AC072032 | 1085 | 1-364 |
| HUSGU40 | 242 | 684975 | AC022305 | 1086 | 1-686 |
| HUSGU40 | 242 | 684975 | AC078916 | 1087 | 1-364 |
| HUSGU40 | 242 | 684975 | AC072032 | 1088 | 1-288 |
| HUSGU40 | 242 | 684975 | AC078916 | 1089 | 1-288 |
| HUSIR18 | 243 | 762858 | AC068055 | 1090 | 1-149 |
| HUSIR18 | 243 | 762858 | AC022231 | 1091 | 1-151 |
| HUSIR18 | 243 | 762858 | AC010694 | 1092 | 1-202 |
| HUSIR18 | 243 | 762858 | AL160163 | 1093 | 1-258 |
| | | | | | 1798-4171 |
| HUSIR18 | 243 | 762858 | AC027300 | 1094 | 1-158 |
| HUSIR18 | 243 | 762858 | AC073047 | 1095 | 1-170 |
| HUSIR18 | 243 | 762858 | AC009524 | 1096 | 1-151 |
| HUSIR18 | 243 | 762858 | AC068055 | 1097 | 1-77 |
| HUSIR18 | 243 | 762858 | AC010694 | 1098 | 1-77 |
| HUSIR18 | 243 | 762858 | AL160163 | 1099 | 1-117 |
| HWDAC26 | 245 | 821335 | AC004947 | 1100 | 1-1669 |
| HWDAJ01 | 246 | 794016 | AC015551 | 1101 | 1-670 |
| HWDAJ01 | 246 | 794016 | AC019214 | 1102 | 1-670 |
| HYABC84 | 249 | 865064 | AL132825 | 1103 | 1-2512 |
| | | | | | 2604-2740 |
| | | | | | 2974-3241 |
| | | | | | 1-2512 |
| | | | | | 2604-2740 |
| | | | | | 2974-3241 |
| HYABC84 | 249 | 865064 | AL132825 | 1104 | 1-553 |
| | | | | | 1-553 |
| | | | | | 1059-1263 |
| | | | | | 1059-1263 |
| | | | | | 3121-3476 |
| | | | | | 3121-3476 |
| | | | | | 5284-5734 |
| | | | | | 5284-5734 |
| | | | | | 6284-6513 |
| | | | | | 6284-6513 |
| | | | | | 6786-7426 |
| | | | | | 6786-7426 |
| | | | | | 8674-8733 |
| | | | | | 8674-8733 |
| | | | | | 10656-10933 |
| | | | | | 10656-10933 |
| | | | | | 11453-11555 |
| | | | | | 11453-11555 |
| | | | | | 12991-13079 |
| | | | | | 12991-13079 |
| | | | | | 13839-14281 |
| | | | | | 13839-14281 |
| | | | | | 14527-14827 |
| | | | | | 14527-14827 |
| | | | | | 15156-15685 |
| | | | | | 15156-15685 |
| | | | | | 15835-16046 |
| | | | | | 15835-16046 |
| | | | | | 16166-16604 |
| | | | | | 16166-16604 |
| | | | | | 16736-19566 |
| | | | | | 16736-19566 |
| | | | | | 19658-19794 |
| | | | | | 19658-19794 |
| | | | | | 20028-20295 |
| | | | | | 20028-20295 |
| HYABC84 | 249 | 865064 | AL132825 | 1105 | 1-188 |
| | | | | | 1-188 |
| HE2CA60 | 250 | 888705 | AC005921 | 1106 | 1-74 |
| | | | | | 276-1076 |
| | | | | | 1472-2160 |
| | | | | | 3055-3389 |
| | | | | | 3769-3898 |
| | | | | | 4143-4288 |
| | | | | | 4322-4697 |
| | | | | | 4699-4772 |
| | | | | | 6745-6851 |
| | | | | | 7692-9044 |
| | | | | | 9581-9743 |
| | | | | | 13540-17646 |
| | | | | | 1-74 |
| | | | | | 276-1076 |
| | | | | | 1472-2160 |
| | | | | | 3055-3389 |
| | | | | | 3769-3898 |
| | | | | | 4143-4288 |
| | | | | | 4322-4697 |
| | | | | | 4699-4772 |
| | | | | | 6745-6851 |
| | | | | | 7692-9044 |
| | | | | | 9581-9743 |
| | | | | | 13540-17646 |
| HE2CA60 | 250 | 888705 | AC005921 | 1107 | 1-1466 |
| | | | | | 1-1466 |
| HE8FD92 | 252 | 901142 | AL359176 | 1108 | 1-2410 |
| | | | | | 1-2410 |
| | | | | | 1-2410 |
| | | | | | 2420-4226 |
| | | | | | 2420-4226 |
| | | | | | 2420-4226 |
| HE8FD92 | 252 | 901142 | AL139152 | 1109 | 1-826 |
| | | | | | 863-2063 |
| | | | | | 2125-4935 |
| | | | | | 4945-6753 |
| | | | | | 1-826 |
| | | | | | 863-2063 |
| | | | | | 2125-4935 |
| | | | | | 4945-6753 |
| | | | | | 1-826 |
| | | | | | 863-2063 |
| | | | | | 2125-4935 |
| | | | | | 4945-6753 |
| | | | | | 1-826 |
| | | | | | 863-2063 |
| | | | | | 2125-4935 |
| | | | | | 4945-6753 |
| HE8FD92 | 252 | 901142 | AL109937 | 1110 | 1-168 |
| | | | | | 233-930 |
| | | | | | 1572-1748 |
| | | | | | 2463-3391 |
| HE8FD92 | 252 | 901142 | AC027209 | 1111 | 1-1201 |
| | | | | | 1-1201 |
| | | | | | 1-1201 |
| | | | | | 1263-1531 |
| | | | | | 1263-1531 |
| | | | | | 1263-1531 |
| | | | | | 1648-5860 |
| | | | | | 1648-5860 |
| | | | | | 1648-5860 |
| HE8FD92 | 252 | 901142 | AL356004 | 1112 | 1-1052 |
| | | | | | 1062-2871 |
| HE8FD92 | 252 | 901142 | AL139152 | 1113 | 1-560 |
| | | | | | 760-1714 |
| | | | | | 1740-3644 |
| | | | | | 3736-4319 |
| | | | | | 4872-4998 |
| | | | | | 1-560 |
| | | | | | 760-1714 |
| | | | | | 1740-3644 |
| | | | | | 3736-4319 |
| | | | | | 4872-4998 |
| | | | | | 1-560 |
| | | | | | 760-1714 |
| | | | | | 1740-3644 |
| | | | | | 3736-4319 |
| | | | | | 4872-4998 |
| | | | | | 1-560 |
| | | | | | 760-1714 |
| | | | | | 1740-3644 |
| | | | | | 3736-4319 |
| | | | | | 4872-4998 |
| HE8FD92 | 252 | 901142 | AL109937 | 1114 | 1-437 |
| HE8FD92 | 252 | 901142 | AC027209 | 1115 | 1-560 |
| | | | | | 1-560 |
| | | | | | 1-560 |
| | | | | | 747-1721 |
| | | | | | 747-1721 |
| | | | | | 747-1721 |
| | | | | | 1875-3650 |
| | | | | | 1875-3650 |
| | | | | | 1875-3650 |
| | | | | | 3698-4325 |
| | | | | | 3698-4325 |
| | | | | | 3698-4325 |
| | | | | | 4657-4693 |
| | | | | | 4657-4693 |
| | | | | | 4657-4693 |
| | | | | | 4879-5008 |
| | | | | | 4879-5008 |
| | | | | | 4879-5008 |
| HE8FD92 | 252 | 901142 | AC027209 | 1116 | 1-423 |
| | | | | | 1-423 |
| | | | | | 1-423 |
| HE8FD92 | 252 | 901142 | AL356004 | 1117 | 1-560 |

[0107] Table 1D: The polynucleotides or polypeptides, or agonists or antagonists of the present invention can be used in assays to test for one or more biological activities. If these polynucleotides and polypeptides do exhibit activity in a particular assay, it is likely that these molecules may be involved in the diseases associated with the biological activity. Thus, the polynucleotides or polypeptides, or agonists or antagonists could be used to treat the associated disease.

[0108] The present invention encompasses methods of detecting, preventing, diagnosing, prognosticating, treating, and/or ameliorating a disease or disorder. In preferred embodiments, the present invention encompasses a method of treating a cardiovascular disease or disorder comprising administering to a patient in which such detection, treatment, prevention, and/or amelioration is desired a protein, nucleic acid, or antibody of the invention (or fragment or variant thereof) in an amount effective to detect, prevent, diagnose, prognosticate, treat, and/or ameliorate the cardiovascular disease or disorder.

[0109] In another embodiment, the present invention also encompasses methods of detecting, preventing, diagnosing, prognosticating, treating, and/or ameliorating a cardiovascular disease or disorder; comprising administering to a patient combinations of the proteins, nucleic acids, or antibodies of the invention (or fragments or variants thereof), sharing similar indications as shown in the corresponding rows in Column 3 of Table 1D.

[0110] Table 1D provides information related to biological activities for polynucleotides and polypeptides of the invention (including antibodies, agonists, and/or antagonists thereof). Table 1D also provides information related to assays which may be used to test polynucleotides and polypeptides of the invention (including antibodies, agonists, and/or antagonists thereof) for the corresponding biological activities. The first column (“Gene No.”) provides the gene number in the application for each clone identifier. The second column (“cDNA Clone ID:”) provides the unique clone identifier for each clone as previously described and indicated in Table 1A through Table 1D. The third column (“AA SEQ ID NO:Y”) indicates the Sequence Listing SEQ ID Number for polypeptide sequences encoded by the corresponding cDNA clones (also as indicated in Tables 1A, Table 1B, and Table 2). The fourth column (“Biological Activity”) indicates a biological activity corresponding to the indicated polypeptides (or polynucleotides encoding said polypeptides). The fifth column (“Exemplary Activity Assay”) further describes the corresponding biological activity and also provides information pertaining to the various types of assays which may be performed to test, demonstrate, or quantify the corresponding biological activity.

[0111] Table 1D describes the use of, inter alia, FMAT technology for testing or demonstrating-various biological activities. Fluorometric microvolume assay technology (FMAT) is a fluorescence-based system which provides a means to perform nonradioactive cell- and bead-based assays to detect activation of cell signal transduction pathways. This technology was designed specifically for ligand binding and immunological assays. Using this technology, fluorescent cells or beads at the bottom of the well are detected as localized areas of concentrated fluorescence using a data processing system. Unbound flurophore comprising the background signal is ignored, allowing for a wide variety of homogeneous assays. FMAT technology may be used for peptide ligand binding assays, immunofluorescence, apoptosis, cytotoxicity, and bead-based immunocapture assays. See, Miraglia S et. al., “Homogeneous cell and bead based assays for highthroughput screening using flourometric microvolume assay technology,” Journal of Biomolecular Screening; 4:193-204 (1999). In particular, FMAT technology may be used to test, confirm, and/or identify the ability of polypeptides (including polypeptide fragments and variants) to activate signal transduction pathways. For example, FMAT technology may be used to test, confirm, and/or identify the ability of polypeptides to upregulate production of immunomodulatory proteins (such as, for example, interleukins, GM-CSF, Rantes, and Tumor Necrosis factors, as well as other cellular regulators (e.g. insulin)).

[0112] Table 1D also describes the use of kinase assays for testing, demonstrating, or quantifying biological activity. In this regard, the phosphorylation and de-phosphorylation of specific amino acid residues (e.g. Tyrosine, Serine, Threonine) on cell-signal transduction proteins provides a fast, reversible means for activation and de-activation of cellular signal transduction pathways. Moreover, cell signal transduction via phosphorylation/de-phosphorylation is crucial to the regulation of a wide variety of cellular processes (e.g. proliferation, differentiation, migration, apoptosis, etc.). Accordingly, kinase assays provide a powerful tool useful for testing, confirming, and/or identifying polypeptides (including polypeptide fragments and variants) that mediate cell signal transduction events via protein phosphorylation. See e.g., Forrer, P., Tamaskovic R., and Jaussi, R. “Enzyme-Linked Immunosorbent Assay for Measurement of JNK, ERK, and p38 Kinase Activities” Biol. Chem 379(8-9): 1101-1110 (1998).

LENGTHY TABLE REFERENCED HERE
US20070032414A1-20070208-T00001
Please refer to the end of the specification for access instructions.

Table 1E

[0113] Polynucleotides encoding polypeptides of the present invention can be used in assays to test for one or more biological activities. One such biological activity which may be tested includes the ability of polynucleotides and polypeptides of the invention to stimulate up-regulation or down-regulation of expression of particular genes and proteins. Hence, if polynucleotides and polypeptides of the present invention exhibit activity in altering particular gene and protein expression patterns, it is likely that these polynucleotides and polypeptides of the present invention may be involved in, or capable of effecting changes in, diseases associated with the altered gene and protein expression profiles. Hence, polynucleotides, polypeptides, or antibodies of the present invention could be used to treat said associated diseases.

[0114] TaqMan® assays may be performed to assess the ability of polynucleotides (and polypeptides they encode) to alter the expression pattern of particular “target” genes. TaqMan® reactions are performed to evaluate the ability of a test agent to induce or repress expression of specific genes in different cell types. TaqMan® gene expression quantification assays (“TaqMan® assays”) are well known to, and routinely performed by, those of ordinary skill in the art. TaqMan® assays are performed in a two step reverse transcription/polymerase chain reaction (RT-PCR). In the first (RT) step, cDNA is reverse transcribed from total RNA samples using random hexamer primers. In the second (PCR) step, PCR products are synthesized from the cDNA using gene specific primers.

[0115] To quantify gene expression the Taqman® PCR reaction exploits the 5′ nuclease activity of AmpliTaq Gold® DNA Polymerase to cleave a Taqman® probe (distinct from the primers) during PCR. The Taqman® probe contains a reporter dye at the 5′-end of the probe and a quencher dye at the 3′ end of the probe. When the probe is intact, the proximity of the reporter dye to the quencher dye results in suppression of the reporter fluorescence. During PCR, if the target of interest is present, the probe specifically anneals between the forward and reverse primer sites. AmpliTaq Fold DNA Polymerase then cleaves the probe between the reporter and quencher when the probe hybridizes to the target, resulting in increased fluorescence of the reporter (see FIG. 2). Accumulation of PCR products is detected directly by monitoring the increase in fluorescence of the reporter dye.

[0116] After the probe fragments are displaced from the target, polymerization of the strand continues. The 3′-end of the probe is blocked to prevent extension of the probe during PCR. This process occurs in every cycle and does not interfere with the exponential accumulation of product. The increase in fluorescence signal is detected only if the target sequence is complementary to the probe and is amplified during PCR. Because of these requirements, any nonspecific amplification is not detected.

[0117] For test sample preparation, vector controls or constructs containing the coding sequence for the gene of interest are transfected into cells, such as for example 293T cells, and supernatants collected after 48 hours. For cell treatment and RNA isolation, multiple primary human cells or human cell lines are used; such cells may include but are not limited to, Normal Human Dermal Fibroblasts, Aortic Smooth Muscle, Human Umbilical Vein Endothelial Cells, HepG2, Daudi, Jurkat, U937, Caco, and THP-1 cell lines. Cells are plated in growth media and growth is arrested by culturing without media change for 3 days, or by switching cells to low serum media and incubating overnight. Cells are treated for 1, 6, or 24 hours with either vector control supernatant or sample supernatant (or purified/partially purified protein preparations in buffer). Total RNA is isolated; for example, by using Trizol extraction or by using the Ambion RNAqueous(I)-4PCR RNA isolation system. Expression levels of multiple genes are analyzed using TAQMAN, and expression in the test sample is compared to control vector samples to identify genes induced or repressed. Each of the above described techniques are well known to, and routinely performed by, those of ordinary skill in the art.

[0118] Table BE indicates particular disease classes and preferred indications for which polynucleotides, polypeptides, or antibodies of the present invention may be used in detecting, diagnosing, preventing, treating and/or ameliorating said diseases and disorders based on “target” gene expression patterns which may be up- or down-regulated by polynucleotides (and the encoded polypeptides) corresponding to each indicated cDNA Clone ID (shown in Table 1E, Column 2).

[0119] Thus, in preferred embodiments, the present invention encompasses a method of detecting, diagnosing, preventing, treating, and/or ameliorating a disease or disorder listed in the “Disease Class” and/or “Preferred Indication” columns of Table 1E; comprising administering to a patient in which such detection, diagnosis, prevention, or treatment is desired a protein, nucleic acid, or antibody of the invention (or fragment or variant thereof) in an amount effective to detect, diagnose, prevent, treat, or ameliorate the disease or disorder. The first and second columns of Table 1D show the “Gene No.” and “cDNA Clone ID No.”, respectively, indicating certain nucleic acids and proteins (or antibodies against the same) of the invention (including polynucleotide, polypeptide, and antibody fragments or variants thereof) that may be used in detecting, diagnosing, preventing, treating, or ameliorating the disease(s) or disorder(s) indicated in the corresponding row in the “Disease Class” or “Preferred Indication” Columns of Table BE.

[0120] In another embodiment, the present invention also encompasses methods of detecting, diagnosing, preventing, treating, or ameliorating a disease or disorder listed in the “Disease Class” or “Preferred Indication” Columns of Table 1E; comprising administering to a patient combinations of the proteins, nucleic acids, or antibodies of the invention (or fragments or variants thereof), sharing similar indications as shown in the corresponding rows in the “Disease Class” or “Preferred Indication” Columns of Table 1E.

[0121] The “Disease Class” Column of Table 1E provides a categorized descriptive heading for diseases, disorders, and/or conditions (more fully described below) that may be detected, diagnosed, prevented, treated, or ameliorated by a protein, nucleic acid, or antibody of the invention (or fragment or variant thereof).

[0122] The “Preferred Indication” Column of Table 1E describes diseases, disorders, and/or conditions that may be detected, diagnosed, prevented, treated, or ameliorated by a protein, nucleic acid, or antibody of the invention (or fragment or variant thereof).

[0123] The “Cell Line” and “Exemplary Targets” Columns of Table 1E indicate particular cell lines and target genes, respectively, which may show altered gene expression patterns (i.e., up- or down-regulation of the indicated target gene) in Taqman assays, performed as described above, utilizing polynucleotides of the cDNA Clone ID shown in the corresponding row. Alteration of expression patterns of the indicated “Exemplary Target” genes is correlated with a particular “Disease Class” and/or “Preferred Indication” as shown in the corresponding row under the respective column headings.

[0124] The “Exemplary Accessions” Column indicates GenBank Accessions (available online through the National Center for Biotechnology Information (NCBI) at http://www.ncbi.nlm.nih.gov/) which correspond to the “Exemplary Targets” shown in the adjacent row.

[0125] The recitation of “Cancer” in the “Disease Class” Column indicates that the corresponding nucleic acid and protein, or antibody against the same, of the invention (or fragment or variant thereof) may be used for example, to detect, diagnose, prevent, treat, and/or ameliorate neoplastic diseases and/or disorders (e.g., leukemias, cancers, etc., as described below under “Hyperproliferative Disorders”).

[0126] The recitation of “Immune” in the “Disease Class” column indicates that the corresponding nucleic acid and protein, or antibody against the same, of the invention (or fragment or variant thereof), may be used for example, to detect, diagnose, prevent, treat, and/or ameliorate diseases and/or disorders relating to neoplastic diseases (e.g., as described below under “Hyperproliferative Disorders”), blood disorders (e.g., as described below under “Immune Activity” “Cardiovascular Disorders” and/or “Blood-Related Disorders”), and infections (e.g., as described below under “Infectious Disease”).

[0127] The recitation of “Angiogenesis” in the “Disease Class” column indicates that the corresponding nucleic acid and protein, or antibody against the same, of the invention (or fragment or variant thereof), may be used for example, to detect, diagnose, treat, prevent, and/or ameliorate diseases and/or disorders relating to neoplastic diseases (e.g., as described below under “Hyperproliferative Disorders”), diseases and/or disorders of the cardiovascular system (e.g., as described below under “Cardiovascular Disorders”), diseases and/or disorders involving cellular and genetic abnormalities (e.g., as described below under “Diseases at the Cellular Level”), diseases and/or disorders involving angiogenesis (e.g., as described below under “Anti-Angiogenesis Activity”), to promote or inhibit cell or tissue regeneration (e.g., as described below under “Regeneration”), or to promote wound healing (e.g., as described below under “Wound Healing and Epithelial Cell Proliferation”).

[0128] The recitation of “Diabetes” in the “Disease Class” column indicates that the corresponding nucleic acid and protein, or antibody against the same, of the invention (or fragment or variant thereof), may be used for example, to detect, diagnose, treat, prevent, and/or ameliorate diabetes (including diabetes mellitus types I and II), as well as diseases and/or disorders associated with, or consequential to, diabetes (e.g. as described below under “Endocrine Disorders,” “Renal Disorders,” and “Gastrointestinal Disorders”).

TABLE 1E

| Gene | cDNA | Disease | | | Exemplary | Exemplary |
|---|---|---|---|---|---|---|
| No. | CloneID | Class | Preferred Indications | Cell Line | Targets | Accessions |
| 40 | HCEGG08 | Angiogenesis | Highly preferred indications include diagnosis, prevention, | AOSMC | Vegf1 | gb\|AF024710\|AF024710 |
| | | | treatment, and/or amelioration of diseases and disorders | | | |
| | | | involving angiogenesis, wound healing, neoplasia (particularly | | | |
| | | | including, but not limited to, tumor metastases), and | | | |
| | | | cardiovascular diseases and disorders; as described herein | | | |
| | | | under the headings “Hyperproliferative Disorders,” | | | |
| | | | “Regeneration,” “Anti-Angiogenesis Activity,” “Diseases at | | | |
| | | | the Cellular Level,” and “Wound Healing and Epithelial Cell | | | |
| | | | Proliferation.”(AOSMC cells are aortic smooth muscle cells). | | | |
| 40 | HCEGG08 | Angiogenesis | Highly preferred indications include diagnosis, prevention, | Caco-2 | Flt1 | gb\|AF063657\|AF063657 |
| | | | treatment, and/or amelioration of diseases and disorders | | | |
| | | | involving angiogenesis, wound healing, neoplasia (particularly | | | |
| | | | including, but not limited to, tumor metastases), and | | | |
| | | | cardiovascular diseases and disorders; as described herein | | | |
| | | | under the headings “Hyperproliferative Disorders,” | | | |
| | | | “Regeneration,” “Anti-Angiogenesis Activity,” “Diseases at | | | |
| | | | the Cellular Level,” and “Wound Healing and Epithelial Cell | | | |
| | | | Proliferation.”(The Caco-2 cell line is a human colorectal | | | |
| | | | adenocarcinoma cell line available through the ATCC as cell | | | |
| | | | line number HTB-37). | | | |
| 40 | HCEGG08 | Angiogenesis | Highly preferred indications include diagnosis, prevention, | HEK293 | ICAM | gb\|X06990\|HSICAM1 |
| | | | treatment, and/or amelioration of diseases and disorders | | | |
| | | | involving angiogenesis, wound healing, neoplasia (particularly | | | |
| | | | including, but not limited to, tumor metastases), and | | | |
| | | | cardiovascular diseases and disorders; as described herein | | | |
| | | | under the headings “Hyperproliferative Disorders,” | | | |
| | | | “Regeneration,” “Anti-Angiogenesis Activity,” “Diseases at | | | |
| | | | the Cellular Level,” and “Wound Healing and Epithelial Cell | | | |
| | | | Proliferation.”(The HEK293 cell line is a human embryonal | | | |
| | | | kidney epithelial cell line available through the ATCC as cell | | | |
| | | | line number CRL-1573). | | | |
| 40 | HCEGG08 | Angiogenesis | Highly preferred indications include diagnosis, prevention, | HUVEC | PAI | gb\|X12701\|HSENDPAI |
| | | | treatment, and/or amelioration of diseases and disorders | | | |
| | | | involving angiogenesis, wound healing, neoplasia (particularly | | | |
| | | | including, but not limited to, tumor metastases), and | | | |
| | | | cardiovascular diseases and disorders; as described herein | | | |
| | | | under the headings “Hyperproliferative Disorders,” | | | |
| | | | “Regeneration,” “Anti-Angiogenesis Activity,” “Diseases at | | | |
| | | | the Cellular Level,” and “Wound Healing and Epithelial Cell | | | |
| | | | Proliferation.”(HUVEC cells are human umbilical vein | | | |
| | | | endothelial cells). | | | |
| 40 | HCEGG08 | Angiogenesis | Highly preferred indications include diagnosis, prevention, | Liver | ICAM | gb\|X06990\|HSICAM1 |
| | | | treatment, and/or amelioration of diseases and disorders | | | |
| | | | involving angiogenesis, wound healing, neoplasia (particularly | | | |
| | | | including, but not limited to, tumor metastases), and | | | |
| | | | cardiovascular diseases and disorders; as described herein | | | |
| | | | under the headings “Hyperproliferative Disorders,” | | | |
| | | | “Regeneration,” “Anti-Angiogenesis Activity,” “Diseases at | | | |
| | | | the Cellular Level,” and “Wound Healing and Epithelial Cell | | | |
| | | | Proliferation.” | | | |
| 40 | HCEGG08 | Angiogenesis | Highly preferred indications include diagnosis, prevention, | NHDF | TSP-1 | gb\|X04665\|HSTHROMR |
| | | | treatment, and/or amelioration of diseases and disorders | | Vegf1 | gb\|AF024710\|AF024710 |
| | | | involving angiogenesis, wound healing, neoplasia (particularly | | | |
| | | | including, but not limited to, tumor metastases), and | | | |
| | | | cardiovascular diseases and disorders; as described herein | | | |
| | | | under the headings “Hyperproliferative Disorders,” | | | |
| | | | “Regeneration,” “Anti-Angiogenesis Activity,” “Diseases at | | | |
| | | | the Cellular Level,” and “Wound Healing and Epithelial Cell | | | |
| | | | Proliferation.”(NHDF cells are normal human dermal | | | |
| | | | fibroblasts). | | | |
| 40 | HCEGG08 | Angiogenesis | Highly preferred indications include diagnosis, prevention, | SK-N-MC | TSP-1 | gb\|X04665\|HSTHROMR |
| | | | treatment, and/or amelioration of diseases and disorders | neuro- | VCAM | gb\|A30922\|A30922 |
| | | | involving angiogenesis, wound healing, neoplasia (particularly | blastoma | Vegf1 | gb\|AF024710\|AF024710 |
| | | | including, but not limited to, tumor metastases), and | | | |
| | | | cardiovascular diseases and disorders; as described herein | | | |
| | | | under the headings “Hyperproliferative Disorders,” | | | |
| | | | “Regeneration,” “Anti-Angiogenesis Activity,” “Diseases at | | | |
| | | | the Cellular Level,” and “Wound Healing and Epithelial Cell | | | |
| | | | Proliferation.”(The SK-N-MC neuroblastoma cell line is a cell | | | |
| | | | line derived from human brain tissue available through the | | | |
| | | | ATCC as cell line number HTB-10). | | | |
| 40 | HCEGG08 | Angiogenesis | Highly preferred indications include diagnosis, prevention, | THP1 | VCAM | gb\|A30922\|A30922 |
| | | | treatment, and/or amelioration of diseases and disorders | | Vegf1 | gb\|AF024710\|AF024710 |
| | | | involving angiogenesis, wound healing, neoplasia (particularly | | | |
| | | | including, but not limited to, tumor metastases), and | | | |
| | | | cardiovascular diseases and disorders; as described herein | | | |
| | | | under the headings “Hyperproliferative Disorders,” | | | |
| | | | “Regeneration,” “Anti-Angiogenesis Activity,” “Diseases at | | | |
| | | | the Cellular Level,” and “Wound Healing and Epithelial Cell | | | |
| | | | Proliferation.”(The THP-1 cell line is a human monocyte cell | | | |
| | | | line available through the ATCC as cell line number TIB- | | | |
| | | | 202). | | | |
| 197 | HTEEW69 | Angiogenesis | Highly preferred indications include diagnosis, prevention, | Caco-2 | iNOS | gb\|X85761\|HSNOS2E3 |
| | | | treatment, and/or amelioration of diseases and disorders | | | |
| | | | involving angiogenesis, wound healing, neoplasia (particularly | | | |
| | | | including, but not limited to, tumor metastases), and | | | |
| | | | cardiovascular diseases and disorders; as described herein | | | |
| | | | under the headings “Hyperproliferative Disorders,” | | | |
| | | | “Regeneration,” “Anti-Angiogenesis Activity,” “Diseases at | | | |
| | | | the Cellular Level,” and “Wound Healing and Epithelial Cell | | | |
| | | | Proliferation.”(The Caco-2 cell line is a human colorectal | | | |
| | | | adenocarcinoma cell line available through the ATCC as cell | | | |
| | | | line number HTB-37). | | | |
| 197 | HTEEW69 | Angiogenesis | Highly preferred indications include diagnosis, prevention, | Daudi | ICAM | gb\|X06990\|HSICAM1 |
| | | | treatment, and/or amelioration of diseases and disorders | | Vegf1 | gb\|AF024710\|AF024710 |
| | | | involving angiogenesis, wound healing, neoplasia (particularly | | | |
| | | | including, but not limited to, tumor metastases), and | | | |
| | | | cardiovascular diseases and disorders; as described herein | | | |
| | | | under the headings “Hyperproliferative Disorders,” | | | |
| | | | “Regeneration,” “Anti-Angiogenesis Activity,” “Diseases at | | | |
| | | | the Cellular Level,” and “Wound Healing and Epithelial Cell | | | |
| | | | Proliferation.”(The Daudi cell line is a human B lymphoblast | | | |
| | | | cell line available through the ATCC as cell line number | | | |
| | | | CCL-213). | | | |
| 197 | HTEEW69 | Angiogenesis | Highly preferred indications include diagnosis, prevention, | HEK293 | Flt1 | gb\|AF063657\|AF063657 |
| | | | treatment, and/or amelioration of diseases and disorders | | TSP-1 | gb\|X04665\|HSTHROMR |
| | | | involving angiogenesis, wound healing, neoplasia (particularly | | | |
| | | | including, but not limited to, tumor metastases), and | | | |
| | | | cardiovascular diseases and disorders; as described herein | | | |
| | | | under the headings “Hyperproliferative Disorders,” | | | |
| | | | “Regeneration,” “Anti-Angiogenesis Activity,” “Diseases at | | | |
| | | | the Cellular Level,” and “Wound Healing and Epithelial Cell | | | |
| | | | Proliferation.”(The HEK293 cell line is a human embryonal | | | |
| | | | kidney epithelial cell line available through the ATCC as cell | | | |
| | | | line number CRL-1573). | | | |
| 197 | HTEEW69 | Angiogenesis | Highly preferred indications include diagnosis, prevention, | Liver | ICAM | gb\|X06990\|HSICAM1 |
| | | | treatment, and/or amelioration of diseases and disorders | | TSP-1 | gb\|X04665\|HSTHROMR |
| | | | involving angiogenesis, wound healing, neoplasia (particularly | | Vegf1 | gb\|AF024710\|AF024710 |
| | | | including, but not limited to, tumor metastases), and | | | |
| | | | cardiovascular diseases and disorders; as described herein | | | |
| | | | under the headings “Hyperproliferative Disorders,” | | | |
| | | | “Regeneration,” “Anti-Angiogenesis Activity,” “Diseases at | | | |
| | | | the Cellular Level,” and “Wound Healing and Epithelial Cell | | | |
| | | | Proliferation.” | | | |
| 197 | HTEEW69 | Angiogenesis | Highly preferred indications include diagnosis, prevention, | SK-N-MC | Cycloox | gb\|A30922\|A30922 |
| | | | treatment, and/or amelioration of diseases and disorders | neuro- | VCAM | |
| | | | involving angiogenesis, wound healing, neoplasia (particularly | blastoma | | |
| | | | including, but not limited to, tumor metastases), and | | | |
| | | | cardiovascular diseases and disorders; as described herein | | | |
| | | | under the headings “Hyperproliferative Disorders,” | | | |
| | | | “Regeneration,” “Anti-Angiogenesis Activity,” “Diseases at | | | |
| | | | the Cellular Level,” and “Wound Healing and Epithelial Cell | | | |
| | | | Proliferation.”(The SK-N-MC neuroblastoma cell line is a cell | | | |
| | | | line derived from human brain tissue available through the | | | |
| | | | ATCC as cell line number HTB-10). | | | |
| 197 | HTEEW69 | Angiogenesis | Highly preferred indications include diagnosis, prevention, | THP1 | TSP-1 | gb\|X04665\|HSTHROMR |
| | | | treatment, and/or amelioration of diseases and disorders | | | |
| | | | involving angiogenesis, wound healing, neoplasia (particularly | | | |
| | | | including, but not limited to, tumor metastases), and | | | |
| | | | cardiovascular diseases and disorders; as described herein | | | |
| | | | under the headings “Hyperproliferative Disorders,” | | | |
| | | | “Regeneration,” “Anti-Angiogenesis Activity,” “Diseases at | | | |
| | | | the Cellular Level,” and “Wound Healing and Epithelial Cell | | | |
| | | | Proliferation.”(The THP-1 cell line is a human monocyte cell | | | |
| | | | line available through the ATCC as cell line number TIB- | | | |
| | | | 202). | | | |
| 197 | HTEEW69 | Angiogenesis | Highly preferred indications include diagnosis, prevention, | U937 | Vegf1 | gb\|AF024710\|AF024710 |
| | | | treatment, and/or amelioration of diseases and disorders | | | |
| | | | involving angiogenesis, wound healing, neoplasia (particularly | | | |
| | | | including, but not limited to, tumor metastases), and | | | |
| | | | cardiovascular diseases and disorders; as described herein | | | |
| | | | under the headings “Hyperproliferative Disorders,” | | | |
| | | | “Regeneration,” “Anti-Angiogenesis Activity,” “Diseases at | | | |
| | | | the Cellular Level,” and “Wound Healing and Epithelial Cell | | | |
| | | | Proliferation.”(The U937 cell line is a human monocyte cell | | | |
| | | | line available through the ATCC as cell line number CRL- | | | |
| | | | 1593.2). | | | |
| 40 | HCEGG08 | Angiogenesis | Highly preferred indications include diagnosis, prevention, | Caco-2 | Flt1 | gb\|AF063657\|AF063657 |
| | | | treatment, and/or amelioration of diseases and disorders | | | |
| | | | involving angiogenesis, wound healing, neoplasia (particularly | | | |
| | | | including, but not limited to, tumor metastases), and | | | |
| | | | cardiovascular diseases and disorders; as described herein | | | |
| | | | under the headings “Hyperproliferative Disorders,” | | | |
| | | | “Regeneration,” “Anti-Angiogenesis Activity,” “Diseases at | | | |
| | | | the Cellular Level,” and “Wound Healing and Epithelial Cell | | | |
| | | | Proliferation.”(The Caco-2 cell line is a human colorectal | | | |
| | | | adenocarcinoma cell line available through the ATCC as cell | | | |
| | | | line number HTB-37). | | | |
| 40 | HCEGG08 | Angiogenesis | Highly preferred indications include diagnosis, prevention, | HEK293 | ICAM | gb\|X06990\|HSICAM1 |
| | | | treatment, and/or amelioration of diseases and disorders | | | |
| | | | involving angiogenesis, wound healing, neoplasia (particularly | | | |
| | | | including, but not limited to, tumor metastases), and | | | |
| | | | cardiovascular diseases and disorders; as described herein | | | |
| | | | under the headings “Hyperproliferative Disorders,” | | | |
| | | | “Regeneration,” “Anti-Angiogenesis Activity,” “Diseases at | | | |
| | | | the Cellular Level,” and “Wound Healing and Epithelial Cell | | | |
| | | | Proliferation.”(The HEK293 cell line is a human embryonal | | | |
| | | | kidney epithelial cell line available through the ATCC as cell | | | |
| | | | line number CRL-1573). | | | |
| 40 | HCEGG08 | Angiogenesis | Highly preferred indications include diagnosis, prevention, | HUVEC | PAI | gb\|X12701\|HSENDPAI |
| | | | treatment, and/or amelioration of diseases and disorders | | | |
| | | | involving angiogenesis, wound healing, neoplasia (particularly | | | |
| | | | including, but not limited to, tumor metastases), and | | | |
| | | | cardiovascular diseases and disorders; as described herein | | | |
| | | | under the headings “Hyperproliferative Disorders,” | | | |
| | | | “Regeneration,” “Anti-Angiogenesis Activity,” “Diseases at | | | |
| | | | the Cellular Level,” and “Wound Healing and Epithelial Cell | | | |
| | | | Proliferation.”(HUVEC cells are human umbilical vein | | | |
| | | | endothelial cells). | | | |
| 40 | HCEGG08 | Angiogenesis | Highly preferred indications include diagnosis, prevention, | Liver | ICAM | gb\|X06990\|HSICAM1 |
| | | | treatment, and/or amelioration of diseases and disorders | | | |
| | | | involving angiogenesis, wound healing, neoplasia (particularly | | | |
| | | | including, but not limited to, tumor metastases), and | | | |
| | | | cardiovascular diseases and disorders; as described herein | | | |
| | | | under the headings “Hyperproliferative Disorders,” | | | |
| | | | “Regeneration,” “Anti-Angiogenesis Activity,” “Diseases at | | | |
| | | | the Cellular Level,” and “Wound Healing and Epithelial Cell | | | |
| | | | Proliferation.” | | | |
| 40 | HCEGG08 | Angiogenesis | Highly preferred indications include diagnosis, prevention, | NHDF | TSP-1 | gb\|X04665\|HSTHROMR |
| | | | treatment, and/or amelioration of diseases and disorders | | Vegf1 | gb\|AF024710\|AF024710 |
| | | | involving angiogenesis, wound healing, neoplasia (particularly | | | |
| | | | including, but not limited to, tumor metastases), and | | | |
| | | | cardiovascular diseases and disorders; as described herein | | | |
| | | | under the headings “Hyperproliferative Disorders,” | | | |
| | | | “Regeneration,” “Anti-Angiogenesis Activity,” “Diseases at | | | |
| | | | the Cellular Level,” and “Wound Healing and Epithelial Cell | | | |
| | | | Proliferation.”(NHDF cells are normal human dermal | | | |
| | | | fibroblasts). | | | |
| 40 | HCEGG08 | Angiogenesis | Highly preferred indications include diagnosis, prevention, | SK-N-MC | TSP-1 | gb\|X04665\|HSTHROMR |
| | | | treatment, and/or amelioration of diseases and disorders | neuro- | VCAM | gb\|A30922\|A30922 |
| | | | involving angiogenesis, wound healing, neoplasia (particularly | blastoma | Vegf1 | gb\|AF024710\|AF024710 |
| | | | including, but not limited to, tumor metastases), and | | | |
| | | | cardiovascular diseases and disorders; as described herein | | | |
| | | | under the headings “Hyperproliferative Disorders,” | | | |
| | | | “Regeneration,” “Anti-Angiogenesis Activity,” “Diseases at | | | |
| | | | the Cellular Level,” and “Wound Healing and Epithelial Cell | | | |
| | | | Proliferation.”(The SK-N-MC neuroblastoma cell line is a cell | | | |
| | | | line derived from human brain tissue available through the | | | |
| | | | ATCC as cell line number HTB-10). | | | |
| 40 | HCEGG08 | Angiogenesis | Highly preferred indications include diagnosis, prevention, | THP1 | VCAM | gb\|A30922\|A30922 |
| | | | treatment, and/or amelioration of diseases and disorders | | Vegf1 | gb\|AF024710\|AF024710 |
| | | | involving angiogenesis, wound healing, neoplasia (particularly | | | |
| | | | including, but not limited to, tumor metastases), and | | | |
| | | | cardiovascular diseases and disorders; as described herein | | | |
| | | | under the headings “Hyperproliferative Disorders,” | | | |
| | | | “Regeneration,” “Anti-Angiogenesis Activity,” “Diseases at | | | |
| | | | the Cellular Level,” and “Wound Healing and Epithelial Cell | | | |
| | | | Proliferation.”(The THP-1 cell line is a human monocyte cell | | | |
| | | | line available through the ATCC as cell line number TIB- | | | |
| | | | 202). | | | |
| 197 | HTEEW69 | Angiogenesis | Highly preferred indications include diagnosis, prevention, | Caco-2 | iNOS | gb\|X85761\|HSNOS2E3 |
| | | | treatment, and/or amelioration of diseases and disorders | | | |
| | | | involving angiogenesis, wound healing, neoplasia (particularly | | | |
| | | | including, but not limited to, tumor metastases), and | | | |
| | | | cardiovascular diseases and disorders; as described herein | | | |
| | | | under the headings “Hyperproliferative Disorders,” | | | |
| | | | “Regeneration,” “Anti-Angiogenesis Activity,” “Diseases at | | | |
| | | | the Cellular Level,” and “Wound Healing and Epithelial Cell | | | |
| | | | Proliferation.”(The Caco-2 cell line is a human colorectal | | | |
| | | | adenocarcinoma cell line available through the ATCC as cell | | | |
| | | | line number HTB-37). | | | |
| 197 | HTEEW69 | Angiogenesis | Highly preferred indications include diagnosis, prevention, | Daudi | ICAM | gb\|X06990\|HSICAM1 |
| | | | treatment, and/or amelioration of diseases and disorders | | Vegf1 | gb\|AF024710\|AF024710 |
| | | | involving angiogenesis, wound healing, neoplasia (particularly | | | |
| | | | including, but not limited to, tumor metastases), and | | | |
| | | | cardiovascular diseases and disorders; as described herein | | | |
| | | | under the headings “Hyperproliferative Disorders,” | | | |
| | | | “Regeneration,” “Anti-Angiogenesis Activity,” “Diseases at | | | |
| | | | the Cellular Level,” and “Wound Healing and Epithelial Cell | | | |
| | | | Proliferation.”(The Daudi cell line is a human B lymphoblast | | | |
| | | | cell line available through the ATCC as cell line number | | | |
| | | | CCL-213). | | | |
| 197 | HTEEW69 | Angiogenesis | Highly preferred indications include diagnosis, prevention, | HEK293 | Flt1 | gb\|AF063657\|AF063657 |
| | | | treatment, and/or amelioration of diseases and disorders | | TSP-1 | gb\|X04665\|HSTHROMR |
| | | | involving angiogenesis, wound healing, neoplasia (particularly | | | |
| | | | including, but not limited to, tumor metastases), and | | | |
| | | | cardiovascular diseases and disorders; as described herein | | | |
| | | | under the headings “Hyperproliferative Disorders,” | | | |
| | | | “Regeneration,” “Anti-Angiogenesis Activity,” “Diseases at | | | |
| | | | the Cellular Level,” and “Wound Healing and Epithelial Cell | | | |
| | | | Proliferation.”(The HEK293 cell line is a human embryonal | | | |
| | | | kidney epithelial cell line available through the ATCC as cell | | | |
| | | | line number CRL-1573). | | | |
| 197 | HTEEW69 | Angiogenesis | Highly preferred indications include diagnosis, prevention, | Liver | ICAM | gb\|X06990\|HSICAM1 |
| | | | treatment, and/or amelioration of diseases and disorders | | TSP-1 | gb\|X04665\|HSTHROMR |
| | | | involving angiogenesis, wound healing, neoplasia (particularly | | Vegf1 | gb\|AF024710\|AF024710 |
| | | | including, but not limited to, tumor metastases), and | | | |
| | | | cardiovascular diseases and disorders; as described herein | | | |
| | | | under the headings “Hyperproliferative Disorders,” | | | |
| | | | “Regeneration,” “Anti-Angiogenesis Activity,” “Diseases at | | | |
| | | | the Cellular Level,” and “Wound Healing and Epithelial Cell | | | |
| | | | Proliferation.” | | | |
| 197 | HTEEW69 | Angiogenesis | Highly preferred indications include diagnosis, prevention, | SK-N-MC | Cycloox | gb\|A30922\|A30922 |
| | | | treatment, and/or amelioration of diseases and disorders | neuro- | VCAM | |
| | | | involving angiogenesis, wound healing, neoplasia (particularly | blastoma | | |
| | | | including, but not limited to, tumor metastases), and | | | |
| | | | cardiovascular diseases and disorders; as described herein | | | |
| | | | under the headings “Hyperproliferative Disorders,” | | | |
| | | | “Regeneration,” “Anti-Angiogenesis Activity,” “Diseases at | | | |
| | | | the Cellular Level,” and “Wound Healing and Epithelial Cell | | | |
| | | | Proliferation.”(The SK-N-MC neuroblastoma cell line is a cell | | | |
| | | | line derived from human brain tissue available through the | | | |
| | | | ATCC as cell line number HTB-10). | | | |
| 197 | HTEEW69 | Angiogenesis | Highly preferred indications include diagnosis, prevention, | THP1 | TSP-1 | gb\|X04665\|HSTHROMR |
| | | | treatment, and/or amelioration of diseases and disorders | | | |
| | | | involving angiogenesis, wound healing, neoplasia (particularly | | | |
| | | | including, but not limited to, tumor metastases), and | | | |
| | | | cardiovascular diseases and disorders; as described herein | | | |
| | | | under the headings “Hyperproliferative Disorders,” | | | |
| | | | “Regeneration,” “Anti-Angiogenesis Activity,” “Diseases at | | | |
| | | | the Cellular Level,” and “Wound Healing and Epithelial Cell | | | |
| | | | Proliferation.”(The THP-1 cell line is a human monocyte cell | | | |
| | | | line available through the ATCC as cell line number TIB- | | | |
| | | | 202). | | | |
| 197 | HTEEW69 | Angiogenesis | Highly preferred indications include diagnosis, prevention, | U937 | Vegf1 | gb\|AF024710\|AF024710 |
| | | | treatment, and/or amelioration of diseases and disorders | | | |
| | | | involving angiogenesis, wound healing, neoplasia (particularly | | | |
| | | | including, but not limited to, tumor metastases), and | | | |
| | | | cardiovascular diseases and disorders; as described herein | | | |
| | | | under the headings “Hyperproliferative Disorders,” | | | |
| | | | “Regeneration,” “Anti-Angiogenesis Activity,” “Diseases at | | | |
| | | | the Cellular Level,” and “Wound Healing and Epithelial Cell | | | |
| | | | Proliferation.”(The U937 cell line is a human monocyte cell | | | |
| | | | line available through the ATCC as cell line number CRL- | | | |
| | | | 1593.2). | | | |
| 40 | HCEGG08 | Angiogenesis | Highly preferred indications include diagnosis, prevention, | Caco-2 | Flt1 | gb\|AF063657\|AF063657 |
| | | | treatment, and/or amelioration of diseases and disorders | | | |
| | | | involving angiogenesis, wound healing, neoplasia (particularly | | | |
| | | | including, but not limited to, tumor metastases), and | | | |
| | | | cardiovascular diseases and disorders; as described herein | | | |
| | | | under the headings “Hyperproliferative Disorders,” | | | |
| | | | “Regeneration,” “Anti-Angiogenesis Activity,” “Diseases at | | | |
| | | | the Cellular Level,” and “Wound Healing and Epithelial Cell | | | |
| | | | Proliferation.”(The Caco-2 cell line is a human colorectal | | | |
| | | | adenocarcinoma cell line available through the ATCC as cell | | | |
| | | | line number HTB-37). | | | |
| 40 | HCEGG08 | Angiogenesis | Highly preferred indications include diagnosis, prevention, | HEK293 | ICAM | gb\|X06990\|HSICAM1 |
| | | | treatment, and/or amelioration of diseases and disorders | | | |
| | | | involving angiogenesis, wound healing, neoplasia (particularly | | | |
| | | | including, but not limited to, tumor metastases), and | | | |
| | | | cardiovascular diseases and disorders; as described herein | | | |
| | | | under the headings “Hyperproliferative Disorders,” | | | |
| | | | “Regeneration,” “Anti-Angiogenesis Activity,” “Diseases at | | | |
| | | | the Cellular Level,” and “Wound Healing and Epithelial Cell | | | |
| | | | Proliferation.”(The HEK293 cell line is a human embryonal | | | |
| | | | kidney epithelial cell line available through the ATCC as cell | | | |
| | | | line number CRL-1573). | | | |
| 40 | HCEGG08 | Angiogenesis | Highly preferred indications include diagnosis, prevention, | HUVEC | PAI | gb\|X12701\|HSENDPAI |
| | | | treatment, and/or amelioration of diseases and disorders | | | |
| | | | involving angiogenesis, wound healing, neoplasia (particularly | | | |
| | | | including, but not limited to, tumor metastases), and | | | |
| | | | cardiovascular diseases and disorders; as described herein | | | |
| | | | under the headings “Hyperproliferative Disorders,” | | | |
| | | | “Regeneration,” “Anti-Angiogenesis Activity,” “Diseases at | | | |
| | | | the Cellular Level,” and “Wound Healing and Epithelial Cell | | | |
| | | | Proliferation.”(HUVEC cells are human umbilical vein | | | |
| | | | endothelial cells). | | | |
| 40 | HCEGG08 | Angiogenesis | Highly preferred indications include diagnosis, prevention, | Liver | ICAM | gb\|X06990\|HSICAM1 |
| | | | treatment, and/or amelioration of diseases and disorders | | | |
| | | | involving angiogenesis, wound healing, neoplasia (particularly | | | |
| | | | including, but not limited to, tumor metastases), and | | | |
| | | | cardiovascular diseases and disorders; as described herein | | | |
| | | | under the headings “Hyperproliferative Disorders,” | | | |
| | | | “Regeneration,” “Anti-Angiogenesis Activity,” “Diseases at | | | |
| | | | the Cellular Level,” and “Wound Healing and Epithelial Cell | | | |
| | | | Proliferation.” | | | |
| 40 | HCEGG08 | Angiogenesis | Highly preferred indications include diagnosis, prevention, | NHDF | TSP-1 | gb\|X04665\|HSTHROMR |
| | | | treatment, and/or amelioration of diseases and disorders | | Vegf1 | gb\|AF024710\|AF024710 |
| | | | involving angiogenesis, wound healing, neoplasia (particularly | | | |
| | | | including, but not limited to, tumor metastases), and | | | |
| | | | cardiovascular diseases and disorders; as described herein | | | |
| | | | under the headings “Hyperproliferative Disorders,” | | | |
| | | | “Regeneration,” “Anti-Angiogenesis Activity,” “Diseases at | | | |
| | | | the Cellular Level,” and “Wound Healing and Epithelial Cell | | | |
| | | | Proliferation.”(NHDF cells are normal human dermal | | | |
| | | | fibroblasts). | | | |
| 40 | HCEGG08 | Angiogenesis | Highly preferred indications include diagnosis, prevention, | SK-N-MC | TSP-1 | gb\|X04665\|HSTHROMR |
| | | | treatment, and/or amelioration of diseases and disorders | neuro- | VCAM | gb\|A30922\|A30922 |
| | | | involving angiogenesis, wound healing, neoplasia (particularly | blastoma | Vegf1 | gb\|AF024710\|AF024710 |
| | | | including, but not limited to, tumor metastases), and | | | |
| | | | cardiovascular diseases and disorders; as described herein | | | |
| | | | under the headings “Hyperproliferative Disorders,” | | | |
| | | | “Regeneration,” “Anti-Angiogenesis Activity,” “Diseases at | | | |
| | | | the Cellular Level,” and “Wound Healing and Epithelial Cell | | | |
| | | | Proliferation.”(The SK-N-MC neuroblastoma cell line is a cell | | | |
| | | | line derived from human brain tissue available through the | | | |
| | | | ATCC as cell line number HTB-10). | | | |
| 40 | HCEGG08 | Angiogenesis | Highly preferred indications include diagnosis, prevention, | THP1 | VCAM | gb\|A30922\|A30922 |
| | | | treatment, and/or amelioration of diseases and disorders | | Vegf1 | gb\|AF024710\|AF024710 |
| | | | involving angiogenesis, wound healing, neoplasia (particularly | | | |
| | | | including, but not limited to, tumor metastases), and | | | |
| | | | cardiovascular diseases and disorders; as described herein | | | |
| | | | under the headings “Hyperproliferative Disorders,” | | | |
| | | | “Regeneration,” “Anti-Angiogenesis Activity,” “Diseases at | | | |
| | | | the Cellular Level,” and “Wound Healing and Epithelial Cell | | | |
| | | | Proliferation.”(The THP-1 cell line is a human monocyte cell | | | |
| | | | line available through the ATCC as cell line number TIB- | | | |
| | | | 202). | | | |
| 197 | HTEEW69 | Angiogenesis | Highly preferred indications include diagnosis, prevention, | Caco-2 | iNOS | gb\|X85761\|HSNOS2E3 |
| | | | treatment, and/or amelioration of diseases and disorders | | | |
| | | | involving angiogenesis, wound healing, neoplasia (particularly | | | |
| | | | including, but not limited to, tumor metastases), and | | | |
| | | | cardiovascular diseases and disorders; as described herein | | | |
| | | | under the headings “Hyperproliferative Disorders,” | | | |
| | | | “Regeneration,” “Anti-Angiogenesis Activity,” “Diseases at | | | |
| | | | the Cellular Level,” and “Wound Healing and Epithelial Cell | | | |
| | | | Proliferation.”(The Caco-2 cell line is a human colorectal | | | |
| | | | adenocarcinoma cell line available through the ATCC as cell | | | |
| | | | line number HTB-37). | | | |
| 197 | HTEEW69 | Angiogenesis | Highly preferred indications include diagnosis, prevention, | Daudi | ICAM | gb\|X06990\|HSICAM1 |
| | | | treatment, and/or amelioration of diseases and disorders | | Vegf1 | gb\|AF024710\|AF024710 |
| | | | involving angiogenesis, wound healing, neoplasia (particularly | | | |
| | | | including, but not limited to, tumor metastases), and | | | |
| | | | cardiovascular diseases and disorders; as described herein | | | |
| | | | under the headings “Hyperproliferative Disorders,” | | | |
| | | | “Regeneration,” “Anti-Angiogenesis Activity,” “Diseases at | | | |
| | | | the Cellular Level,” and “Wound Healing and Epithelial Cell | | | |
| | | | Proliferation.”(The Daudi cell line is a human B lymphoblast | | | |
| | | | cell line available through the ATCC as cell line number | | | |
| | | | CCL-213). | | | |
| 197 | HTEEW69 | Angiogenesis | Highly preferred indications include diagnosis, prevention, | HEK293 | Flt1 | gb\|AF063657\|AF063657 |
| | | | treatment, and/or amelioration of diseases and disorders | | TSP-1 | gb\|X04665\|HSTHROMR |
| | | | involving angiogenesis, wound healing, neoplasia (particularly | | | |
| | | | including, but not limited to, tumor metastases), and | | | |
| | | | cardiovascular diseases and disorders; as described herein | | | |
| | | | under the headings “Hyperproliferative Disorders,” | | | |
| | | | “Regeneration,” “Anti-Angiogenesis Activity,” “Diseases at | | | |
| | | | the Cellular Level,” and “Wound Healing and Epithelial Cell | | | |
| | | | Proliferation.”(The HEK293 cell line is a human embryonal | | | |
| | | | kidney epithelial cell line available through the ATCC as cell | | | |
| | | | line number CRL-1573). | | | |
| 197 | HTEEW69 | Angiogenesis | Highly preferred indications include diagnosis, prevention, | Liver | ICAM | gb\|X06990\|HSICAM1 |
| | | | treatment, and/or amelioration of diseases and disorders | | TSP-1 | gb\|X04665\|HSTHROMR |
| | | | involving angiogenesis, wound healing, neoplasia (particularly | | Vegf1 | gb\|AF024710\|AF024710 |
| | | | including, but not limited to, tumor metastases), and | | | |
| | | | cardiovascular diseases and disorders; as described herein | | | |
| | | | under the headings “Hyperproliferative Disorders,” | | | |
| | | | “Regeneration,” “Anti-Angiogenesis Activity,” “Diseases at | | | |
| | | | the Cellular Level,” and “Wound Healing and Epithelial Cell | | | |
| | | | Proliferation.” | | | |
| 197 | HTEEW69 | Angiogenesis | Highly preferred indications include diagnosis, prevention, | SK-N-MC | Cycloox | gb\|A30922\|A30922 |
| | | | treatment, and/or amelioration of diseases and disorders | neuro- | VCAM | |
| | | | involving angiogenesis, wound healing, neoplasia (particularly | blastoma | | |
| | | | including, but not limited to, tumor metastases), and | | | |
| | | | cardiovascular diseases and disorders; as described herein | | | |
| | | | under the headings “Hyperproliferative Disorders,” | | | |
| | | | “Regeneration,” “Anti-Angiogenesis Activity,” “Diseases at | | | |
| | | | the Cellular Level,” and “Wound Healing and Epithelial Cell | | | |
| | | | Proliferation.”(The SK-N-MC neuroblastoma cell line is a cell | | | |
| | | | line derived from human brain tissue available through the | | | |
| | | | ATCC as cell line number HTB-10). | | | |
| 197 | HTEEW69 | Angiogenesis | Highly preferred indications include diagnosis, prevention, | THP1 | TSP-1 | gb\|X04665\|HSTHROMR |
| | | | treatment, and/or amelioration of diseases and disorders | | | |
| | | | involving angiogenesis, wound healing, neoplasia (particularly | | | |
| | | | including, but not limited to, tumor metastases), and | | | |
| | | | cardiovascular diseases and disorders; as described herein | | | |
| | | | under the headings “Hyperproliferative Disorders,” | | | |
| | | | “Regeneration,” “Anti-Angiogenesis Activity,” “Diseases at | | | |
| | | | the Cellular Level,” and “Wound Healing and Epithelial Cell | | | |
| | | | Proliferation.”(The THP-1 cell line is a human monocyte cell | | | |
| | | | line available through the ATCC as cell line number TIB- | | | |
| | | | 202). | | | |
| 197 | HTEEW69 | Angiogenesis | Highly preferred indications include diagnosis, prevention, | U937 | Vegf1 | gb\|AF024710\|AF024710 |
| | | | treatment, and/or amelioration of diseases and disorders | | | |
| | | | involving angiogenesis, wound healing, neoplasia (particularly | | | |
| | | | including, but not limited to, tumor metastases), and | | | |
| | | | cardiovascular diseases and disorders; as described herein | | | |
| | | | under the headings “Hyperproliferative Disorders,” | | | |
| | | | “Regeneration,” “Anti-Angiogenesis Activity,” “Diseases at | | | |
| | | | the Cellular Level,” and “Wound Healing and Epithelial Cell | | | |
| | | | Proliferation.”(The U937 cell line is a human monocyte cell | | | |
| | | | line available through the ATCC as cell line number CRL- | | | |
| | | | 1593.2). | | | |
| 40 | HCEGG08 | Angiogenesis | Highly preferred indications include diagnosis, prevention, | Caco-2 | Flt1 | gb\|AF063657\|AF063657 |
| | | | treatment, and/or amelioration of diseases and disorders | | | |
| | | | involving angiogenesis, wound healing, neoplasia (particularly | | | |
| | | | including, but not limited to, tumor metastases), and | | | |
| | | | cardiovascular diseases and disorders; as described herein | | | |
| | | | under the headings “Hyperproliferative Disorders,” | | | |
| | | | “Regeneration,” “Anti-Angiogenesis Activity,” “Diseases at | | | |
| | | | the Cellular Level,” and “Wound Healing and Epithelial Cell | | | |
| | | | Proliferation.”(The Caco-2 cell line is a human colorectal | | | |
| | | | adenocarcinoma cell line available through the ATCC as cell | | | |
| | | | line number HTB-37). | | | |
| 40 | HCEGG08 | Angiogenesis | Highly preferred indications include diagnosis, prevention, | HEK293 | ICAM | gb\|X06990\|HSICAM1 |
| | | | treatment, and/or amelioration of diseases and disorders | | | |
| | | | involving angiogenesis, wound healing, neoplasia (particularly | | | |
| | | | including, but not limited to, tumor metastases), and | | | |
| | | | cardiovascular diseases and disorders; as described herein | | | |
| | | | under the headings “Hyperproliferative Disorders,” | | | |
| | | | “Regeneration,” “Anti-Angiogenesis Activity,” “Diseases at | | | |
| | | | the Cellular Level,” and “Wound Healing and Epithelial Cell | | | |
| | | | Proliferation.”(The HEK293 cell line is a human embryonal | | | |
| | | | kidney epithelial cell line available through the ATCC as cell | | | |
| | | | line number CRL-1573). | | | |
| 40 | HCEGG08 | Angiogenesis | Highly preferred indications include diagnosis, prevention, | HUVEC | PAI | gb\|X12701\|HSENDPAI |
| | | | treatment, and/or amelioration of diseases and disorders | | | |
| | | | involving angiogenesis, wound healing, neoplasia (particularly | | | |
| | | | including, but not limited to, tumor metastases), and | | | |
| | | | cardiovascular diseases and disorders; as described herein | | | |
| | | | under the headings “Hyperproliferative Disorders,” | | | |
| | | | “Regeneration,” “Anti-Angiogenesis Activity,” “Diseases at | | | |
| | | | the Cellular Level,” and “Wound Healing and Epithelial Cell | | | |
| | | | Proliferation.”(HUVEC cells are human umbilical vein | | | |
| | | | endothelial cells). | | | |
| 40 | HCEGG08 | Angiogenesis | Highly preferred indications include diagnosis, prevention, | Liver | ICAM | gb\|X06990\|HSICAM1 |
| | | | treatment, and/or amelioration of diseases and disorders | | | |
| | | | involving angiogenesis, wound healing, neoplasia (particularly | | | |
| | | | including, but not limited to, tumor metastases), and | | | |
| | | | cardiovascular diseases and disorders; as described herein | | | |
| | | | under the headings “Hyperproliferative Disorders,” | | | |
| | | | “Regeneration,” “Anti-Angiogenesis Activity,” “Diseases at | | | |
| | | | the Cellular Level,” and “Wound Healing and Epithelial Cell | | | |
| | | | Proliferation.” | | | |
| 40 | HCEGG08 | Angiogenesis | Highly preferred indications include diagnosis, prevention, | NHDF | TSP-1 | gb\|X04665\|HSTHROMR |
| | | | treatment, and/or amelioration of diseases and disorders | | Vegf1 | gb\|AF024710\|AF024710 |
| | | | involving angiogenesis, wound healing, neoplasia (particularly | | | |
| | | | including, but not limited to, tumor metastases), and | | | |
| | | | cardiovascular diseases and disorders; as described herein | | | |
| | | | under the headings “Hyperproliferative Disorders,” | | | |
| | | | “Regeneration,” “Anti-Angiogenesis Activity,” “Diseases at | | | |
| | | | the Cellular Level,” and “Wound Healing and Epithelial Cell | | | |
| | | | Proliferation.”(NHDF cells are normal human dermal | | | |
| | | | fibroblasts). | | | |
| 40 | HCEGG08 | Angiogenesis | Highly preferred indications include diagnosis, prevention, | SK-N-MC | TSP-1 | gb\|X04665\|HSTHROMR |
| | | | treatment, and/or amelioration of diseases and disorders | neuro- | VCAM | gb\|A30922\|A30922 |
| | | | involving angiogenesis, wound healing, neoplasia (particularly | blastoma | Vegf1 | gb\|AF024710\|AF024710 |
| | | | including, but not limited to, tumor metastases), and | | | |
| | | | cardiovascular diseases and disorders; as described herein | | | |
| | | | under the headings “Hyperproliferative Disorders,” | | | |
| | | | “Regeneration,” “Anti-Angiogenesis Activity,” “Diseases at | | | |
| | | | the Cellular Level,” and “Wound Healing and Epithelial Cell | | | |
| | | | Proliferation.”(The SK-N-MC neuroblastoma cell line is a cell | | | |
| | | | line derived from human brain tissue available through the | | | |
| | | | ATCC as cell line number HTB-10). | | | |
| 40 | HCEGG08 | Angiogenesis | Highly preferred indications include diagnosis, prevention, | THP1 | VCAM | gb\|A30922\|A30922 |
| | | | treatment, and/or amelioration of diseases and disorders | | Vegf1 | gb\|AF024710\|AF024710 |
| | | | involving angiogenesis, wound healing, neoplasia (particularly | | | |
| | | | including, but not limited to, tumor metastases), and | | | |
| | | | cardiovascular diseases and disorders; as described herein | | | |
| | | | under the headings “Hyperproliferative Disorders,” | | | |
| | | | “Regeneration,” “Anti-Angiogenesis Activity,” “Diseases at | | | |
| | | | the Cellular Level,” and “Wound Healing and Epithelial Cell | | | |
| | | | Proliferation.”(The THP-1 cell line is a human monocyte cell | | | |
| | | | line available through the ATCC as cell line number TIB- | | | |
| | | | 202). | | | |
| 197 | HTEEW69 | Angiogenesis | Highly preferred indications include diagnosis, prevention, | Caco-2 | iNOS | gb\|X85761\|HSNOS2E3 |
| | | | treatment, and/or amelioration of diseases and disorders | | | |
| | | | involving angiogenesis, wound healing, neoplasia (particularly | | | |
| | | | including, but not limited to, tumor metastases), and | | | |
| | | | cardiovascular diseases and disorders; as described herein | | | |
| | | | under the headings “Hyperproliferative Disorders,” | | | |
| | | | “Regeneration,” “Anti-Angiogenesis Activity,” “Diseases at | | | |
| | | | the Cellular Level,” and “Wound Healing and Epithelial Cell | | | |
| | | | Proliferation.”(The Caco-2 cell line is a human colorectal | | | |
| | | | adenocarcinoma cell line available through the ATCC as cell | | | |
| | | | line number HTB-37). | | | |
| 197 | HTEEW69 | Angiogenesis | Highly preferred indications include diagnosis, prevention, | Daudi | ICAM | gb\|X06990\|HSICAM1 |
| | | | treatment, and/or amelioration of diseases and disorders | | Vegf1 | gb\|AF024710\|AF024710 |
| | | | involving angiogenesis, wound healing, neoplasia (particularly | | | |
| | | | including, but not limited to, tumor metastases), and | | | |
| | | | cardiovascular diseases and disorders; as described herein | | | |
| | | | under the headings “Hyperproliferative Disorders,” | | | |
| | | | “Regeneration,” “Anti-Angiogenesis Activity,” “Diseases at | | | |
| | | | the Cellular Level,” and “Wound Healing and Epithelial Cell | | | |
| | | | Proliferation.”(The Daudi cell line is a human B lymphoblast | | | |
| | | | cell line available through the ATCC as cell line number | | | |
| | | | CCL-213). | | | |
| 197 | HTEEW69 | Angiogenesis | Highly preferred indications include diagnosis, prevention, | HEK293 | Flt1 | gb\|AF063657\|AF063657 |
| | | | treatment, and/or amelioration of diseases and disorders | | TSP-1 | gb\|X04665\|HSTHROMR |
| | | | involving angiogenesis, wound healing, neoplasia (particularly | | | |
| | | | including, but not limited to, tumor metastases), and | | | |
| | | | cardiovascular diseases and disorders; as described herein | | | |
| | | | under the headings “Hyperproliferative Disorders,” | | | |
| | | | “Regeneration,” “Anti-Angiogenesis Activity,” “Diseases at | | | |
| | | | the Cellular Level,” and “Wound Healing and Epithelial Cell | | | |
| | | | Proliferation.”(The HEK293 cell line is a human embryonal | | | |
| | | | kidney epithelial cell line available through the ATCC as cell | | | |
| | | | line number CRL-1573). | | | |

[0129] Table 2 further characterizes certain encoded polypeptides of the invention, by providing the results of comparisons to protein and protein family databases. The first column provides a unique clone identifier, “Clone ID NO:”, corresponding to a cDNA clone disclosed in Table 1A and/or Table 1B. The second column provides the unique contig identifier, “Contig ID:” which allows correlation with the information in Table 1B. The third column provides the sequence identifier, “SEQ ID NO:”, for the contig polynucleotide sequences. The fourth column provides the analysis method by which the homology/identity disclosed in the Table was determined. The fifth column provides a description of the PFAM/NR hit identified by each analysis. Column six provides the accession number of the PFAM/NR hit disclosed in the fifth column. Column seven, score/percent identity, provides a quality score or the percent identity, of the hit disclosed in column five. Comparisons were made between polypeptides encoded by polynucleotides of the invention and a non-redundant protein database (herein referred to as “NR”), or a database of protein families (herein referred to as “PFAM”), as described below.

[0130] The NR database, which comprises the NBRF PIR database, the NCBI GenPept database, and the SIB SwissProt and TrEMBL databases, was made non-redundant using the computer program nrdb2 (Warren Gish, Washington University in Saint Louis). Each of the polynucleotides shown in Table 1B (e.g., SEQ ID NO:X or the ‘Query’ sequence) was used to search against the NR database. The computer program BLASTX was used to compare a 6-frame translation of the Query sequence to the NR database (for information about the BLASTX algorithm please see Altshul et al., J. Mol. Biol. 215:403410 (1990), and Gish and States, Nat. Genet. 3:266-272 (1993). A description of the sequence that is most similar to the Query sequence (the highest scoring ‘Subject’) is shown in column five of Table 2 and the database accession number for that sequence is provided in column six. The highest scoring ‘Subject’ is reported in Table 2 if (a) the estimated probability that the match occurred by chance alone is less than 1.0e-07, and (b) the match was not to a known repetitive element. BLASTX returns alignments of short polypeptide segments of the Query and Subject sequences which share a high degree of similarity; these segments are known as High-Scoring Segment Pairs or HSPs. Table 2 reports the degree of similarity between the Query and the Subject for each HSP as a percent identity in Column 7. The percent identity is determined by dividing the number of exact matches between the two aligned sequences in the HSP, dividing by the number of Query amino acids in the HSP and multiplying by 100. The polynucleotides of SEQ ID NO:X which encode the polypeptide sequence that generates an HSP are delineated by columns 8 and 9 of Table 2.

[0131] The PFAM database, PFAM version 2.1, (Sonnhammer, Nucl. Acids Res., 26:320-322, 1998)) consists of a series of multiple sequence alignments; one alignment for each protein family. Each multiple sequence alignment is converted into a probability model called a Hidden Markov Model, or HMM, that represents the position-specific variation among the sequences that make up the multiple sequence alignment (see, e.g., Durbin, et al., Biological sequence analysis: probabilistic models of proteins and nucleic acids, Cambridge University Press, 1998 for the theory of HMMs). The program HMMER version 1.8 (Sean Eddy, Washington University in Saint Louis) was used to compare the predicted protein sequence for each Query sequence (SEQ ID NO:Y in Table 1B) to each of the HMMs derived from PFAM version 2.1. A HMM derived from PFAM version 2.1 was said to be a significant match to a polypeptide of the invention if the score returned by HMMER 1.8 was greater than 0.8 times the HMMER 1.8 score obtained with the most distantly related known member of that protein family. The description of the PFAM family which shares a significant match with a polypeptide of the invention is listed in column 5 of Table 2, and the database accession number of the PFAM hit is provided in column 6. Column 7 provides the score returned by HMMER version 1.8 for the alignment. Columns 8 and 9 delineate the polynucleotides of SEQ ID NO:X which encode the polypeptide sequence which show a significant match to a PFAM protein family.

[0132] As mentioned, columns 8 and 9 in Table 2, “NT From” and “NT To”, delineate the polynucleotides of “SEQ ID NO:X” that encode a polypeptide having a significant match to the PFAM/NR database as disclosed in the fifth column. In one embodiment, the invention provides a protein comprising, or alternatively consisting of, a polypeptide encoded by the polynucleotides of SEQ ID NO:X delineated in columns 8 and 9 of Table 2. Also provided are polynucleotides encoding such proteins, and the complementary strand thereto.

[0133] The nucleotide sequence SEQ ID NO:X and the translated SEQ ID NO:Y are sufficiently accurate and otherwise suitable for a variety of uses well known in the art and described further below. For instance, the nucleotide sequences of SEQ ID NO:X are useful for designing nucleic acid hybridization probes that will detect nucleic acid sequences contained in SEQ ID NO:X or the cDNA contained in ATCC Deposit No:Z. These probes will also hybridize to nucleic acid molecules in biological samples, thereby enabling immediate applications in chromosome mapping, linkage analysis, tissue identification and/or typing, and a variety of forensic and diagnostic methods of the invention. Similarly, polypeptides identified from SEQ ID NO:Y may be used to generate antibodies which bind specifically to these polypeptides, or fragments thereof, and/or to the polypeptides encoded by the cDNA clones identified in, for example, Table 1A and/or 1B.

[0134] Nevertheless, DNA sequences generated by sequencing reactions can contain sequencing errors. The errors exist as misidentified nucleotides, or as insertions or deletions of nucleotides in the generated DNA sequence. The erroneously inserted or deleted nucleotides cause frame shifts in the reading frames of the predicted amino acid sequence. In these cases, the predicted amino acid sequence diverges from the actual amino acid sequence, even though the generated DNA sequence may be greater than 99.9% identical to the actual DNA sequence (for example, one base insertion or deletion in an open reading frame of over 1000 bases).

[0135] Accordingly, for those applications requiring precision in the nucleotide sequence or the amino acid sequence, the present invention provides not only the generated nucleotide sequence identified as SEQ ID NO:X, and a predicted translated amino acid sequence identified as SEQ ID NO:Y, but also a sample of plasmid DNA containing cDNA ATCC Deposit No:Z (e.g., as set forth in columns 2 and 3 of Table 1A and/or as set forth, for example, in Table 1B, 6, and 7). The nucleotide sequence of each deposited clone can readily be determined by sequencing the deposited clone in accordance with known methods. Further, techniques known in the art can be used to verify the nucleotide sequences of SEQ ID NO:X. The predicted amino acid sequence can then be verified from such deposits. Moreover, the amino acid sequence of the protein encoded by a particular clone can also be directly determined by peptide sequencing or by expressing the protein in a suitable host cell containing the deposited human cDNA, collecting the protein, and determining its sequence.

TABLE 2

| | | | | | | Score/ | | |
|---|---|---|---|---|---|---|---|---|
| cDNA | | SEQ ID | Analysis | | PFam/NR | Percent | NT | |
| Clone ID | Contig ID: | NO: X | Method | PFam/NR Description | Accession Number | Identity | From | NT To |
| H6BSF56 | 762968 | 11 | HMMER | PFAM: Zinc-binding dehydrogenases | PF00107 | 35.6 | 176 | 415 |
| | | | 2.1.1 | | | | | |
| | | | WUblastx.64 | (Q9BV79) SIMILAR TO CGI-63 PROTEIN. | Q9BV79 | 100% | 25 | 42 |
| | | | | | | 92% | 53 | 427 |
| H6EDM64 | 841331 | 12 | WUblastx.64 | (Q9UID3) ANG2. | Q9UID3 | 90% | 928 | 2451 |
| | | | | | | 36% | 203 | 310 |
| | | | | | | 36% | 931 | 1038 |
| | | | | | | 95% | 191 | 871 |
| H6EEC72 | 889401 | 13 | WUblastx.64 | hypothetical protein DKFZp434L061.1 - human | pir\|T43456\|T43456 | 80% | 1484 | 1203 |
| | | | | | | 41% | 1277 | 1080 |
| | | | | | | 35% | 973 | 845 |
| | | | | | | 34% | 659 | 549 |
| | | | | | | 57% | 991 | 365 |
| HACBJ56 | 847112 | 16 | WUblastx.64 | (Q9D2Q2) 2310079F23RIK PROTEIN. | Q9D2Q2 | 65% | 98 | 286 |
| HADMB15 | 847116 | 17 | WUblastx.64 | (Q9BVH1) SIMILAR TO DLXIN-1. | Q9BVH1 | 100% | 8 | 109 |
| HAGFS57 | 847120 | 18 | WUblastx.64 | (Q9Y485) X-LIKE 1 PROTEIN. | Q9Y485 | 58% | 9 | 872 |
| HAGHN57 | 773286 | 19 | WUblastx.64 | (O60416) WUGSC: H_RG276O03.2 PROTEIN. | O60416 | 98% | 65 | 1444 |
| HAJAA47 | 534670 | 20 | WUblastx.64 | (Q9NZA3) CDA14. | Q9NZA3 | 100% | 17 | 157 |
| HAJAY92 | 845601 | 21 | WUblastx.64 | (O00549) ORF2-LIKE PROTEIN | O00549 | 53% | 2226 | 2318 |
| | | | | (FRAGMENT). | | 26% | 769 | 915 |
| | | | | | | 38% | 1653 | 1769 |
| | | | | | | 31% | 1721 | 2242 |
| HAJBV67 | 866415 | 22 | WUblastx.64 | (Q9HD45) TRANSMEMBRANE 9 | T9S3_HUMAN | 100% | 13 | 126 |
| | | | | SUPERFAMILY PROTEIN MEMBER 3 | | 93% | 116 | 1681 |
| | | | | PRECU | | | | |
| HBAGD86 | 838799 | 25 | WUblastx.64 | (Q14287) HYPOTHETICAL PROTEIN | Q14287 | 37% | 801 | 559 |
| | | | | (FRAGMENT). | | | | |
| HBGBC29 | 691473 | 26 | WUblastx.64 | (O60513) BETA-1,4- | B4G4_HUMAN | 61% | 1 | 78 |
| | | | | GALACTOSYLTRANSFERASE 4 (EC 2.4.1.—) | | 98% | 65 | 1021 |
| | | | | (BET | | | | |
| HBHAA05 | 603174 | 28 | WUblastx.64 | (Q9H387) PRO2550. | Q9H387 | 71% | 676 | 386 |
| HBHAA81 | 846465 | 29 | WUblastx.64 | (Q9D1G3) 1110011D13RIK PROTEIN. | Q9D1G3 | 89% | 1329 | 1502 |
| | | | | | | 79% | 28 | 1329 |
| HBIAC29 | 831751 | 30 | WUblastx.64 | (Q9D7J5) 2310005N01RIK PROTEIN. | Q9D7J5 | 78% | 25 | 492 |
| | | | | | | 93% | 883 | 927 |
| HBJAB02 | 837309 | 31 | WUblastx.64 | (Q9NXT6) CDNA FLJ20062 FIS, CLONE | Q9NXT6 | 70% | 2 | 1210 |
| | | | | COL01508. | | | | |
| HBJAC40 | 841235 | 32 | WUblastx.64 | (Q9P112) CHROMOSOME 16 OPEN | Q9P112 | 100% | 8 | 73 |
| | | | | READING FRAME 5. | | 36% | 5 | 70 |
| | | | | | | 57% | 11 | 52 |
| | | | | | | 53% | 85 | 180 |
| | | | | | | 100% | 192 | 632 |
| HBJCR46 | 815649 | 33 | HMMER | PFAM: WD domain, G-beta repeat | PF00400 | 36.6 | 790 | 867 |
| | | | 2.1.1 | | | | | |
| | | | WUblastx.64 | (Q9DC22) 1200006M05RIK PROTEIN. | Q9DC22 | 96% | 207 | 611 |
| | | | | | | 73% | 568 | 2763 |
| HBJEL16 | 847030 | 35 | WUblastx.64 | (O95297) PROTEIN ZERO RELATED | O95297 | 98% | 285 | 491 |
| | | | | PROTEIN. | | | | |
| HBJKD16 | 853358 | 36 | WUblastx.64 | (Q9NXS4) CDNA FLJ20080 FIS, CLONE | Q9NXS4 | 91% | 8 | 1528 |
| | | | | COL03184. | | | | |
| HBMBM96 | 561935 | 37 | WUblastx.64 | (Q9H387) PRO2550. | Q9H387 | 69% | 661 | 494 |
| | | | | | | 67% | 794 | 639 |
| HBMUH74 | 866160 | 39 | WUblastx.64 | (Q9NVW8) CDNA FLJ10462 FIS, CLONE | Q9NVW8 | 100% | 11 | 427 |
| | | | | NT2RP1001494, WEAKLY SIMILAR TO MAL | | | | |
| HBQAB79 | 810542 | 40 | WUblastx.64 | (Q9UQ32) AD 3 (FRAGMENT). | Q9UQ32 | 82% | 323 | 204 |
| HBSAK32 | 856387 | 41 | WUblastx.64 | (Q9H1Q7) BA12M19.1.3 (NOVEL PROTEIN). | Q9H1Q7 | 100% | 239 | 412 |
| | | | | | | 100% | 95 | 172 |
| HBXCX15 | 637542 | 42 | WUblastx.64 | (Q9GMX5) HYPOTHETICAL 12.9 KDA | Q9GMX5 | 41% | 726 | 827 |
| | | | | PROTEIN. | | 52% | 578 | 730 |
| HCDCY76 | 837972 | 43 | WUblastx.64 | frizzled protein 4 - human | pir\|JC7127\|JC7127 | 100% | 1039 | 527 |
| | | | | | | 30% | 994 | 785 |
| | | | | | | 79% | 567 | 37 |
| HCE1G78 | 761204 | 45 | HMMER | PFAM: Inositol polyphosphate phosphatase | PF00783 | 277.3 | 77 | 775 |
| | | | 2.1.1 | family, catalytic domain | | | | |
| | | | WUblastx.64 | (Q9UDT9) WUGSC: H_DJ412A9.2 PROTEIN | Q9UDT9 | 72% | 8 | 1549 |
| | | | | (FRAGMENT). | | 95% | 8 | 67 |
| HCEDR26 | 771144 | 47 | WUblastx.64 | (Q9H919) CDNA FLJ13078 FIS, CLONE | Q9H919 | 66% | 1157 | 1095 |
| | | | | NT2RP3002002. | | 66% | 1345 | 1184 |
| HCEEQ25 | 531784 | 48 | WUblastx.64 | (P78349) SODIUM CHANNEL 2. | P78349 | 95% | 311 | 433 |
| | | | | | | 93% | 433 | 480 |
| | | | | | | 100% | 658 | 714 |
| HCEEU18 | 688041 | 49 | WUblastx.64 | (Q9N083) UNNAMED PORTEIN PRODUCT. | Q9N083 | 49% | 186 | 10 |
| | | | | | | 56% | 1223 | 933 |
| HCFLN88 | 610000 | 51 | WUblastx.64 | (Q9BQE9) SIMILAR TO B-CELL | Q9BQE9 | 87% | 278 | 475 |
| | | | | CLL/LYMPHOMA 7B (UNKNOWN) | | | | |
| | | | | (PROTEIN FOR MGC | | | | |
| HCHAB84 | 834326 | 52 | WUblastx.64 | (Q9BRV3) STROMAL CELL PROTEIN. | Q9BRV3 | 89% | 82 | 744 |
| HCNSD29 | 862314 | 55 | WUblastx.64 | (O75400) HUNTINGTIN-INTERACTING | O75400 | 82% | 628 | 1605 |
| | | | | PROTEIN HYPA/FBP11 (FRAGMENT). | | 78% | 337 | 489 |
| HCUCF89 | 637986 | 58 | WUblastx.64 | (Q9P147) PRO2822. | Q9P147 | 100% | 421 | 398 |
| | | | | | | 82% | 494 | 426 |
| HCUCK44 | 790277 | 59 | WUblastx.64 | hypothetical protein DKFZp564J157.1 - human | pir\|T34520\|T34520 | 100% | 29 | 157 |
| | | | | (fragment) | | 100% | 377 | 403 |
| HDPDI72 | 897277 | 62 | WUblastx.64 | adult-specific brush border protein - rabbit | pir\|C45665\|C45665 | 64% | 180 | 230 |
| | | | | | | 83% | 11 | 100 |
| HDPGE24 | 801947 | 63 | WUblastx.64 | (Q9P195) PRO1722. | Q9P195 | 65% | 1413 | 1291 |
| | | | | | | 43% | 1388 | 1278 |
| | | | | | | 77% | 2528 | 2394 |
| | | | | | | 47% | 2182 | 2078 |
| | | | | | | 75% | 1774 | 1751 |
| | | | | | | 62% | 2604 | 2557 |
| | | | | | | 68% | 1301 | 1167 |
| HDPIU94 | 813352 | 64 | WUblastx.64 | (Q9BVF7) SIMILAR TO HYPOTHETICAL | Q9BVF7 | 99% | 63 | 1703 |
| | | | | PROTEIN FLJ10422. | | | | |
| HDPIY31 | 886159 | 65 | WUblastx.64 | hypothetical protein DKFZp434N1429.1 - | pir\|T46448\|T46448 | 72% | 1714 | 1899 |
| | | | | human (fragment) | | | | |
| HDPOC24 | 777493 | 66 | WUblastx.64 | (Q9H8K1) CDNA FLJ13518 FIS, CLONE | Q9H8K1 | 100% | 62 | 208 |
| | | | | PLACE1005799. | | | | |
| HDPOL37 | 745377 | 67 | WUblastx.64 | (AAK40301) TRH4. | AAK40301 | 70% | 502 | 323 |
| | | | | | | 60% | 1325 | 483 |
| HDPPQ30 | 684292 | 69 | WUblastx.64 | (Q9H387) PRO2550. | Q9H387 | 51% | 807 | 727 |
| | | | | | | 79% | 1042 | 815 |
| HDQHM36 | 852328 | 70 | WUblastx.64 | (Q9N083) UNNAMED PORTEIN PRODUCT. | Q9N083 | 69% | 1129 | 1257 |
| | | | | | | 50% | 965 | 1153 |
| HE6FU11 | 827236 | 73 | HMMER | PFAM: von Willebrand factor type A domain | PF00092 | 184.7 | 244 | 771 |
| | | | 2.1.1 | | | | | |
| | | | WUblastx.64 | (O95460) MATRILIN-4 PRECURSOR. | MTN4_HUMAN | 77% | 145 | 789 |
| | | | | | | 45% | 782 | 907 |
| | | | | | | 41% | 791 | 925 |
| | | | | | | 50% | 794 | 907 |
| | | | | | | 38% | 863 | 1498 |
| | | | | | | 33% | 190 | 741 |
| | | | | | | 98% | 782 | 1642 |
| HE9EA10 | 827796 | 75 | WUblastx.64 | laminin alpha-1 chain precursor - human | pir\|S14458\|S14458 | 99% | 761 | 1891 |
| | | | | | | 27% | 878 | 1840 |
| | | | | | | 25% | 1142 | 1876 |
| HEBFR46 | 847064 | 79 | WUblastx.64 | (Q9NX85) CDNA FLJ20378 FIS, CLONE | Q9NX85 | 80% | 1111 | 1022 |
| | | | | KAIA0536. | | 84% | 1265 | 1110 |
| HEBGE07 | 798096 | 80 | WUblastx.64 | (Q9NX85) CDNA FLJ20378 FIS, CLONE | Q9NX85 | 79% | 1851 | 1720 |
| | | | | KAIA0536. | | | | |
| HEQBF89 | 786205 | 82 | WUblastx.64 | (Q9H728) CDNA: FLJ21463 FIS, CLONE | Q9H728 | 64% | 793 | 638 |
| | | | | COL04765. | | 64% | 647 | 489 |
| HFEAY59 | 658685 | 84 | WUblastx.64 | (Q9Z320) C29. | Q9Z320 | 67% | 50 | 1153 |
| HFIJA68 | 847074 | 85 | WUblastx.64 | (Q9UHE8) SIX TRANSMEMBRANE | STEA_HUMAN | 89% | 13 | 399 |
| | | | | EPITHELIAL ANTIGEN OF PROSTATE. | | | | |
| HFKEU12 | 634006 | 86 | WUblastx.64 | hypothetical protein 3 - rat | pir\|S21347\|S21347 | 52% | 695 | 745 |
| | | | | | | 50% | 757 | 933 |
| | | | | | | 40% | 774 | 1007 |
| | | | | | | 54% | 387 | 692 |
| HFVHW43 | 570948 | 90 | WUblastx.64 | (Q9BGX4) HYPOTHETICAL 13.8 KDA | Q9BGX4 | 69% | 1209 | 1093 |
| | | | | PROTEIN. | | | | |
| HGBHP91 | 693011 | 91 | WUblastx.64 | hypothetical protein (L1H 3′ region) - human | pir\|B34087\|B34087 | 52% | 541 | 491 |
| | | | | | | 44% | 537 | 34 |
| HHEAK45 | 765278 | 92 | WUblastx.64 | (Q9NPB0) DJ202I21.1 (NOVEL PROTEIN) | Q9NPB0 | 68% | 1949 | 1458 |
| | | | | (CDNA FLJ11101 FIS, CLONE PLACE10 | | | | |
| HHEOW19 | 886174 | 94 | WUblastx.64 | (O18973) RAB5 GDP/GTP EXCHANGE | O18973 | 77% | 417 | 623 |
| | | | | FACTOR, RABEX5. | | 91% | 611 | 715 |
| | | | | | | 56% | 166 | 378 |
| | | | | | | 92% | 129 | 167 |
| HHFFL34 | 753230 | 95 | WUblastx.64 | (BAB55306) CDNA FLJ14793 fis, clone | BAB55306 | 100% | 9 | 710 |
| | | | | NT2RP4001174, w | | | | |
| HHFFS40 | 824059 | 96 | WUblastx.64 | (Q9H4A6) GOLGI PROTEIN. | Q9H4A6 | 100% | 3 | 251 |
| HHGDT26 | 658692 | 98 | WUblastx.64 | (Q9H728) CDNA: FLJ21463 FIS, CLONE | Q9H728 | 69% | 1580 | 1290 |
| | | | | COL04765. | | | | |
| HHSBI65 | 801910 | 101 | WUblastx.64 | (Q9H5W9) CDNA: FLJ22888 FIS, CLONE | Q9H5W9 | 100% | 270 | 407 |
| | | | | KAT03934. | | 94% | 479 | 1300 |
| HHSDI53 | 862028 | 102 | WUblastx.64 | (Q9H387) PRO2550. | Q9H387 | 70% | 1108 | 935 |
| | | | | | | 71% | 1241 | 1107 |
| | | | | | | 75% | 1276 | 1241 |
| HISAT67 | 843549 | 103 | WUblastx.64 | (Q9UH94) PROLACTIN REGULATORY | Q9UH94 | 88% | 219 | 797 |
| | | | | ELEMENT-BINDING PROTEIN (PROLACTIN | | 91% | 788 | 1447 |
| | | | | REGU | | | | |
| HJBCU75 | 638329 | 104 | WUblastx.64 | (O45030) STRABISMUS. | O45030 | 44% | 199 | 426 |
| | | | | | | 52% | 464 | 964 |
| HJMAA03 | 824062 | 105 | WUblastx.64 | (Q9N032) UNNAMED PROTEIN PRODUCT. | Q9N032 | 71% | 415 | 528 |
| HJMAV41 | 862029 | 106 | WUblastx.64 | brain-specific membrane anchor protein - human | pir\|JC7110\|JC7110 | 100% | 14 | 475 |
| HJMAY90 | 793678 | 107 | WUblastx.64 | (Q9DC16) 1200007D18RIK PROTEIN (RIKEN | Q9DC16 | 77% | 100 | 312 |
| | | | | CDNA 1200007D18 GENE). | | 98% | 315 | 968 |
| HJPBE39 | 801960 | 108 | WUblastx.64 | (Q9CUS4) 4833420K19RIK PROTEIN | Q9CUS4 | 33% | 1 | 621 |
| | | | | (FRAGMENT). | | 74% | 213 | 1007 |
| HJPCH08 | 840365 | 109 | WUblastx.64 | (O95235) RABKINESIN-6 (RAB6- | RB6K_HUMAN | 93% | 9 | 596 |
| | | | | INTERACTING KINESIN-LIKE PROTEI | | | | |
| HKGBF25 | 738797 | 110 | WUblastx.64 | (Q9HBS7) HYPOTHETICAL 14.2 KDA | Q9HBS7 | 71% | 1708 | 1688 |
| | | | | PROTEIN. | | 56% | 1956 | 1708 |
| HLDQU79 | 740755 | 114 | WUblastx.64 | (O75477) KE04P. | O75477 | 100% | 105 | 1142 |
| HLDQU79 | 837599 | 253 | blastx.2 | KE04P. | sp\|O75477\|O75477 | 99% | 81 | 1118 |
| HLDRT09 | 830544 | 115 | WUblastx.64 | (Q9HAQ7) ATP-BINDING CASSETTE HALF- | Q9HAQ7 | 86% | 2 | 469 |
| | | | | TRANSPORTER. | | | | |
| HLHAP05 | 638476 | 116 | WUblastx.64 | (Q9HA67) CDNA FLJ12155 FIS, CLONE | Q9HA67 | 55% | 1553 | 1500 |
| | | | | MAMMA1000472. | | 72% | 1650 | 1585 |
| | | | | | | 77% | 1807 | 1646 |
| HLIBO72 | 883431 | 118 | WUblastx.64 | (AAH07829) Similar to hypothetical protein | AAH07829 | 100% | 65 | 547 |
| | | | | AF140225 | | | | |
| HLICE88 | 840321 | 119 | WUblastx.64 | fibrinogen gamma-A chain precursor [validated] - | pir\|A90470\|FGHUG | 89% | 3 | 584 |
| | | | | human | | | | |
| HLYGY91 | 658703 | 126 | WUblastx.64 | (Q9H8N0) CDNA FLJ13386 FIS, CLONE | Q9H8N0 | 94% | 221 | 391 |
| | | | | PLACE1001104, WEAKLY SIMILAR TO | | | | |
| | | | | MYO | | | | |
| HMDAB29 | 584789 | 128 | WUblastx.64 | (Q9NX17) CDNA FLJ20489 FIS, CLONE | Q9NX17 | 72% | 1186 | 890 |
| | | | | KAT08285. | | | | |
| HMEDI90 | 840077 | 130 | WUblastx.64 | (Q9HBA3) RAB3 INTERACTING PROTEIN | Q9HBA3 | 100% | 81 | 794 |
| | | | | VARIANT 4 (FRAGMENT). | | | | |
| HMTAB77 | 847411 | 135 | WUblastx.64 | (P43243) MATRIN 3. | MAT3_HUMAN | 95% | 630 | 1385 |
| | | | | | | 64% | 287 | 628 |
| | | | | | | 22% | 2002 | 2175 |
| | | | | | | 98% | 3255 | 3428 |
| | | | | | | 31% | 2041 | 2190 |
| | | | | | | 22% | 2047 | 2181 |
| | | | | | | 23% | 2584 | 2763 |
| | | | | | | 75% | 2440 | 2760 |
| | | | | | | 27% | 2596 | 2709 |
| | | | | | | 35% | 1705 | 1797 |
| | | | | | | 35% | 3312 | 3404 |
| | | | | | | 91% | 1384 | 2328 |
| HMUAE26 | 747403 | 136 | WUblastx.64 | (Q9P2R4) SEVEN TRANSMEMBRANE | Q9P2R4 | 89% | 153 | 575 |
| | | | | DOMAIN ORPHAN RECEPTOR. | | 86% | 577 | 1272 |
| HMUAN45 | 833072 | 137 | WUblastx.64 | (BAB55441) CDNA FLJ14993 fis, clone | BAB55441 | 70% | 684 | 1238 |
| | | | | Y79AA1001874, w | | 65% | 239 | 955 |
| | | | | | | 100% | 1247 | 1516 |
| HMVBC31 | 825598 | 138 | WUblastx.64 | (O60725) PROTEIN-S ISOPRENYLCYSTEINE | ICMT_HUMAN | 80% | 747 | 938 |
| | | | | O-METHYLTRANSFERASE (E | | 87% | 121 | 789 |
| HMWBL03 | 822861 | 139 | WUblastx.64 | (Q9BWT1) C-MYC TARGET JP1. | Q9BWT1 | 85% | 137 | 1240 |
| HMWCG28 | 847413 | 140 | WUblastx.64 | (Q9P1S9) KINASE DEFICIENT PROTEIN | Q9P1S9 | 84% | 35 | 892 |
| | | | | KDP (FRAGMENT). | | | | |
| HNFCY57 | 877653 | 142 | WUblastx.64 | (AAL12497) Cryopyrin. | AAL12497 | 91% | 8 | 2203 |
| HNGAK51 | 603910 | 144 | WUblastx.64 | (O60448) NEURONAL THREAD PROTEIN | O60448 | 61% | 563 | 601 |
| | | | | AD7C-NTP. | | 67% | 733 | 915 |
| | | | | | | 65% | 702 | 878 |
| | | | | | | 74% | 714 | 914 |
| HNGAM58 | 688114 | 145 | WUblastx.64 | (Q9H728) CDNA: FLJ21463 FIS, CLONE | Q9H728 | 71% | 1020 | 1061 |
| | | | | COL04765. | | 85% | 1081 | 1143 |
| | | | | | | 53% | 818 | 1003 |
| HNHFE71 | 834487 | 155 | WUblastx.64 | hypothetical protein DKFZp761L0812.1 - human | pir\|T47135\|T47135 | 67% | 822 | 583 |
| | | | | (fragment) | | | | |
| HNHGK22 | 597451 | 156 | WUblastx.64 | hypothetical protein (L1H 3′ region) - human | pir\|B34087\|B34087 | 41% | 483 | 37 |
| | | | | | | 41% | 333 | 10 |
| | | | | | | 50% | 733 | 485 |
| HOACG07 | 792928 | 159 | WUblastx.64 | (Q9GZN8) DJ1009E24.3 (A NOVEL | Q9GZN8 | 99% | 183 | 704 |
| | | | | PROTEIN) (CDNA FLJ14158 FIS, CLONE | | | | |
| | | | | NT2R | | | | |
| HOEBK60 | 789396 | 161 | WUblastx.64 | (Q9H916) CDNA FLJ13081 FIS, CLONE | Q9H916 | 98% | 132 | 1916 |
| | | | | NT2RP3002033. | | 100% | 14 | 109 |
| | | | | | | 88% | 106 | 159 |
| HOFNB74 | 762821 | 162 | WUblastx.64 | (Q99JH1) HYPOTHETICAL 17.7 KDA | Q99JH1 | 72% | 44 | 187 |
| | | | | PROTEIN. | | 97% | 199 | 471 |
| HOSDO75 | 862049 | 163 | WUblastx.64 | (Q9D099) 1110057L18RIK PROTEIN. | Q9D099 | 89% | 11 | 202 |
| | | | | | | 88% | 259 | 630 |
| HOUDE92 | 580866 | 165 | WUblastx.64 | (Q9HBT2) HYPOTHETICAL 17.2 KDA | Q9HBT2 | 96% | 21 | 245 |
| | | | | PROTEIN. | | | | |
| HPFCI36 | 855966 | 169 | WUblastx.64 | (Q9NX47) CDNA FLJ20445 FIS, CLONE | Q9NX47 | 100% | 9 | 320 |
| | | | | KAT05170. | | | | |
| HPRBH85 | 695752 | 175 | WUblastx.64 | (BAB55300) CDNA FLJ14784 fis, clone | BAB55300 | 62% | 2 | 616 |
| | | | | NT2RP4000713. | | 86% | 534 | 1085 |
| HPRCD35 | 853551 | 176 | WUblastx.64 | hypothetical protein DKFZp762L1710.1 - human | pir\|T50629\|T50629 | 100% | 320 | 613 |
| | | | | (fragment) | | 57% | 2 | 499 |
| HPTRM02 | 812879 | 177 | WUblastx.64 | (Q9UJU6) SRC HOMOLOGY 3 DOMAIN- | Q9UJU6 | 92% | 332 | 940 |
| | | | | CONTAINING PROTEIN HIP-55 (DREBRINF). | | 97% | 2 | 106 |
| | | | | | | 96% | 98 | 190 |
| HRADA42 | 827302 | 178 | WUblastx.64 | hypothetical protein C11D2.4 - Caenorhabditis | pir\|T32961\|T32961 | 48% | 387 | 668 |
| | | | | elegans | | 74% | 668 | 931 |
| HRADF49 | 866481 | 179 | WUblastx.64 | (Q9H6L1) CDNA: FLJ22169 FIS, CLONE | Q9H6L1 | 90% | 13 | 825 |
| | | | | HRC00632. | | 84% | 813 | 1379 |
| | | | | | | 75% | 1291 | 1593 |
| | | | | | | 34% | 1590 | 1685 |
| HRADN25 | 800628 | 180 | WUblastx.64 | (Q9HB07) MYG1 PROTEIN. | MYG1_HUMAN | 96% | 47 | 1174 |
| HRDDQ39 | 840405 | 181 | WUblastx.64 | (Q9NX85) CDNA FLJ20378 FIS, CLONE | Q9NX85 | 53% | 582 | 436 |
| | | | | KAIA0536. | | 65% | 775 | 578 |
| HRDER22 | 688056 | 182 | WUblastx.64 | (Q9NW07) CDNA FLJ10390 FIS, CLONE | Q9NW07 | 80% | 9 | 248 |
| | | | | NT2RM4000104, MODERATELY SIMILAR | | 100% | 357 | 431 |
| | | | | TO | | 39% | 120 | 227 |
| | | | | | | 28% | 15 | 203 |
| | | | | | | 38% | 254 | 316 |
| HRDEX93 | 816046 | 183 | WUblastx.64 | (Q9UBV8) PEFLIN. | Q9UBV8 | 100% | 313 | 864 |
| HRDFK37 | 840381 | 184 | WUblastx.64 | (Q9P195) PRO1722. | Q9P195 | 69% | 536 | 652 |
| | | | | | | 40% | 50 | 115 |
| HRTAP63 | 780698 | 185 | WUblastx.64 | (Q9Y3C9) CGI-127 PROTEIN. | Q9Y3C9 | 100% | 498 | 860 |
| HSAVA08 | 580870 | 186 | WUblastx.64 | (Q9BGW3) HYPOTHETICAL 13.5 KDA | Q9BGW3 | 57% | 949 | 896 |
| | | | | PROTEIN. | | 42% | 926 | 792 |
| | | | | | | 63% | 796 | 764 |
| | | | | | | 66% | 1059 | 934 |
| HSDZM54 | 637870 | 189 | WUblastx.64 | NADH dehydrogenase (ubiquinone) (EC 1.6.5.3) | pir\|A00422\|DNHUN3 | 88% | 226 | 360 |
| | | | | chain 3 - human mitochondrion | | | | |
| HSHBF76 | 715838 | 190 | WUblastx.64 | (AAH08335) Unknown (protein for | AAH08335 | 86% | 762 | 457 |
| | | | | IMAGE: 3506202) (Fra | | 73% | 882 | 748 |
| | | | | | | 100% | 1267 | 836 |
| HSJBY32 | 702020 | 192 | WUblastx.64 | (Q9GZZ6) NEURONAL NICOTINIC | Q9GZZ6 | 81% | 466 | 639 |
| | | | | ACETYLCHOLINE ALPHA10 SUBUNIT | | 57% | 215 | 514 |
| | | | | PRECURSOR ( | | | | |
| HSNBM34 | 635131 | 195 | WUblastx.64 | acyl-CoA dehydrogenase (EC 1.3.99.—) very- | pir\|S54183\|S54183 | 84% | 1548 | 1979 |
| | | | | long-chain specific - human | | 100% | 251 | 1546 |
| HSQDO85 | 853393 | 196 | WUblastx.64 | (Q9VCK0) CG10161 PROTEIN. | Q9VCK0 | 67% | 485 | 988 |
| | | | | | | 60% | 60 | 521 |
| | | | | | | 56% | 10 | 57 |
| HSRBE06 | 871264 | 197 | WUblastx.64 | (Q9H387) PRO2550. | Q9H387 | 70% | 1608 | 1327 |
| HSSDI26 | 560722 | 198 | WUblastx.64 | (Q9BVD9) UNKNOWN (PROTEIN FOR | Q9BVD9 | 68% | 1398 | 1264 |
| | | | | MGC: 5149). | | | | |
| HSSEA64 | 853395 | 199 | WUblastx.64 | (Q9HBT2) HYPOTHETICAL 17.2 KDA | Q9HBT2 | 98% | 7 | 243 |
| | | | | PROTEIN. | | | | |
| HSSEF77 | 658725 | 200 | WUblastx.64 | (O95637) WW DOMAIN BINDING PROTEIN- | O95637 | 42% | 10 | 246 |
| | | | | 1. | | 83% | 296 | 829 |
| HSSFE38 | 742512 | 201 | HMMER | PFAM: Ribonuclease HII | PF01351 | 76.3 | 184 | −142 |
| | | | 2.1.1 | | | | | |
| | | | WUblastx.64 | (O75792) RIBONUCLEASE HI LARGE | RNHL_HUMAN | 91% | 156 | 635 |
| | | | | SUBUNIT (EC 3.1.26.—) (RNASE | | 99% | 587 | 1051 |
| HSXCP38 | 895392 | 202 | WUblastx.64 | hydroxymethylglutaryl-CoA lyase (EC 4.1.3.4) - | pir\|B45470\|B45470 | 70% | 17 | 895 |
| | | | | chicken | | | | |
| HT5GR59 | 801930 | 205 | WUblastx.64 | (O60496) DOCKING PROTEIN. | O60496 | 72% | 70 | 1284 |
| HTEAG62 | 812332 | 206 | WUblastx.64 | (Q9Y5Z7) HOST CELL FACTOR 2. | Q9Y5Z7 | 60% | 1 | 57 |
| | | | | | | 93% | 14 | 2011 |
| | | | | | | 30% | 107 | 631 |
| HTEEW69 | 764835 | 207 | WUblastx.64 | (Q9Z1H7) GSG1. | Q9Z1H7 | 65% | 850 | 927 |
| | | | | | | 85% | 707 | 769 |
| | | | | | | 50% | 519 | 662 |
| | | | | | | 66% | 908 | 943 |
| | | | | | | 65% | 182 | 544 |
| HTEGS07 | 827700 | 208 | WUblastx.64 | (Q9D143) 1110030K22RIK PROTEIN. | Q9D143 | 96% | 183 | 593 |
| HTEJD29 | 695798 | 211 | WUblastx.64 | (Q60713) REVERSE TRANSCRIPTASE. | Q60713 | 42% | 1115 | 1285 |
| | | | | | | 47% | 874 | 1089 |
| HTENR63 | 877952 | 213 | WUblastx.64 | (Q9HD71) HYPOTHETICAL NUCLEAR | Q9HD71 | 33% | 1278 | 1358 |
| | | | | FACTOR SBBI22. | | 78% | 26 | 1168 |
| HTGGM44 | 842856 | 214 | WUblastx.64 | probable phosphodiesterase I (EC 3.1.4.1) - | pir\|T43461\|T43461 | 100% | 1400 | 1924 |
| | | | | human (fragment) | | 83% | 1925 | 2488 |
| HTLBT80 | 840045 | 217 | WUblastx.64 | (Q9NQQ7) BA394O2.1 (CGI-15 PROTEIN). | Q9NQQ7 | 76% | 1214 | 1405 |
| | | | | | | 74% | 804 | 1223 |
| | | | | | | 47% | 780 | 845 |
| | | | | | | 78% | 313 | 825 |
| HTLEM16 | 779133 | 219 | WUblastx.64 | (O95638) WW DOMAIN BINDING PROTEIN- | O95638 | 92% | 50 | 541 |
| | | | | 2. | | 28% | 987 | 1142 |
| | | | | | | 48% | 617 | 841 |
| HTLFA13 | 535937 | 220 | WUblastx.64 | (Q9UHT1) PRO1902 PROTEIN. | Q9UHT1 | 57% | 1118 | 873 |
| HTLGI89 | 835069 | 221 | WUblastx.64 | (Q9BXS5) CLATHRIN-ASSOCIATED | Q9BXS5 | 98% | 104 | 682 |
| | | | | PROTEIN AP47. | | 99% | 675 | 1370 |
| HTLIF11 | 843506 | 222 | WUblastx.64 | (Q9I8S4) ORNITHINE DECARBOXYLASE-2. | Q9I8S4 | 68% | 309 | 356 |
| | | | | | | 59% | 353 | 1687 |
| HTNBK13 | 831967 | 223 | WUblastx.64 | (Q9Y3M2) HYPOTHETICAL 14.5 KDA | Q9Y3M2 | 81% | 123 | 500 |
| | | | | PROTEIN. | | | | |
| HTOAM11 | 664508 | 224 | WUblastx.64 | (Q9H5R3) CDNA: FLJ23147 FIS, CLONE | Q9H5R3 | 77% | 428 | 363 |
| | | | | LNG09295. | | 75% | 586 | 425 |
| HTPCO75 | 853645 | 226 | WUblastx.64 | (O00549) ORF2-LIKE PROTEIN | O00549 | 43% | 325 | 26 |
| | | | | (FRAGMENT). | | 36% | 1318 | 1253 |
| HTSFJ32 | 637720 | 227 | WUblastx.64 | (Q9WUW2) VESICLE ASSOCIATED | Q9WUW2 | 64% | 747 | 788 |
| | | | | MEMBRANE PROTEIN 2B. | | 94% | 448 | 609 |
| HTTCB60 | 853401 | 228 | WUblastx.64 | (Q9HAW0) RNA POLYMERASE III | Q9HAW0 | 90% | 6 | 881 |
| | | | | TRANSCRIPTION INITIATION FACTOR | | | | |
| | | | | BRFU. | | | | |
| HTTEE41 | 840950 | 229 | WUblastx.64 | (P78371) T-COMPLEX PROTEIN 1, BETA | TCPB_HUMAN | 98% | 92 | 1696 |
| | | | | SUBUNIT (TCP-1-BETA) (CC | | | | |
| HTTEZ02 | 702027 | 230 | WUblastx.64 | (Q9UEZ7) MAKORIN 1. | Q9UEZ7 | 56% | 278 | 346 |
| | | | | | | 98% | 6 | 272 |
| HTWEH94 | 561680 | 231 | WUblastx.64 | (Q9GMX5) HYPOTHETICAL 12.9 KDA | Q9GMX5 | 60% | 1150 | 929 |
| | | | | PROTEIN. | | | | |
| HTXDC77 | 844258 | 232 | HMMER | PFAM: Class I Histocompatibility antigen, | PF00129 | 103.3 | 137 | 259 |
| | | | 2.1.1 | domains alpha 1 and 2 | | | | |
| | | | WUblastx.64 | (P03989) HLA CLASS I | 1B14_HUMAN | 63% | 880 | 945 |
| | | | | HISTOCOMPATIBILITY ANTIGEN, B-27 | | 71% | 65 | 256 |
| | | | | ALPHA | | 80% | 282 | 863 |
| HTXFA72 | 853410 | 235 | WUblastx.64 | (Q9N083) UNNAMED PORTEIN PRODUCT. | Q9N083 | 59% | 1688 | 1557 |
| | | | | | | 66% | 1839 | 1681 |
| HTXMZ07 | 834881 | 237 | WUblastx.64 | (Q9BRF3) SIMILAR TO RIKEN CDNA | Q9BRF3 | 90% | 3 | 1469 |
| | | | | 2810468K17 GENE. | | | | |
| HUKBT67 | 844446 | 238 | WUblastx.64 | (BAB55428) CDNA FLJ14975 fis, clone | BAB55428 | 100% | 1040 | 1216 |
| | | | | THYRO1001405, w | | 100% | 8 | 61 |
| | | | | | | 30% | 80 | 241 |
| HUSCJ14 | 894699 | 240 | WUblastx.64 | tex261 protein - mouse | pir\|S47481\|S47481 | 99% | 74 | 661 |
| HUSGL67 | 792637 | 241 | WUblastx.64 | (Q9Y2G2) CARD DOMAIN PROTEIN 8 | CRD8_HUMAN | 100% | 347 | 421 |
| | | | | (APOPTOTIC PROTEIN NDPP1) (D | | 65% | 947 | 1006 |
| | | | | | | 97% | 469 | 954 |
| HUSGU40 | 684975 | 242 | WUblastx.64 | (Q9BX98) UBIQUITIN A-52 RESIDUE | Q9BX98 | 75% | 840 | 433 |
| | | | | RIBOSOMAL PROTEIN FUSION PRODUCT 1 | | | | |
| | | | | (F | | | | |
| HUVDJ48 | 564853 | 244 | WUblastx.64 | SHORT ISOFORM OF Q9P2N4 | sp_vs\|Q9P2N4- | 92% | 1510 | 1668 |
| | | | | | 01\|Q9P2N4 | | | |
| HWDAC26 | 821335 | 245 | WUblastx.64 | (Q14287) HYPOTHETICAL PROTEIN | Q14287 | 51% | 1316 | 1471 |
| | | | | (FRAGMENT). | | 57% | 1093 | 1323 |
| HBDAB91 | 864374 | 247 | WUblastx.64 | (O00370) PUTATIVE P150. | O00370 | 40% | 907 | 833 |
| | | | | | | 35% | 849 | 307 |
| HBDAB91 | 789532 | 255 | WUblastx.64 | (O00370) PUTATIVE P150. | O00370 | 40% | 587 | 513 |
| | | | | | | 34% | 529 | 5 |
| HILCA24 | 869856 | 248 | WUblastx.64 | (Q9NUU6) CDNA FLJ11127 FIS, CLONE | Q9NUU6 | 95% | 104 | 1171 |
| | | | | PLACE1006225. | | | | |
| HILCA24 | 782450 | 256 | WUblastx.64 | (Q9NUU6) CDNA FLJ11127 FIS, CLONE | Q9NUU6 | 73% | 103 | 159 |
| | | | | PLACE1006225. | | 100% | 168 | 1169 |
| HYABC84 | 865064 | 249 | WUblastx.64 | (Q9H429) DJ756N5.2 (A NOVEL PROTEIN | Q9H429 | 92% | 163 | 618 |
| | | | | (DKFZP727M231) SIMILAR TO TRP4-AS | | | | |
| HYABC84 | 789854 | 257 | WUblastx.64 | (Q99L03) SIMILAR TO TRP4-ASSOCIATED | Q99L03 | 89% | 209 | 553 |
| | | | | PROTEIN TAP1 (FRAGMENT). | | | | |
| HE2CA60 | 888705 | 250 | WUblastx.64 | (O95232) OKADAIC ACID-INDUCIBLE | OA48_HUMAN | 98% | 1098 | 1265 |
| | | | | PHOSPHOPROTEIN OA48-18. | | | | |
| HPQAX38 | 845752 | 251 | WUblastx.64 | (Q9BGV8) HYPOTHETICAL 10.0 KDA | Q9BGV8 | 74% | 664 | 768 |
| | | | | PROTEIN. | | 68% | 543 | 674 |
| HPQAX38 | 843592 | 259 | WUblastx.64 | (Q9BGV8) HYPOTHETICAL 10.0 KDA | Q9BGV8 | 74% | 664 | 768 |
| | | | | PROTEIN. | | 68% | 543 | 674 |

RACE Protocol For Recovery of Full-Length Genes

[0136] Partial cDNA clones can be made full-length by utilizing the rapid amplification of cDNA ends (RACE) procedure described in Frohman, M. A., et al., Proc. Nat'l. Acad. Sci. USA, 85:8998-9002 (1988). A cDNA clone missing either the 5′ or 3′ end can be reconstructed to include the absent base pairs extending to the translational start or stop codon, respectively. In some cases, cDNAs are missing the start codon of translation, therefor. The following briefly describes a modification of this original 5′ RACE procedure. Poly A+ or total RNA is reverse transcribed with Superscript II (Gibco/BRL) and an antisense or complementary primer specific to the cDNA sequence. The primer is removed from the reaction with a Microcon Concentrator (Amicon). The first-strand cDNA is then tailed with dATP and terminal deoxynucleotide transferase (Gibco/BRL). Thus, an anchor sequence is produced which is needed for PCR amplification. The second strand is synthesized from the dA-tail in PCR buffer, Taq DNA polymerase (Perkin-Elmer Cetus), an oligo-dT primer containing three adjacent restriction sites (XhoI, SalI and ClaI) at the 5′ end and a primer containing just these restriction sites. This double-stranded cDNA is PCR amplified for 40 cycles with the same primers as well as a nested cDNA-specific antisense primer. The PCR products are size-separated on an ethidium bromide-agarose gel and the region of gel containing cDNA products the predicted size of missing protein-coding DNA is removed. cDNA is purified from the agarose with the Magic PCR Prep kit (Promega), restriction digested with XhoI or SalI, and ligated to a plasmid such as pBluescript SKII (Stratagene) at XhoI and EcORV sites. This DNA is transformed into bacteria and the plasmid clones sequenced to identify the correct protein-coding inserts. Correct 5′ ends are confirmed by comparing this sequence with the putatively identified homologue and overlap with the partial cDNA clone. Similar methods known in the art and/or commercial kits are used to amplify and recover 3′ ends.

[0137] Several quality-controlled kits are commercially available for purchase. Similar reagents and methods to those above are supplied in kit form from Gibco/BRL for both 5′ and 3′ RACE for recovery of full length genes. A second kit is available from Clontech which is a modification of a related technique, SLIC (single-stranded ligation to single-stranded cDNA), developed by Dumas et al., Nucleic Acids Res., 19:5227-32 (1991). The major differences in procedure are that the RNA is alkaline hydrolyzed after reverse transcription and RNA ligase is used to join a restriction site-containing anchor primer to the first-strand cDNA. This obviates the necessity for the dA-tailing reaction which results in a polyT stretch that is difficult to sequence past.

[0138] An alternative to generating 5′ or 3′ cDNA from RNA is to use cDNA library double-stranded DNA. An asymmetric PCR-amplified antisense cDNA strand is synthesized with an, antisense cDNA-specific primer and a plasmid-anchored primer. These primers are removed and a symmetric PCR reaction is performed with a nested cDNA-specific antisense primer and the plasmid-anchored primer.

RNA Ligase Protocol For Generating The 5′ or 3′ End Sequences To Obtain Full Length Genes

[0139] Once a gene of interest is identified, several methods are available for the identification of the 5′ or 3′ portions of the gene which may not be present in the original cDNA plasmid. These methods include, but are not limited to, filter probing, clone enrichment using specific probes and protocols similar and identical to 5′ and 3′ RACE. While the full length gene may be present in the library and can be identified by probing, a useful method for generating the 5′ or 3′ end is to use the existing sequence information from the original cDNA to generate the missing information. A method similar to 5′ RACE is available for generating the missing 5′ end of a desired full-length gene. (This method was published by Fromont-Racine et al., Nucleic Acids Res., 21(7):1683-1684 (1993)). Briefly, a specific RNA oligonucleotide is ligated to the 5′ ends of a population of RNA presumably containing full-length gene RNA transcript and a primer set containing a primer specific to the ligated RNA oligonucleotide and a primer specific to a known sequence of the gene of interest, is used to PCR amplify the 5′ portion of the desired full length gene which may then be sequenced and used to generate the full length gene. This method starts with total RNA isolated from the desired source, poly A RNA may be used but is not a prerequisite for this procedure. The RNA preparation may then be treated with phosphatase if necessary to eliminate 5′ phosphate groups on degraded or damaged RNA which may interfere with the later RNA ligase step. The phosphatase if used is then inactivated and the RNA is treated with tobacco acid pyrophosphatase in order to remove the cap structure present at the 5′ ends of messenger RNAs. This reaction leaves a 5′ phosphate group at the 5′ end of the cap cleaved RNA which can then be ligated to an RNA oligonucleotide using T4 RNA ligase. This modified RNA preparation can then be used as a template for first strand cDNA synthesis using a gene specific oligonucleotide. The first strand synthesis reaction can then be used as a template for PCR amplification of the desired 5′ end using a primer specific to the ligated RNA oligonucleotide and a primer specific to the known sequence of the gene of interest. The resultant product is then sequenced and analyzed to confirm that the 5′ end sequence belongs to the relevant gene.

[0140] The present invention also relates to vectors or plasmids which include such DNA sequences, as well as the use of the DNA sequences. The material deposited with the ATCC (e.g., as described in columns 2 and 3 of Table 1A, and/or as set forth in Table 1B, Table 6, or Table 7) is a mixture of cDNA clones derived from a variety of human tissue and cloned in either a plasmid vector or a phage vector, as described, for example, in Table 1A and Table 7. These deposits are referred to as “the deposits” herein. The tissues from which some of the clones were derived are listed in Table 7, and the vector in which the corresponding cDNA is contained is also indicated in Table 7. The deposited material includes cDNA clones corresponding to SEQ ID NO:X described, for example, in Table 1A and/or Table 1B (ATCC Deposit No:Z). A clone which is isolatable from the ATCC Deposits by use of a sequence listed as SEQ ID NO:X, may include the entire coding region of a human gene or in other cases such clone may include a substantial portion of the coding region of a human gene. Furthermore, although the sequence listing may in some instances list only a portion of the DNA sequence in a clone included in the ATCC Deposits, it is well within the ability of one skilled in the art to sequence the DNA included in a clone contained in the ATCC Deposits by use of a sequence (or portion thereof) described in, for example Tables 1A and/or Table 1B or Table 2, by procedures hereinafter further described, and others apparent to those skilled in the art.

[0141] Also provided in Table 1A and Table 7 is the name of the vector which contains the cDNA clone. Each vector is routinely used in the art. The following additional information is provided for convenience.

[0142] Vectors Lambda Zap (U.S. Pat. Nos. 5,128,256 and 5,286,636), Uni-Zap XR (U.S. Pat. Nos. 5,128,256 and 5,286,636), Zap Express (U.S. Pat. Nos. 5,128,256 and 5,286,636), pBluescript (pBS) (Short, J. M. et al., Nucleic Acids Res. 16:7583-7600 (1988); Alting-Mees, M. A. and Short, J. M., Nucleic Acids Res. 17:9494 (1989)) and pBK (Alting-Mees, M. A. et al., Strategies 5:58-61 (1992)) are commercially available from Stratagene Cloning Systems, Inc., 11011 N. Torrey Pines Road, La Jolla, Calif., 92037. pBS contains an ampicillin resistance gene and pBK contains a neomycin resistance gene. Phagemid pBS may be excised from the Lambda Zap and Uni-Zap XR vectors, and phagemid pBK may be excised from the Zap Express vector. Both phagemids may be transformed into E. coli strain XL-1 Blue, also available from Stratagene.

[0143] Vectors pSport1, pCMVSport 1.0, pCMVSport 2.0 and pCMVSport 3.0, were obtained from Life Technologies, Inc., P.O. Box 6009, Gaithersburg, Md. 20897. All Sport vectors contain an ampicillin resistance gene and may be transformed into E. coli strain DH10B, also available from Life Technologies. See, for instance, Gruber, C. E., et al., Focus 15:59- (1993). Vector lafmid BA (Bento Soares, Columbia University, New York, N.Y.) contains an ampicillin resistance gene and can be transformed into E. coli strain XL-1 Blue. Vector pCR®2.1, which is available from Invitrogen, 1600 Faraday Avenue, Carlsbad, Calif. 92008, contains an ampicillin resistance gene and may be transformed into E. coli strain DH10B, available from Life Technologies. See, for instance, Clark, J. M., Nuc. Acids Res. 16:9677-9686 (1988) and Mead, D. et al., Bio/Technology 9: (1991).

[0144] The present invention also relates to the genes corresponding to SEQ ID NO:X, SEQ ID NO:Y, and/or the deposited clone (ATCC Deposit No:Z). The corresponding gene can be isolated in accordance with known methods using the sequence information disclosed herein. Such methods include preparing probes or primers from the disclosed sequence and identifying or amplifying the corresponding gene from appropriate sources of genomic material.

[0145] Also provided in the present invention are allelic variants, orthologs, and/or species homologs. Procedures known in the art can be used to obtain full-length genes, allelic variants, splice variants, full-length coding portions, orthologs, and/or species homologs of genes corresponding to SEQ ID NO:X or the complement thereof, polypeptides encoded by genes corresponding to SEQ ID NO:X or the complement thereof, and/or the cDNA contained in ATCC Deposit No:Z, using information from the sequences disclosed herein or the clones deposited with the ATCC. For example, allelic variants and/or species homologs may be isolated and identified by making suitable probes or primers from the sequences provided herein and screening a suitable nucleic acid source for allelic variants and/or the desired homologue.

[0146] The polypeptides of the invention can be prepared in any suitable manner. Such polypeptides include isolated naturally occurring polypeptides, recombinantly produced polypeptides, synthetically produced polypeptides, or polypeptides produced by a combination of these methods. Means for preparing such polypeptides are well understood in the art

[0147] The polypeptides may be in the form of the secreted protein, including the mature form, or may be a part of a larger protein, such as a fusion protein (see below). It is often advantageous to include an additional amino acid sequence which contains secretory or leader sequences, pro-sequences, sequences which aid in purification, such as multiple histidine residues, or an additional sequence for stability during recombinant production.

[0148] The polypeptides of the present invention are preferably provided in an isolated form, and preferably are substantially purified. A recombinantly produced version of a polypeptide, including the secreted polypeptide, can be substantially purified using techniques described herein or otherwise known in the art, such as, for example, by the one-step method described in Smith and Johnson, Gene 67:3140 (1988). Polypeptides of the invention also can be purified from natural, synthetic or recombinant sources using techniques described herein or otherwise known in the art, such as, for example, antibodies of the invention raised against the polypeptides of the present invention in methods which are well known in the art.

[0149] The present invention provides a polynucleotide comprising, or alternatively consisting of, the nucleic acid sequence of SEQ ID NO:X, and/or the cDNA sequence contained in ATCC Deposit No:Z. The present invention also provides a polypeptide comprising, or alternatively, consisting of, the polypeptide sequence of SEQ ID NO:Y, a polypeptide encoded by SEQ ID NO:X or a complement thereof, a polypeptide encoded by the cDNA contained in ATCC Deposit No:Z, and/or the polypeptide sequence encoded by a nucleotide sequence in SEQ ID NO:B as defined in column 6 of Table 1C. Polynucleotides encoding a polypeptide comprising, or alternatively consisting of the polypeptide sequence of SEQ ID NO:Y, a polypeptide encoded by SEQ ID NO:X, a polypeptide encoded by the cDNA contained in ATCC Deposit No:Z, and/or a polypeptide sequence encoded by a nucleotide sequence in SEQ ID NO:B as defined in column 6 of Table 1C are also encompassed by the invention. The present invention further encompasses a polynucleotide comprising, or alternatively consisting of, the complement of the nucleic acid sequence of SEQ ID NO:X, a nucleic acid sequence encoding a polypeptide encoded by the complement of the nucleic acid sequence of SEQ ID NO:X, and/or the cDNA contained in ATCC Deposit No:Z.

[0150] Moreover, representative examples of polynucleotides of the invention comprise, or alternatively consist of, one, two, three, four, five, six, seven, eight, nine, ten, or more of the sequences delineated in Table 1C column 6, or any combination thereof. Additional, representative examples of polynucleotides of the invention comprise, or alternatively consist of, one, two, three, four, five, six, seven, eight, nine, ten, or more of the complementary strand(s) of the sequences delineated in Table 1C column 6, or any combination thereof. In further embodiments, the above-described polynucleotides of the invention comprise, or alternatively consist of, sequences delineated in Table 1C, column 6, and have a nucleic acid sequence which is different from that of the BAC fragment having the sequence disclosed in SEQ ID NO:B (see Table 1C, column 5). In additional embodiments, the above-described polynucleotides of the invention comprise, or alternatively consist of, sequences delineated in Table 1C, column 6, and have a nucleic acid sequence which is different from that published for the BAC clone identified as BAC ID NO:A (see Table 1C, column 4). In additional embodiments, the above-described polynucleotides of the invention comprise, or alternatively consist of, sequences delineated in Table 1C, column 6, and have a nucleic acid sequence which is different from that contained in the BAC clone identified as BAC ID NO:A (see Table 1C, column 4). Polypeptides encoded by these polynucleotides, other polynucleotides that encode these polypeptides, and antibodies that bind these polypeptides are also encompassed by the invention. Additionally, fragments and variants of the above-described polynucleotides and polypeptides are also encompassed by the invention.

[0151] Further, representative examples of polynucleotides of the invention comprise, or alternatively consist of, one, two, three, four, five, six, seven, eight, nine, ten, or more of the sequences delineated in column 6 of Table 1C which correspond to the same Clone ID (see Table 1C, column 1), or any combination thereof. Additional, representative examples of polynucleotides of the invention comprise, or alternatively consist of, one, two, three, four, five, six, seven, eight, nine, ten, or more of the complementary strand(s) of the sequences delineated in column 6 of Table 1C which correspond to the same Clone ID (see Table 1C, column 1), or any combination thereof. In further embodiments, the above-described polynucleotides of the invention comprise, or alternatively consist of, sequences delineated in column 6 of Table 1C which correspond to the same Clone ID (see Table 1C, column 1) and have a nucleic acid sequence which is different from that of the BAC fragment having the sequence disclosed in SEQ ID NO:B (see Table 1C, column 5). In additional embodiments, the above-described polynucleotides of the invention comprise, or alternatively consist of, sequences delineated in column 6 of Table 1C which correspond to the same Clone ID (see Table 1C, column 1) and have a nucleic acid sequence which is different from that published for the BAC clone identified as BAC ID NO:A (see Table 1C, column 4). In additional embodiments, the above-described polynucleotides of the invention comprise, or alternatively consist of, sequences delineated in column 6 of Table 1C which correspond to the same Clone ID (see Table 1C, column 1) and have a nucleic acid sequence which is different from that contained in the BAC clone identified as BAC ID NO:A (see Table 1C, column 4). Polypeptides encoded by these polynucleotides, other polynucleotides that encode these polypeptides, and antibodies that bind these polypeptides are also encompassed by the invention. Additionally, fragments and variants of the above-described polynucleotides and polypeptides are also encompassed by the invention.

[0152] Further, representative examples of polynucleotides of the invention comprise, or alternatively consist of, one, two, three, four, five, six, seven, eight, nine, ten, or more of the sequences delineated in column 6 of Table 1C which correspond to the same contig sequence identifier SEQ ID NO:X (see Table 1C, column 2), or any combination thereof. Additional, representative examples of polynucleotides of the invention comprise, or alternatively consist of, one, two, three, four, five, six, seven, eight, nine, ten, or more of the complementary strand(s) of the sequences delineated in column 6 of Table 1C which correspond to the same contig sequence identifier SEQ ID NO:X (see Table 1C, column 2), or any combination thereof. In further embodiments, the above-described polynucleotides of the invention comprise, or alternatively consist of, sequences delineated in column 6 of Table 1C which correspond to the same contig sequence identifier SEQ ID NO:X (see Table 1C, column 2) and have a nucleic acid sequence which is different from that of the BAC fragment having the sequence disclosed in SEQ ID NO:B (see Table 1C, column 5). In additional embodiments, the above-described polynucleotides of the invention comprise, or alternatively consist of, sequences delineated in column 6 of Table 1C which correspond to the same contig sequence identifier SEQ ID NO:X (see Table 1C, column 2) and have a nucleic acid sequence which is different from that published for the BAC clone identified as BAC ID NO:A (see Table 1C, column 4). In additional embodiments, the above-described polynucleotides of the invention comprise, or alternatively consist of, sequences delineated in column 6 of Table 1C which correspond to the same contig sequence identifier SEQ ID NO:X (see Table 1C, column 2) and have a nucleic acid sequence which is different from that contained in the BAC clone identified as BAC ID NO:A (See Table 1C, column 4). Polypeptides encoded by these polynucleotides, other polynucleotides that encode these polypeptides, and antibodies that bind these polypeptides are also encompassed by the invention. Additionally, fragments and variants of the above-described polynucleotides and polypeptides are also encompassed by the invention.

[0153] Moreover, representative examples of polynucleotides of the invention comprise, or alternatively consist of, one, two, three, four, five, six, seven, eight, nine, ten, or more of the sequences delineated in the same row of Table 1C. column 6, or any combination thereof. Additional, representative examples of polynucleotides of the invention comprise, or alternatively consist of, one, two, three, four, five, six, seven, eight, nine, ten, or more of the complementary strand(s) of the sequences delineated in the same row of Table 1C column 6, or any combination thereof. In preferred embodiments, the polynucleotides of the invention comprise, or alternatively consist of, one, two, three, four, five, six, seven, eight, nine, ten, or more of the complementary strand(s) of the sequences delineated in the same row of Table 1C column 6, wherein sequentially delineated sequences in the table (i.e. corresponding to those exons located closest to each other) are directly contiguous in a 5′ to 3′ orientation. In further embodiments, above-described polynucleotides of the invention comprise, or alternatively consist of, sequences delineated in the same row of Table 1C, column 6, and have a nucleic acid sequence which is different from that of the BAC fragment having the sequence disclosed in SEQ ID NO:B (see Table 1C, column 5). In additional embodiments, the above-described polynucleotides of the invention comprise, or alternatively consist of, sequences delineated in the same row of Table 1C, column 6, and have a nucleic acid sequence which is different from that published for the BAC clone identified as BAC ID NO:A (see Table 1C, column 4). In additional embodiments, the above-described polynucleotides of the invention comprise, or alternatively consist of, sequences delineated in the same row of Table 1C, column 6, and have a nucleic acid sequence which is different from that contained in the BAC clone identified as BAC ID NO:A (see Table 1C, column 4). Polypeptides encoded by these polynucleotides, other polynucleotides that encode these polypeptides, and antibodies that bind these polypeptides are also encompassed by the invention.

[0154] In additional specific embodiments, polynucleotides of the invention comprise, or alternatively consist of, one, two, three, four, five, six, seven, eight, nine, ten, or more of the sequences delineated in column 6 of Table 1C, and the polynucleotide sequence of SEQ ID NO:X (e.g., as defined in Table 1C, column 2) or fragments or variants thereof. Polypeptides encoded by these polynucleotides, other polynucleotides that encode these polypeptides, and antibodies that bind these polypeptides are also encompassed by the invention.

[0155] In additional specific embodiments, polynucleotides of the invention comprise, or alternatively consist of, one, two, three, four, five, six, seven, eight, nine, ten, or more of the sequences delineated in column 6 of Table 1C which correspond to the same Clone ID (see Table 1C, column 1), and the polynucleotide sequence of SEQ ID NO:X (e.g., as defined in Table 1A, Table 1B, or Table 1C) or fragments or variants thereof. In preferred embodiments, the delineated sequence(s) and polynucleotide sequence of SEQ ID NO:X correspond to the same Clone ID. Polypeptides encoded by these polynucleotides, other polynucleotides that encode these polypeptides, and antibodies that bind these polypeptides are also encompassed by the invention.

[0156] In further specific embodiments, polynucleotides of the invention comprise, or alternatively consist of, one, two, three, four, five, six, seven, eight, nine, ten, or more of the sequences delineated in the same row of column 6 of Table 1C, and the polynucleotide sequence of SEQ ID NO:X (e.g., as defined in Table 1A, Table 1B, or Table 1C) or fragments or variants thereof. In preferred embodiments, the delineated sequence(s) and polynucleotide sequence of SEQ ID NO:X correspond to the same row of column 6 of Table 1C. Polypeptides encoded by these polynucleotides, other polynucleotides that encode these polypeptides, and antibodies that bind these polypeptides are also encompassed by the invention.

[0157] In additional specific embodiments, polynucleotides of the invention comprise, or alternatively consist of a polynucleotide sequence in which the 3′ 10 polynucleotides of one of the sequences delineated in column 6 of Table 1C and the 5′ 10 polynucleotides of the sequence of SEQ ID NO:X are directly contiguous. Nucleic acids which hybridize to the complement of these 20 contiguous polynucleotides under stringent hybridization conditions or alternatively, under lower stringency conditions, are also encompassed by the invention. Polypeptides encoded by these polynucleotides and/or nucleic acids, other polynucleotides and/or nucleic acids that encode these polypeptides, and antibodies that bind these polypeptides are also encompassed by the invention. Additionally, fragments and variants of the above-described polynucleotides, nucleic acids, and polypeptides are also encompassed by the invention.

[0158] In additional specific embodiments, polynucleotides of the invention comprise, or alternatively consist of, a polynucleotide sequence in which the 3′ 10 polynucleotides of one of the sequences delineated in column 6 of Table 1C and the 5′ 10 polynucleotides of a fragment or variant of the sequence of SEQ ID NO:X are directly contiguous Nucleic acids which hybridize to the complement of these 20 contiguous polynucleotides under stringent hybridization conditions or alternatively, under lower stringency conditions, are also encompassed by the invention. Polypeptides encoded by these polynucleotides and/or nucleic acids, other polynucleotides and/or nucleic acids encoding these polypeptides, and antibodies that bind these polypeptides are also encompassed by the invention. Additionally, fragments and variants of the above-described polynucleotides, nucleic acids, and polypeptides are also encompassed by the invention.

[0159] In specific embodiments, polynucleotides of the invention comprise, or alternatively consist of, a polynucleotide sequence in which the 3′ 10 polynucleotides of the sequence of SEQ ID NO:X and the 5′ 10 polynucleotides of the sequence of one of the sequences delineated in column 6 of Table 1C are directly contiguous. Nucleic acids which hybridize to the complement of these 20 contiguous polynucleotides under stringent hybridization conditions or alternatively, under lower stringency conditions, are also encompassed by the invention. Polypeptides encoded by these polynucleotides and/or nucleic acids, other polynucleotides and/or nucleic acids encoding these polypeptides, and antibodies that bind these polypeptides are also encompassed by the invention. Additionally, fragments and variants of the above-described polynucleotides, nucleic acids, and polypeptides are also encompassed by the invention.

[0160] In specific embodiments, polynucleotides of the invention comprise, or alternatively consist of, a polynucleotide sequence in which the 3′ 10 polynucleotides of a fragment or variant of the sequence of SEQ ID NO:X and the 5′ 10 polynucleotides of the sequence of one of the sequences delineated in column 6 of Table 1C are directly contiguous. Nucleic acids which hybridize to the complement of these 20 contiguous polynucleotides under stringent hybridization conditions or alternatively, under lower stringency conditions, are also encompassed by the invention. Polypeptides encoded by these polynucleotides and/or nucleic acids, other polynucleotides and/or nucleic acids encoding these polypeptides, and antibodies that bind these polypeptides are also encompassed by the invention. Additionally, fragments and variants of the above-described polynucleotides, nucleic acids, and polypeptides, are also encompassed by the invention.

[0161] In further specific embodiments, polynucleotides of the invention comprise, or alternatively consist of, a polynucleotide sequence in which the 3′ 10 polynucleotides of one of the sequences delineated in column 6 of Table 1C and the 5′ 10 polynucleotides of another sequence in column 6 are directly contiguous. Nucleic acids which hybridize to the complement of these 20 contiguous polynucleotides under stringent hybridization conditions or alternatively, under lower stringency conditions, are also encompassed by the invention. Polypeptides encoded by these polynucleotides and/or nucleic acids, other polynucleotides and/or nucleic acids encoding these polypeptides, and antibodies that bind these polypeptides are also encompassed by the invention. Additionally, fragments and variants of the above-described polynucleotides, nucleic acids, and polypeptides are also encompassed by the invention.

[0162] In specific embodiments, polynucleotides of the invention comprise, or alternatively consist of, a polynucleotide sequence in which the 3′ 10 polynucleotides of one of the sequences delineated in column 6 of Table 1C and the 5′ 10 polynucleotides of another sequence in column 6 corresponding to the same Clone ID (see Table 1C, column 1) are directly contiguous. Nucleic acids which hybridize to the complement of these 20 lower stringency conditions, are also encompassed by the invention. Polypeptides encoded by these polynucleotides and/or nucleic acids, other polynucleotides and/or nucleic acids encoding these polypeptides, and antibodies that bind these polypeptides are also encompassed by the invention. Additionally, fragments and variants of the above-described polynucleotides, nucleic acids, and polypeptides are also encompassed by the invention.

[0163] In specific embodiments, polynucleotides of the invention comprise, or alternatively consist of, a polynucleotide sequence in which the 3′ 10 polynucleotides of one sequence in column 6 corresponding to the same contig sequence identifer SEQ ID NO:X (see Table 1C, column 2) are directly contiguous. Nucleic acids which hybridize to the complement of these 20 contiguous polynucleotides under stringent hybridization conditions or alternatively, under lower stringency conditions, are also encompassed by the invention. Polypeptides encoded by these polynucleotides and/or nucleic acids, other polynucleotides and/or nucleic acids encoding these polypeptides, and antibodies that bind these polypeptides are also encompassed by the invention. Additionally, fragments and variants of the above-described polynucleotides, nucleic acids, and polypeptides are also encompassed by the invention.

[0164] In specific embodiments, polynucleotides of the invention comprise, or alternatively consist of a polynucleotide sequence in which the 3′ 10 polynucleotides of one of the sequences delineated in column 6 of Table 1C and the 5′ 10 polynucleotides of another sequence in column 6 corresponding to the same row are directly contiguous. In preferred embodiments, the 3′ 10 polynucleotides of one of the sequences delineated in column 6 of Table 1C is directly contiguous with the 5′ 10 polynucleotides of the next sequential exon delineated in Table 1C, column 6. Nucleic acids which hybridize to the complement of these 20 contiguous polynucleotides under stringent hybridization conditions or alternatively, under lower stringency conditions, are also encompassed by the invention. Polypeptides encoded by these polynucleotides and/or nucleic acids, other polynucleotides and/or nucleic acids encoding these polypeptides, and antibodies that bind these polypeptides are also encompassed by the invention. Additionally, fragments and variants of the above-described polynucleotides, nucleic acids, and polypeptides are also encompassed by the invention.

Table 3

[0165] Many polynucleotide sequences, such as EST sequences, are publicly available and accessible through sequence databases and may have been publicly available prior to conception of the present invention. Preferably, such related polynucleotides are specifically excluded from the scope of the present invention. Accordingly, for each contig sequence (SEQ ID NO:X) listed in the fifth column of Table 1A and/or Table 1B, preferably excluded are one or more polynucleotides comprising a nucleotide sequence described by the general formula of a-b, where a is any integer between 1 and the final nucleotide minus 15 of SEQ ID NO:X, b is an integer of 15 to the final nucleotide of SEQ ID NO:X, where both a and b correspond to the positions of nucleotide residues shown in SEQ ID NO:X, and where b is greater than or equal to a +14. More specifically, preferably excluded are one or more polynucleotides comprising a nucleotide sequence described by the general formula of a-b, where a and b are integers as defined in columns 4 and 5, respectively, of Table 3. In specific embodiments, the polynucleotides of the invention do not consist of at least one, two, three, four, five, ten, or more of the specific polynucleotide sequences referenced by the Genbank Accession No. as disclosed in column 6 of Table 3 (including for example, published sequence in connection with a particular BAC clone). In further embodiments, preferably excluded from the invention are the specific polynucleotide sequence(s) contained in the clones corresponding to at least one, two, three, four, five, ten, or more of the available material having the accession numbers identified in the sixth column of this Table (including for example, the actual sequence contained in an identified BAC clone). In no way is this listing meant to encompass all of the sequences which may be excluded by the general formula, it is just a representative example. All references available through these accessions are hereby incorporated by reference in their entirety.

TABLE 3

| | SEQ | | | | |
|---|---|---|---|---|---|
| cDNA | ID | Contig | EST Disclaimer | | |
| Clone ID | NO: X | ID: | Range of a | Range of b | Accession Numbers |
| H6BSF56 | 11 | 762968 | 1-591 | 15-605 | AW958287, BF027085, AV650800, AV650218, |
| | | | | | BF689895, BE409727, BE871017, BE278963, |
| | | | | | BF975253, AA449214, AA150070, BF247445, |
| | | | | | AA310756, BF337859, AA425098, BE746295, |
| | | | | | BE732859, BE742068, R48107, BF129114, |
| | | | | | AA393871, AI707816, AI523073, AW002940, |
| | | | | | BE672910, BF764476, AW827130, AA468022, |
| | | | | | AA493695, AW857950, AW275510, AW857971, |
| | | | | | BF667587, AW021735, R52299, AW965008, |
| | | | | | AI223604, AI254279, BE179557, BG059450, |
| | | | | | AW963750, AI445674, AW979031, AV703942, |
| | | | | | AV762535, AI687343, BG249643, AA769402, |
| | | | | | AW827120, AA484373, AI345157, AV739452, |
| | | | | | AW168618, AW504900, AA467876, BF887977, |
| | | | | | AV710066, AV763354, AV762098, AI744826, |
| | | | | | BF964993, AA279421, AW302903, AW872575, |
| | | | | | AI700109, BF437493, AV764329, BE253048, |
| | | | | | AW270343, AL046205, BE782280, BF677892, |
| | | | | | AV759437, AV734583, AV760777, AV760486, |
| | | | | | BF965007, BE907585, AV764578, AW131249, |
| | | | | | BE297262, BF347740, BF337291, BF679274, |
| | | | | | AW193265, AI247199, BF347791, AV764307, |
| | | | | | AV763183, AW235497, AA747070, BF760796, |
| | | | | | AW872676, AI004704, AW002350, AI270117, |
| | | | | | AI311927, BF871137, BE883107, AL043009, |
| | | | | | AI754658, AI250083, AV760258, AW069769, |
| | | | | | AI370094, AL119691, AW063143, AI270559, |
| | | | | | AA372481, AV760937, AL119713, AW857949, |
| | | | | | BF742624, AA720702, BE736829, BF681649, |
| | | | | | AI953275, AA490183, AF330238, AW970871, |
| | | | | | AU145314, BF977376, AL138265, AV759172, |
| | | | | | AV761106, AV735614, AW953071, AA019312, |
| | | | | | AA584167, AV728425, AU121243, AV763847, |
| | | | | | AL038799, AV733830, BF965154, BG026806, |
| | | | | | AI133164, AA523841, AV763540, AV762050, |
| | | | | | AI470646, AI284640, AI307022, AA635739, |
| | | | | | AI350211, BE350772, AI691091, AI251082, |
| | | | | | AI370074, BF936005, AI305766, AI732378, AI860013, |
| | | | | | AV744393, AW974109, AW500125, AV760378, |
| | | | | | AV734666, AV764241, AL037683, AL038705, |
| | | | | | AA683238, BG023888, BC001419.1, AK025830.1, |
| | | | | | AF151821.1, AC004760.1, AC010679.6, |
| | | | | | AC005089.2, AC005988.1, AL161908.13, AL049766.14, |
| | | | | | AC005257.1, AL117377.18, AL109936.10, |
| | | | | | AC009311.3, AC007383.4, AC018637.3, AL161445.10, |
| | | | | | AL034545.1, L78833.1, AC023908.6, |
| | | | | | AC005250.1, AC073964.3, AC006511.5, AC073520.6, |
| | | | | | AL136223.11, Z95115.1, AC006999.2, |
| | | | | | AC005606.2, AL022322.1, AC007011.1, AC007279.4, |
| | | | | | AC007428.5, AP000893.5, AC002476.1, |
| | | | | | AP002852.3, AC008507.8, AL049795.20, AC016576.7, |
| | | | | | Z98051.6, AC011508.4, AP003357.2, |
| | | | | | AL021393.1, AC006285.11, AC005923.2, AL137839.6, |
| | | | | | AC009309.4, AC003101.1, AL121934.17, |
| | | | | | AC020893.5, AC004638.1, AP001753.1, AC007620.30, |
| | | | | | AC010524.6, AF215937.1, AL117332.16, |
| | | | | | AL022163.1, AC008482.5, AC006077.1, AC022432.4, |
| | | | | | AC011559.3, AC020658.6, AL161756.6, |
| | | | | | AC025262.27, AC018711.4, AL121586.31, AC004849.1, |
| | | | | | AC019215.4, AL357314.11, AC005071.2, |
| | | | | | AC090959.1, AL391987.15, AL022238.1, AL034423.21, |
| | | | | | AC006275.1, AL354720.14, AC002314.1, |
| | | | | | Z82198.2, AC073136.6, AL137780.10, AL358943.13, |
| | | | | | AC005694.3, AC008744.6, AC010422.7, |
| | | | | | AL137128.4, AF252830.3, AL135838.5, AL353692.14, |
| | | | | | AC004686.1, AL121751.12, AC004814.2, |
| | | | | | AC024084.4, AC005280.3, AL133367.4, AC007192.1, |
| | | | | | AC002430.1, AL157938.22, AL160471.5, |
| | | | | | AP001680.1, AL031777.4, AL353748.13, AL021807.2, |
| | | | | | AL136131.15, AC002395.1, AL136969.7, |
| | | | | | AL020997.1, AP001646.4, AC018633.2, AC005258.2, |
| | | | | | AL118501.22, AC018720.5, AL135818.3, |
| | | | | | AC004008.1, AC006111.3, AL035462.21, AC002470.17, |
| | | | | | AC016025.12, AC007384.3, AC018712.5, |
| | | | | | AL136308.4, AC073347.3, AL035667.12, AC004876.2, |
| | | | | | AC009094.7, AC005020.5, AC002425.1, |
| | | | | | AL109823.23, AL034420.16, AC007216.2, AC004650.1, |
| | | | | | AC010465.7, AC006357.5, AL157912.5, |
| | | | | | AC007225.2, AL078611.1, AF001549.1, Z69706.1, |
| | | | | | AP001725.1, AL049544.4, AL121892.9, |
| | | | | | U63630.3, AL499629.1, AC010271.6, AL008725.1, |
| | | | | | AL021939.1, AL445687.5, AC008670.4, |
| | | | | | AF254822.1, AC002531.1, AL121601.13, AL022237.1, |
| | | | | | AC004388.1, AC011310.3, AL450104.14, |
| | | | | | AC017088.8, AL031311.1, AC005527.3, AL050349.27, |
| | | | | | Z68162.1, AL121903.13, AC007546.5, |
| | | | | | AC020917.4, AC025457.5, AL139186.16, Z93241.11, |
| | | | | | AC015853.8, AC020934.7, AF117829.1, |
| | | | | | Z82190.1, AC022150.5, AP003471.2, AC013414.7, |
| | | | | | AL360227.17, AL157931.17, AC004980.4, |
| | | | | | AL121897.32, AC004622.1, Z83844.5, AC005288.1, |
| | | | | | AL356481.16, AP001687.1, AL157858.5, |
| | | | | | AL031286.1, AC022027.5, AC009144.5, AL117258.4, |
| | | | | | AC005821.1, AC004899.1 AL391839.9, |
| | | | | | AL356414.11, AP001746.1, AL353668.18, AL365223.19, |
| | | | | | Z97196.1, AL109921.21, AC012476.8, |
| | | | | | AF015262.2, AL031662.26, AC016643.6, AC004598.1, |
| | | | | | AC015555.13, Z83845.14, AL158850.8, |
| | | | | | AC008372.6, AL080242.11, AL137061.12, AC012309.7, |
| | | | | | AC004659.1, AL359219.4, AL354707.17, |
| | | | | | AJ229043.1, AL139113.21, AL590611.7, AL590283.7, |
| | | | | | AL137853.12, AC008770.6, AF228703.1, |
| | | | | | AC011477.5, AC020916.7, AC008521.5, AL021578.4, |
| | | | | | M63796.1, AL009181.1, AC006312.8, |
| | | | | | AC073657.5, AC024561.4, AC004755.2, AC005488.2, |
| | | | | | AC005274.1, AC006130.1, AP001721.1, |
| | | | | | AC022083.6, AC021752.5, AL008712.1, AC004534.1, |
| | | | | | AC023105.7, AE006462.1, AC006277.1, |
| | | | | | AL451126.18, AL352978.6, AL133282.15, AC005529.7, |
| | | | | | AC073138.3, U63312.1, AC016395.4, |
| | | | | | AC005484.2, AC005531.1, AL033520.16. |
| H6EDM64 | 12 | 841331 | 1-2596 | 15-2610 | AL529288, AL514648, AL523579, AL523918, |
| | | | | | AL530571, AL528848, AL523917, AL523578, |
| | | | | | BE795355, BE614208, AL529287, BE797988, |
| | | | | | BE747962, BE798201, AL530750, BF689293, |
| | | | | | BE884814, BF508994, BE798313, BE613450, |
| | | | | | BE787266, AW131835, AL530749, BG248495, |
| | | | | | BE386285, BF526775, BE873469, BE299650, |
| | | | | | AL042569, BE621187, BG168950, AW410458, |
| | | | | | BE883794, BE869375, BF348689, AW239351, |
| | | | | | BE737181, BE734276, BF309636, BF129214, |
| | | | | | BG180549, AW410610, AW601905, BE621858, |
| | | | | | AA689552, BF310547, AW960649, BF953086, |
| | | | | | AL045821, BE882424, BF724804, BE019151, |
| | | | | | AW246108, BG179779, AW374338, AW675186, |
| | | | | | BE279317, BG011956, AI475847, AI394166, |
| | | | | | AI142042, AW068652, AI539419, AI970048, |
| | | | | | AI792316, AA536006, AW272491, BG012645, |
| | | | | | AI827847, BG254459, AI673493, AW007399, |
| | | | | | AI719374, AA994188, BG176564, AI707847, |
| | | | | | AW104963, AI220974, AA022523, BF807054, |
| | | | | | BG012634, BF803094, N24911, AW665019, |
| | | | | | AI458806, AA689495, AA480131, AI808412, N41812, |
| | | | | | W17347, BE772562, BG012642, BF807055, |
| | | | | | BE772573, BG011957, BG012641, AL514647, F22287, |
| | | | | | AI160580, AI149344, BE772556, AI870582, |
| | | | | | BE772568, AW801577, BG176616, AW801325, |
| | | | | | AW068651, AI197831, BE265961, AA483525, |
| | | | | | BE772566, BE772574, BE693737, AA687509, |
| | | | | | BE839398, BF799200, AA687451, AI201450, |
| | | | | | BF896481, BE772569, BE244158, BE772576, |
| | | | | | BE826728, AI452812, BE772561, AA317941, |
| | | | | | AA308425, AA745895, AW751437, BG256219, |
| | | | | | AA782657, BF373198, AA364848, AL039960, |
| | | | | | AA405870, AW963550, BE300303, N78953, |
| | | | | | AA112404, BE826586, AI061434, AI143698, |
| | | | | | AW087863, AI382254, AW731818, BE788591, |
| | | | | | AW304748, AI589259, AA357514, BF663656, |
| | | | | | AW673017, AW664622, AA524482, AW246627, |
| | | | | | BE831243, BE831271, BG055766, AI749023, |
| | | | | | AA380438, BF746714, BE839346, AW084279, |
| | | | | | AA113160, BF529848, AI160508, BF764174, |
| | | | | | BF752908, AA053148, AW842671, F32117, |
| | | | | | AI190107, BF752929, BE547478, AA977756, |
| | | | | | AA360528, AA022454, BF808843, BF813892, |
| | | | | | AI917965, BG011699, BG012316, BF373193, |
| | | | | | BG122581, AA622680, BF688484, BE772558, |
| | | | | | AA053706, AA733114, BG012318, AW880294, |
| | | | | | AA482098, BE256450, BE831281, BF765811, |
| | | | | | BF803085, BE243388, AA774840, AA576098, |
| | | | | | BE831236, BE772816, AF024631.2, BC007198.1, |
| | | | | | BC009285.1, AF096303.1, U73627.1, AF061779.1, |
| | | | | | AC004923.2, AF238378.3, AC000385.1. |
| H6EEC72 | 13 | 889401 | 1-1479 | 15-1493 | BF034355, BF034892, BE792423, BF338898, |
| | | | | | BG105853, BE390915, BE613966, AA449897, |
| | | | | | BE389478, AW857371, AW861388, BE891738, |
| | | | | | R71843, BF983885, BF739366, AI688525, |
| | | | | | BF591064, AI589048, AI933344, BE387873, |
| | | | | | AI660119, AI950422, BF830644, AA250941, W68171, |
| | | | | | BE613313, BE389218, AA699649, BE612723, |
| | | | | | AI553767, BG178871, BE966158, AW965656, |
| | | | | | AI807258, AW606086, W67712, N34048, |
| | | | | | AA789094, AI160489, AA953906, AA029513, AI798377, |
| | | | | | AA961141, AI191879, AI277742, BF757878, |
| | | | | | AI341511, BF941471, T79588, W39291, BF843992, |
| | | | | | BF761673, BE552032, AW938641, AI684229, |
| | | | | | AI829091, AI696662, H79702, AI803066, AI423727, |
| | | | | | AW081674, AW014236, AW582288, BE675078, |
| | | | | | AI760447, BE042621, AA250965, AI991516, |
| | | | | | AW438983, AW205754, AI658602, AW594379, |
| | | | | | AA449841, BF926493, AI955308, AI917867, |
| | | | | | BF063286, AA029448, AI933496, AA350855, |
| | | | | | R71793, AW578255, BE829073, BE828899, |
| | | | | | AB014591.1, AL133647.1, AF180474.1, AF211967.1. |
| H6EEU40 | 14 | 757048 | 1-937 | 15-951 | AL534759, AL521087, AL523775, AL518427, |
| | | | | | AL518354, AL517326, BE741563, BF569745, |
| | | | | | BF337372, BF570471, BF969174, BG032740, |
| | | | | | AL536265, BF026597, BE274743, BE546314, |
| | | | | | AL522079, BE538554, AW960892, BE395781, |
| | | | | | BE465235, BG167967, BE275462, AI160737, |
| | | | | | BF804270, BE538514, AA653290, BG163271, |
| | | | | | AI341701, W94467, AW084148, AI634272, |
| | | | | | AI634641, AI266283, AI366893, AW409760, |
| | | | | | AW075307, BF223869, AA604286, AI262840, |
| | | | | | AA479733, AI985719, W94359, AI271832, |
| | | | | | AW439127, AI740653, AI500535, AI674680, |
| | | | | | AW245294, BF032823, BE350203, AI869835, |
| | | | | | R85540, BF437722, AI394604, AA825592, |
| | | | | | AW469385, R60570, AI620873, AW470050, |
| | | | | | AA788601, BE300983, R72347, N77923, AA939017, |
| | | | | | R72299, R87968, R85120, Z41206, |
| | | | | | T16501, AA482633, H40664, AA297447, AA081389, R85549, |
| | | | | | AA558602, AW175922, AA987713, AI628307, |
| | | | | | AI199953, BG056252, AI382799, AA968853, |
| | | | | | AA148651, AI289139, AI281228, AA298765, |
| | | | | | F09249, W94940, AI282067, AI262509, AI200241, |
| | | | | | AV735503, AI921784, AI628244, T32046, |
| | | | | | AA302912, AI417848, AI468747, AW055372, |
| | | | | | AA857797, AA244103, AI581120, AA679586, |
| | | | | | AI634273, AA694158, AA946762, AA608791, |
| | | | | | AI124016, H46898, W46963, AA584396, |
| | | | | | AI797302, AL518355, AL523776, H27881, AL518428, |
| | | | | | H84434, N99004, AI540357, D31570, |
| | | | | | BF765616, AA132303, AA814926, BE812370, AW404688, |
| | | | | | AL532367, AL534760, AA887999, AL530884, |
| | | | | | AL526404, BE937700, R46056, AL517327, |
| | | | | | AL536266, R40219, AW468110, H24286, |
| | | | | | AA522908, AI567331, H26975, T81176, AW369400, |
| | | | | | T80775, AI952287, AW797699, BE782422, |
| | | | | | AA872110, BE613072, AW269694, BE870596, |
| | | | | | AA490287, AI336931, BE937686, BE741460, |
| | | | | | BE937697, AI910098, AI583322, BE962616, |
| | | | | | BE932414, AL533205, AI905196, AL521088, |
| | | | | | AA479862, AK000120.1, AL096714.1, BC007519.1. |
| HACAB68 | 15 | 584773 | 1-1286 | 15-1300 | BF967733, BF340072, AW058572, BE877116, |
| | | | | | BF029667, BE221318, BE042897, BF434234, |
| | | | | | BE966145, BF593609, AW966641, BE549675, |
| | | | | | AI692588, BF433926, W68167, AW674743, |
| | | | | | W67708, BG163487, AI802057, AW051536, |
| | | | | | AW005086, BE073104, AU145008, AI634647, |
| | | | | | AI743810, N51396, BE218196, AI857811, |
| | | | | | AI816124, AI802067, AI095027, BE503637, BF669349, |
| | | | | | AI925492, BE669954, AI813855, AI811403, |
| | | | | | BG236435, AA833834, BE073105, AA748470, |
| | | | | | AW975666, BE502705, N56917, AI146547, |
| | | | | | AI949209, AI492350, AI190896, BE219670, AI167132, |
| | | | | | AW013890, AI089941, AI810922, AI804940, |
| | | | | | AI689151, BF699838, AW873589, AA209320, |
| | | | | | N62725, AI420094, AI221693, BF130415, |
| | | | | | AI301467, AA808217, AW511885, BE073003, |
| | | | | | AW166094, AA019916, AI359094, BE073109, |
| | | | | | AI753256, AW675323, BF671156, AA258518, |
| | | | | | AA954483, AA324329, BF668455, F13496, |
| | | | | | AA281446, BF247796, AA487161, BF029971, |
| | | | | | AA730575, AA121642, AI123192, R49582, |
| | | | | | AI887042, AA487312, AA364288, AA385769, |
| | | | | | AW440846, R60975, AW451535, AA972339, |
| | | | | | AI091153, T74984, R36295, AW118180, R75731, |
| | | | | | BE003024, AI459209, BG055090, AW895451, |
| | | | | | H80344, AI984894, AA581815, BF877111, |
| | | | | | AW805837, BE000523, D57701, T03076, |
| | | | | | AI767454, F10499, Z40296, R43580, AA081798, R49916, |
| | | | | | BE928534, Z43703, AA493265, AA526871, |
| | | | | | AU118452, AI144481, BE540542, AL442081.1, |
| | | | | | AL354793.11, AK001029.1, AF189009.1, AB015344.1, |
| | | | | | AF293385.1. |
| HACBJ56 | 16 | 847112 | 1-874 | 15-888 | AA157001, BE348653, AW027639, AA534339, |
| | | | | | AW001883, AA363258, AW959379, T71037, |
| | | | | | AW953765, BE048583, BF878388, T67200, |
| | | | | | AW393348, AW393350, AW384705, AW386713, |
| | | | | | AA156760, AW055343, BF892732, BE140594. |
| HADMB15 | 17 | 847116 | 1-316 | 15-330 | AW136268, BG056888, AI131328, AI174443, |
| | | | | | AI091646, AW117296, AW168872, AI082447, |
| | | | | | AI432175, AI290911, AI741489, AI682685, |
| | | | | | AI142536, BG059892, AW149659, AW071935, |
| | | | | | AA233541, AI183690, BG056462, AI689641, |
| | | | | | AA599916, BF196591, BF196843, AA199743, |
| | | | | | AW136277, N77910, AA564806, AA243035, |
| | | | | | AA779709, AV722133, AI032138, AA844525, |
| | | | | | AI467910, AW965361, AA852418, AI982751, |
| | | | | | AI282445, AI982761, T03902, AI420648, |
| | | | | | AW167499, H08108, BE328548, AW068986, |
| | | | | | C15651, D52660, AW665899, AI246702, AI538705, |
| | | | | | AI271662, AI435112, AI288692, BE466948, |
| | | | | | AI690048, D55112, AA779042, AL536118, D53747, |
| | | | | | D54101, AA486941, D53384, W07076, |
| | | | | | AA232504, AA486765, BF832290, AI038647, AW497637, |
| | | | | | BF947006, AU155428, T05461, AL136582.1, |
| | | | | | BC001207.1, AB040527.1, AB058762.1, AB040528.1, |
| | | | | | AB040529.1. |
| HAGFS57 | 18 | 847120 | 1-860 | 15-874 | BF893958, AL079477, BE221875, AL532698, |
| | | | | | AI299412, R51649, AL040440, AA339493, F12505, |
| | | | | | F05649, Z43527, F06606, R12847, |
| | | | | | BF690787, R25251, T74335, AW382934, AB020663.1. |
| HAGHN57 | 19 | 773286 | 1-2426 | 15-2440 | AL533248, AU118622, AU119331, AU133909, |
| | | | | | AU119469, AU118182, BE794468, BE791529, |
| | | | | | BG176702, BE280450, BE729801, BF663566, |
| | | | | | BF970116, BE257176, BG032912, AL516224, |
| | | | | | BG121097, BE784191, BG249033, BE727671, |
| | | | | | BE881192, BE745390, BF792305, BF037862, |
| | | | | | AV710149, BE617085, AV751361, AW291174, |
| | | | | | BG163346, AI686123, BG033409, AV762315, |
| | | | | | AV704873, BE540243, BF344980, AV707943, |
| | | | | | BF671351, BE394881, AW070780, BE538770, |
| | | | | | BF303671, BE541947, AW963773, BF303913, |
| | | | | | AW299817, BE378370, AW299807, BF107096, |
| | | | | | AW515893, AI338838, BE254836, AW402330, |
| | | | | | AA455894, AI436127, AL516223, BF001973, |
| | | | | | AI392820, W31025, W28207, BE535313, |
| | | | | | BE258523, BF109189, AA182513, BE617702, |
| | | | | | AW275883, AW674662, BG169977, BE711218, |
| | | | | | AA134574, AW304388, AA588768, BE868534, |
| | | | | | AU144819, AA455892, BF802948, BF222585, |
| | | | | | AW902162, H16095, AI034153, AU145137, |
| | | | | | AI905391, AI985354, BG011776, AW612879, |
| | | | | | BE711276, AV659416, AU150558, BE702340, |
| | | | | | BF055535, BE711244, AA652292, AW271981, |
| | | | | | AA780056, AI624858, AA319693, AA604113, |
| | | | | | AV744893, AW771218, AV742941, AA837954, |
| | | | | | T60588, AA150957, AA151047, AI991761, |
| | | | | | AI912891, AI628783, AI434787, AW072744, |
| | | | | | AA716130, BF807693, AA181782, AI554969, |
| | | | | | AA916968, AA101864, AI473865, AA362607, |
| | | | | | AW338509, AI525459, BE244147, AI928082, |
| | | | | | AI433249, BF062859, AI910904, AA285264, |
| | | | | | BE711295, AI354885, AW006732, AI950274, |
| | | | | | AU144122, AI990867, AI922170, AA115829, |
| | | | | | AA806393, BE672240, AU156842, BE243206, |
| | | | | | AI633602, W01852, BE711219, AI280611, |
| | | | | | AA707161, AA301320, BF197637, AI695111, |
| | | | | | AW966603, BF447153, F29695, BE378061, |
| | | | | | AA336840, AI424341, AA385049, AI307649, N58884, |
| | | | | | AA131117, AI205138, BF431130, BF807685, |
| | | | | | N98771, AA602492, BE711204, BF438567, F34557, |
| | | | | | AA748737, T60437, AA745028, AW891490, |
| | | | | | AW673414, AI630237, AW378199, AW779341, |
| | | | | | BE172988, BE172375, AA101187, AA781579, |
| | | | | | AI478435, BE699167, R57333, AI927982, R92570, |
| | | | | | BE764834, BF818234, AA648053, BE464290, |
| | | | | | AK000994.1, AC004668.1, AL050216.1, AA227675. |
| HAJAA47 | 20 | 534670 | 1-1223 | 15-1237 | BF991208, BF743765, AW021917, T74524, |
| | | | | | T57767, AI491765, N22058, AA904275, AA228349, |
| | | | | | AI689019, AA054085, AU131834, BE256101, |
| | | | | | AW270771, AL119691, AI284543, AU118852, |
| | | | | | BE062478, AI859946, BF769528, AW873261, |
| | | | | | AW152178, AC009318.11, AL161656.20, |
| | | | | | AC011811.42, AC018462.4, AL023799.5, AC012170.6, |
| | | | | | AL137796.6, AP000704.2, AL499628.1, |
| | | | | | AC007934.7, AC005082.3, AC006111.3, AP001711.1, |
| | | | | | U91323.1, AC002407.1, AL031680.20, |
| | | | | | AL356244.12, AL391280.15, AC008526.5, AE006639.1, |
| | | | | | AC009131.6, AL132987.4, AP000103.1, |
| | | | | | AL158207.15, AL049540.11, AC013434.8, AP000269.1, |
| | | | | | AC008755.6, AC008592.4, AL355336.15, |
| | | | | | AK024933.1, AC090518.2, AE006640.1, AP000212.1, |
| | | | | | AL133211.9, AC008924.5, AL035422.12, |
| | | | | | AP000280.2, AC011471.6, AC018719.4, AC005200.1, |
| | | | | | AC005000.2, AC017079.5, AC004858.2, |
| | | | | | AL133163.2, AC011472.7, AC009488.5, AF045555.1, |
| | | | | | AC009756.9, AC007546.5, Z98044.13, |
| | | | | | AP000107.1, AC008267.6, AC005520.2, Z98050.1, |
| | | | | | AL121933.15, AC002994.2, AC009137.6, |
| | | | | | AL133174.15, U47924.1, AP000031.1, AP000354.1, |
| | | | | | AC011224.8, AL162430.15, AC008450.5, |
| | | | | | AL021154.1, AC011449.6, AP000039.1, AC000025.2, |
| | | | | | AC004526.1, AP000355.1, AL356057.12, |
| | | | | | AL137798.8, AC012085.4, AC004383.1, AC004998.2, |
| | | | | | AL049713.20, AC005077.5, AC011485.6, |
| | | | | | AC004253.1, AL449209.2, AP000065.1, AP000134.1, |
| | | | | | AC008521.5, AP000446.5, AC004477.1, |
| | | | | | AC022173.7, AL356915.19, AL031432.1, AC026172.3, |
| | | | | | AP001727.1, AL139415.10, AC012351.3, |
| | | | | | AC011442.5, AC009412.6, AC005920.1, AL157858.5, |
| | | | | | AC010271.6, AC010636.6, AL513550.9, |
| | | | | | AL009183.10, AC020983.7, AL109811.39, AL109797.18, |
| | | | | | AL022237.1, AC069262.24, AC024078.4, |
| | | | | | AC004232.1, AC007371.16, AL157882.5, AC011470.5, |
| | | | | | AC008753.8, AL590762.1, AC005484.2, |
| | | | | | AF109907.1, AC009155.3, AC004882.2, AL109827.8, |
| | | | | | AC011452.6, AL121891.22, AL109804.41, |
| | | | | | AC011465.4, U63721.1, AL357515.26, AL512347.14, |
| | | | | | AC008738.6, Z81364.1, AC025280.4, |
| | | | | | AL138878.10, AL050308.9, AL117380.28, AP000471.2, |
| | | | | | AC002487.1, AL161659.17, AC008764.7, |
| | | | | | AC005480.3, AC005841.3, AC003070.1, AL022163.1, |
| | | | | | AJ224877.1, Z93017.6, AC005220.1, |
| | | | | | AC004821.3, AC005755.1, AC005944.1, AC010319.7, |
| | | | | | AF157623.1, AJ012824.1, AL353701.15, |
| | | | | | AL135783.6, AL359236.4, AL122020.5, AL133264.10, |
| | | | | | AC007366.4, AP001714.1, AL352979.4, |
| | | | | | U62293.1, AC003959.1, AL359092.14, AC008403.6, |
| | | | | | AC004968.1, AC011475.6, AC008747.5, |
| | | | | | AC005409.1, AC027644.9, AC020916.7, AL139353.3, |
| | | | | | AP001752.1, AL160397.17, AL022312.7, |
| | | | | | AC005231.2, AC020904.6, AC018663.3, AC010170.3, |
| | | | | | AL356378.17, AL137073.13, AC005288.1, |
| | | | | | AL049872.3, AL133405.17, AC008249.14, AC002389.1, |
| | | | | | AC002492.1, AL139405.11, AL136126.34, |
| | | | | | AL009179.1, AC073517.5, AC007057.3, AC013356.8, |
| | | | | | AL137852.15, AL138707.10, AL049775.2, |
| | | | | | AL135744.4, AC011816.17, AL135752.6, AC007345.5, |
| | | | | | AC073073.2, AL034402.9, AL160175.5, |
| | | | | | AJ277546.2, AC020552.4, AC011742.3, AL353777.18, |
| | | | | | AC008805.7, AL139317.5, AC002301.1, |
| | | | | | AC010458.5, AC009965.9, AP001719.1, Z98200.8, |
| | | | | | AC007163.3, AP000167.1, AP000052.1, |
| | | | | | AC072052.6, Y15994.1, AC002430.1, AL021940.1, |
| | | | | | Z98752.16. |
| HAJAY92 | 21 | 845601 | 1-2331 | 15-2345 | AI208943. |
| HAJBV67 | 22 | 866415 | 1-2522 | 15-2536 | BG252656, BF732416, AV713753, BE905485, |
| | | | | | BF062374, BF445098, BF110352, BG252894, |
| | | | | | BE620095, BG249923, BE867752, AW606977, |
| | | | | | BG171028, AW576585, BE868698, BF671587, |
| | | | | | AW860769, BF941584, BF986308, AW305358, |
| | | | | | BF037687, BE541890, AW958924, AW974216, |
| | | | | | BF105260, AL048954, BF434917, AA057428, |
| | | | | | AW860733, BF664978, AI040432, BF984881, |
| | | | | | BF114918, BE872774, BE349491, AW263003, |
| | | | | | BF697715, BF382321, BE938703, AI378631, |
| | | | | | BF447674, AA446149, AA044378, BG114831, |
| | | | | | BF815345, BF085497, BF815237, BF210190, |
| | | | | | AA579908, BF132467, AA437015, AW860753, |
| | | | | | AI741531, AI742016, AI963805, AV748930, |
| | | | | | AA457625, BF815346, N31845, AI927889, |
| | | | | | BF699623, AA587067, AA831367, AI038411, |
| | | | | | AA442844, AI382172, BF084350, AW993684, |
| | | | | | AW407667, BF029928, AW028681, BE327066, |
| | | | | | BF887305, AV695738, BE222425, AV696527, |
| | | | | | BF755168, BE876090, BE167030, AI768063, |
| | | | | | BE000825, H12700, AV708152, AW001069, |
| | | | | | H03274, BF063098, BE933732, BF815719, BF594797, |
| | | | | | AW974217, N93209, N23944, AI290752, |
| | | | | | BF802746, AA557778, AA604449, Z32781, BE004621, |
| | | | | | AA910221, AA226865, R78864, BF326913, |
| | | | | | BG179582, AI370350, BE719765, BE768063, |
| | | | | | BE932712, AA780882, T31498, AW798498, |
| | | | | | AI635435, BF088211, BF817478, Z28655, BF943308, |
| | | | | | Z24930, BE932705, BF126152, AI015125, |
| | | | | | BF981166, AI684725, T36185, H12701, R37535, |
| | | | | | AW952059, AI689130, AA296931, AW798657, |
| | | | | | AW364905, R79351, H03275, BE768230, |
| | | | | | AW206046, AA081583, AA936681, BG104571, |
| | | | | | BE176285, AW993023, W69607, R31681, |
| | | | | | AI479514, BE696398, AA716370, BE463676, |
| | | | | | AW366456, BE869217, BF064127, BF001446, |
| | | | | | AW884802, AW999085, BG104993, AI039088, |
| | | | | | R31723, AW366514, BE871677, AI241206, |
| | | | | | AI743907, AA306185, BF037794, D61175, |
| | | | | | AA852523, AW365573, BF799275, AA129989, |
| | | | | | BF985004, AW838470, BF802748, R36687, |
| | | | | | BE001097, AA723997, BE932064, AW366145, |
| | | | | | BF230069, AW999007, AW993306, BF733961, |
| | | | | | AA508532, AW972441, AW972636, BE932056, |
| | | | | | BE086739, AA164808, BE064535, BF986296, |
| | | | | | BF095055, AW408116, BE184804, BE184805, |
| | | | | | BE184738, BE695142, BE184803, BE172976, |
| | | | | | BE184743, BF984676, BE184732, BF741954, |
| | | | | | AI366900, AW082623, AW118518, AI698391, |
| | | | | | BF871314, AI954504, BF753053, AI679312, |
| | | | | | BE967260, BF207979, AL515195, AW050850, |
| | | | | | AW089844, AW151136, AL515191, BE965599, |
| | | | | | AI619607, AI687568, AI540674, AI345688, |
| | | | | | AL513817, AI590043, BG032036, AA806028, |
| | | | | | AL043168, AA329665, AI923989, AI670002, |
| | | | | | AA641818, AI866770, AI679321, AI591420, |
| | | | | | AI473451, AI445165, AW051088, BF812961, |
| | | | | | AL514093, AI521560, AI633125, AL514871, |
| | | | | | AI915291, AW152182, AI247082, AI582932, |
| | | | | | AI889189, AI587121, BE875959, AA743012, |
| | | | | | BF814412, AW193894, AL515413, BF911554, |
| | | | | | AI918449, AF269150.1, AK027788.1, AK000756.1, |
| | | | | | AF116347.1, AK027438.1, AF160213.1, AF124819.1, |
| | | | | | BC009311.1, BC001967.1, AB048975.1, |
| | | | | | AL137478.1, BC002733.1, AB056421.1, AL133560.1, |
| | | | | | AK027129.1, U42766.1, AL08118.1, |
| | | | | | BC001969.1, AK026927.1, U38847.1, AB047878.1, |
| | | | | | AK025857.1, BC004264.1, BC004899.1, |
| | | | | | AL137529.1, AK000323.1, BC005858.1, M92439.1, |
| | | | | | AL122100.1, BC006458.1, BC001964.1, |
| | | | | | AL353956.1, AL137557.1, AF132676.1, AL133640.1, |
| | | | | | AF061836.1, AL137533.1, AK027164.1, |
| | | | | | AJ406939.1, AL049430.1, AB056427.1, AK027173.1, |
| | | | | | BC007571.1, BC003122.1, AL136784.1, |
| | | | | | AF245044.1, BC001215.1, BC004324.1, AF252872.1, |
| | | | | | AL389935.1, AL136752.1, BC003410.1, |
| | | | | | AL137560.1, BC008037.1, AL137555.1, AK026649.1, |
| | | | | | AL136767.1, AK000206.1, BC003658.1, |
| | | | | | AK026057.1, BC008284.1, AL136786.1, AL110225.1, |
| | | | | | AL133623.1, AF078844.1, AF353396.1, |
| | | | | | AB050407.1, AL049938.1, BC007391.1, AF090903.1, |
| | | | | | AL136747.1, AL050138.1, AL137550.1, |
| | | | | | D83032.1, BC007053.1, AL512704.1, AK027113.1, |
| | | | | | AK024588.1, BC001774.1, AL137258.1, |
| | | | | | AL390184.1, AK000310.1, AL096744.1, BC006136.1, |
| | | | | | AB060914.1, Y16645.1, BC003619.1, |
| | | | | | BC008781.1, AL389939.1, AF028823.2, AL110196.1, |
| | | | | | AK025435.1, AB046642.1, AB050431.1, |
| | | | | | AK024944.1, AK000414.1, BC000054.1, AB052191.1, |
| | | | | | AL117435.1, AL110218.1, AK026534.1, |
| | | | | | BC008780.1, AL136622.1, AL049283.1, BC002697.1, |
| | | | | | AF069506.1, AF141289.1, BC004958.1, |
| | | | | | AB063079.1, BC003548.1, BC001056.1, AK025113.1, |
| | | | | | AJ010277.1, S76508.1, AK000160.1, |
| | | | | | U72621.3, AK026857.1, AK027096.1, BC003614.1, |
| | | | | | AL137271.1, AL137459.1, AB063088.1, |
| | | | | | S77771.1, AF036268.1, BC004556.1, AL157433.1, |
| | | | | | AK024622.1, AB049852.1, BC004292.1, |
| | | | | | AK027082.1, AK026749.1, AB063093.1, AB044547.1, |
| | | | | | BC008078.1, AL110224.1, BC009294.1, |
| | | | | | BC001082.1, AK027111.1, AL157482.1, AL122104.1, |
| | | | | | AB050410.1, BC000714.1, AB063087.1, |
| | | | | | AL080140.1 AL442082.1 AL137488.1 AF056191.1, AK025465.1, |
| | | | | | AL122050.1, AL133606.1, |
| | | | | | AL136882.1, AL133559.1, AC008250.23, BC000725.1, |
| | | | | | AK027116.1, AK026547.1, AK027121.1, |
| | | | | | BC007456.1, AF232009.1, AB055352.1, AB056420.1, |
| | | | | | AL136644.1, BC006525.1, AK025312.1, |
| | | | | | AL133016.1, AL080074.1, AL512765.1, AL359620.1, |
| | | | | | BC001844.1, AY026527.1, AL050172.1, |
| | | | | | BC007499.1, AK026462.1, AL117635.1, AK027114.1, |
| | | | | | BC003104.1, AL050277.1, BC006091.1, |
| | | | | | BC008899.1, AB060879.1, AK026959.1, AK000083.1, |
| | | | | | AK027160.1, AK000618.1, BC007420.1, |
| | | | | | AL133568.1, AL050393.1, AF227198.1, AK000653.1, |
| | | | | | AL049347.1, AL162002.1, AL137480.1, |
| | | | | | AL162079.1, AB062942.1, AL390154.1, AB060897.1, |
| | | | | | AL110296.1, AL136893.1, AL080148.1, |
| | | | | | AL122121.1, AL133112.1, AK026593.1, AB049892.1, |
| | | | | | AL122110.1, AK026542.1, AF100781.1, |
| | | | | | BC005825.1, AK024992.1, AK026894.1, AL512684.1, |
| | | | | | X83544.1, BC004290.1, AK026541.1, |
| | | | | | AF183393.1, AL512746.1, AB051158.1, AF106697.1, |
| | | | | | AB063071.1, AK000421.1, BC003590.1, |
| | | | | | AK000257.1, AB060917.1, AF090900.1, BC007680.1, |
| | | | | | AK027188.1, AL023657.1, AL137292.1, |
| | | | | | AL133637.1, AL049324.1, S78453.1, BC008416.1, |
| | | | | | BC008836.1, AJ299431.1, AB047941.1, |
| | | | | | BC007460.1, AK026613.1, U55017.1, X67688.1, |
| | | | | | BC004336.1, AL390139.1, AL110221.1, |
| | | | | | AF262032.1, BC003602.1, BC002476.1, AL110222.1, |
| | | | | | AL137521.1, BC006181.1, AL137479.1, |
| | | | | | BC006807.1. |
| HATCD80 | 23 | 826098 | 1-1795 | 15-1809 | AW936395, AA382841, BF380111. |
| HATEH20 | 24 | 836056 | 1-836 | 15-850 | AW978851, AI686323, AI767653, AV747166, |
| | | | | | AA829515, BF512171, AA034240, AA053933, |
| | | | | | AA737691, AA533167, AW261869, AA835698, |
| | | | | | AA447216, AI623248, W92607, AA835700, |
| | | | | | Z21891, AA599963, AW893940, W95232, |
| | | | | | T20153, T20152, R57454, AC006207.5, AB020865.1. |
| HBAGD86 | 25 | 838799 | 1-1699 | 15-1713 | AI658681, BE466145, AI806836, AI653272, |
| | | | | | AA004211, BE302094, BF970406, BE018485, |
| | | | | | AA418617, AA594901, AI580148, BF589715, |
| | | | | | AI804211, AI669907, AI342168, AI810310, |
| | | | | | AA506350, AW022528, H10330, AA721162, |
| | | | | | AA452114, W03931, AW953290, AI262137, R61309, |
| | | | | | AA680147, N62384, H10331, AI264925, |
| | | | | | AA765972, BF086698, AW275301, AA485210, C15277, |
| | | | | | N79353, AA350799, AI867727, AI474438, |
| | | | | | AI129224, AA093047, D60782, AI535847, AA897480, |
| | | | | | AA350798, AV714899, AW956763, AV728867. |
| HBGBC29 | 26 | 691473 | 1-1842 | 15-1856 | BF223021, BF036281, AI341667, AA180986, |
| | | | | | AU153625, AU151704, AI093197, BE855464, |
| | | | | | BE018834, BE616741, BF684563, AI694268, |
| | | | | | AA031711, AI469856, N63041, N50125, AI150599, |
| | | | | | AI597740, AI985206, AI671591, W72535, |
| | | | | | BF431270, AI741942, AA037642, AA180865, |
| | | | | | AA031648, AA436065, AI800796, AA129939, |
| | | | | | BF056140, AW002265, AU157670, AI074205, |
| | | | | | AA830493, BF063800, AI056532, AI656721, |
| | | | | | W00519, AI275143, AI337739, AW172525, |
| | | | | | AA443349, AA043021, AA446926, AI655558, |
| | | | | | AI769027, AA101851, AA917703, W93307, |
| | | | | | AA526333, AI689128, AA777090, AW002829, |
| | | | | | BE295568, AW139517, AI128702, AI276137, |
| | | | | | AW801873, AA873711, AW892754, N98234, |
| | | | | | W76109, AI631104, AA856832, W92810, AA042939, |
| | | | | | H87505, AA129938, AI688779, AA693329, |
| | | | | | AI676108, T87624, AA570072, AA037641, AI186390, |
| | | | | | AW515672, AA031685, AA037500, R82703, |
| | | | | | AA037234, AW380430, AA985191, AU131994, |
| | | | | | BE302396, H87506, AA938640, AI926907, |
| | | | | | AU118291, AI696069, T74071, AA102060, AW057528, |
| | | | | | AI671894, AI962374, AI695458, AA046964, |
| | | | | | BE869607, BF814627, F12449, AA725452, AI968837, |
| | | | | | AA917824, AA054749, BF437316, F10070, |
| | | | | | AA917678, BE218382, BE669660, AI916503, |
| | | | | | AW612381, AA683581, AI984598, AA937814, |
| | | | | | AI932475, AA046963, AA053281, AI801723, |
| | | | | | BE858841, AI499751, AA031686, AI074981, |
| | | | | | AI341558, AI478279, BF735972, AK001006.1, |
| | | | | | BC004523.1, AF020920.1, AF038662.1, AB024436.1, |
| | | | | | AF022367.1. |
| HBGNC72 | 27 | 892131 | 1-788 | 15-802 | AL526130, AL524570, AW003889, AI935768, |
| | | | | | AW440485, AI936267, AA713525, AW272919, |
| | | | | | AI796977, AI951842, AW014081, AI760160, |
| | | | | | BF941209, AI263194, BF475772, AA496533, |
| | | | | | AW514179, AA724851, AA496454, AI799782, |
| | | | | | BF589971, AA496526, BE646016, BE563432, |
| | | | | | H41355, AW264331, AA515579, AI582716, |
| | | | | | AI581108, AI208124, AA927044, AI695535, |
| | | | | | AI638313, BG170255, AI147521, AA199585, |
| | | | | | AW264237, AW248758, AB033019.1. |
| HBHAA05 | 28 | 603174 | 1-676 | 15-690 | AI572680, AW631267, BF970107, AA632355, |
| | | | | | AI433952, AI753969, AA629668, AA493546, |
| | | | | | AU158457, BF589864, AL044966, AW518882, |
| | | | | | AI570067, AI828721, BF028225, M77888, |
| | | | | | AI884404, AI547110, BF724416, AI434103, |
| | | | | | AV683406, AW836225, BE391183, N55076, |
| | | | | | AA610644, AV731938, AA313025, AA748071, |
| | | | | | AV743067, AI065031, AW148964, AI280566, |
| | | | | | AI732690, AA601376, AI311796, AI268465, |
| | | | | | T03928, AU158814, AW504667, AW880986, |
| | | | | | AI819419, AA018258, AA524800, AW971342, |
| | | | | | AI791659, AW020612, AV759022, AV712092, |
| | | | | | AA935827, AA773560, AA425283, AI376687, |
| | | | | | AA493245, AA847341, BF942991, BF944618, |
| | | | | | AW303052, AI174703, BE392753, BG034698, |
| | | | | | BG223498, BE152006, AI683079, AA826166, |
| | | | | | AI590404, AI285651, AC004531.1, AL049780.4, |
| | | | | | AC006013.3, AC005971.5, AC005522.2, |
| | | | | | AL138713.11, AC011445.6, AC008403.6, AP001725.1, |
| | | | | | AC010458.5, AC009412.6, AP001726.1, |
| | | | | | AP001715.1, AL022323.7, AC008569.6, AL138976.5, |
| | | | | | AC005015.2, AC005081.3, AL022316.2, |
| | | | | | AC008738.6, AL590762.1, AL445222.9, AC004967.3, |
| | | | | | AC004991.1, AC020552.4, AP001716.1, |
| | | | | | AL109965.34, AC006211.1, AC011514.3, AC011485.6, |
| | | | | | AJ003147.1, AC018755.3, AC011510.7, |
| | | | | | AC006057.5, AC016995.4, AL353692.14, AC006334.3, |
| | | | | | Z97054.1, AC006449.19, AC005940.3, |
| | | | | | AC004383.1, AL034422.24, AC087071.2, AL133229.40, |
| | | | | | AL079342.17, AC004051.1, AL359397.3, |
| | | | | | AC018719.4, AP001712.1, AP001724.1, AC020716.3, |
| | | | | | AC073316.6, AC024561.4, AC010422.7, |
| | | | | | AC009488.5, AC020908.6, AC000353.27, AL513366.11, |
| | | | | | AC006487.8, AC020906.6, AC008066.4, |
| | | | | | AL354735.14, AC006530.4, U95742.1, AL162426.20, |
| | | | | | AC007731.14, AP000289.1, AL389925.10, |
| | | | | | AC005500.2, AC002527.1, AP000042.1, AP000110.1, |
| | | | | | AF001549.1, AL135905.6, AC007637.9, |
| | | | | | AL161732.7, AC067941.7, Z98941.1, AC032011.14, |
| | | | | | AP000688.1, AC005377.2, AL050335.32, |
| | | | | | AC090937.1, AC007256.5, AF053356.1, AC079602.15, |
| | | | | | AC008623.4, AL163032.3, AC011490.7, |
| | | | | | AC006040.3, AC004821.3, AC007216.2, AC005881.3, |
| | | | | | AL133545.10, AC008891.7, AL109825.23, |
| | | | | | AL138756.23, AL355102.5, AC004703.1, AF312032.1, |
| | | | | | AL445664.14, AL354696.11, AC005529.7, |
| | | | | | AC005077.5, AL158207.15, AF168787.1, AC003982.1, |
| | | | | | AC013449.8, AC021019.5, AC005914.1, |
| | | | | | AC004032.7, AL158052.10, AL353752.6, AB003151.1, |
| | | | | | AC005052.2, AC005291.1, AC004867.5, |
| | | | | | AL023583.25, AC020931.5, AC008752.6, AL023693.25, |
| | | | | | AC004887.2, AL078639.5, AL031651.33, |
| | | | | | AC005098.2, AC008551.5, AL136304.10, AL023807.6, |
| | | | | | AL356756.4, AC005921.3, AC005874.3, |
| | | | | | AF134471.1, AP001714.1, AC004906.3, AP001748.1, |
| | | | | | AC004166.12, AC020744.4, AL031118.21, |
| | | | | | AL139109.14, AC011895.4, AC006312.8, AL049537.48, |
| | | | | | AC007374.6, AP001630.1, AC007383.4, |
| | | | | | AC010616.5, AL109797.18, AC006970.6, AC005399.19, |
| | | | | | AC018711.4, AL020997.1, AC087311.22, |
| | | | | | AC005632.2, AC005578.1, AC018462.4, AC004522.1, |
| | | | | | AF243527.1, AC010605.4, AP000563.1, |
| | | | | | AC026464.6, AP003476.2, AC006511.5, AC004796.2, |
| | | | | | AC004000.1, AL356113.8, AC011005.7, |
| | | | | | AP001711.1, AC008857.5, AL138885.21, AC010319.7, |
| | | | | | AC073347.3, AC002472.6, U52112.1, |
| | | | | | AP000211.1, AP000133.1, AC009131.6, AC074121.16, |
| | | | | | AC004263.1, AL449223.7, AJ400877.1, |
| | | | | | AL161670.4, AC008812.7, AL445071.14, AL117336.22, |
| | | | | | AC007298.17, AL139343.9, AF207550.1, |
| | | | | | AL359092.14, AC004963.2, AL096840.25, AC012170.6, |
| | | | | | AC025593.5, AC022384.4, AL035089.21, |
| | | | | | AC008969.5, AL355512.22, AP001646.4, AC073542.4, |
| | | | | | AL359382.23, AC011495.6, AC005562.1, |
| | | | | | AC002565.1, AL034449.1, AL034549.19, AC008892.5, |
| | | | | | Z98200.8, AC005102.1, AC012450.9, |
| | | | | | AC006538.1, AL445483.13, AL354720.14, AC069285.8, |
| | | | | | AL034548.25, AC002432.1, AC008982.5, |
| | | | | | AC025166.7, AC005618.1, AL109804.41, AC012085.4, |
| | | | | | AC008481.7, AC020913.6, AC022432.4, |
| | | | | | AC005520.2, AC005627.2, AL021395.16, AL117380.28, |
| | | | | | AC008543.7, AL158824.11, AL109935.39, |
| | | | | | AL161802.15. |
| HBHAA81 | 29 | 846465 | 1-1633 | 15-1647 | AL138080, AL138081, BG056111, AW117532, |
| | | | | | AI885223, BF724275, AW051808, AI332809, |
| | | | | | AI564820, N63569, AW207494, AI866785, |
| | | | | | AW148811, AI954565, AI199326, AI199105, N38888, |
| | | | | | AI243422, H09138, AI986175, AW381536, |
| | | | | | Z25110, AI991904, Z18300, F31192, Z28916, |
| | | | | | AW381528, Z41646, AI954371, N38887, |
| | | | | | AI033629, Z28784, AW381480, N94825, F25740, F00372, |
| | | | | | AW380848, F16581, AW381481, AA197180, |
| | | | | | AW104762, BF887537, AB042554.1, AB032999.1, |
| | | | | | AC006059.3. |
| HBIAC29 | 30 | 831751 | 1-1768 | 15-1782 | BE792362, AU119261, AU117435, AU135719, |
| | | | | | AL522995, AL523062, AV725708, BG257393, |
| | | | | | AI033807, AL524959, BG258772, BE005784, |
| | | | | | BF105898, AW157169, AV695633, AI707987, |
| | | | | | BF965323, BF794704, BG112387, AA877792, |
| | | | | | AV697750, AU145651, BE268042, AA001404, |
| | | | | | AI401215, BE568337, AI812036, AW161740, |
| | | | | | AA428415, AW182986, AI275437, AW160483, |
| | | | | | AA678033, AI051135, N40528, AI864046, |
| | | | | | AI292230, BF670616, AA586803, BE564896, |
| | | | | | AW294845, AA134820, BF245314, AA768585, |
| | | | | | BF680744, AI816108, AW163143, BF219379, |
| | | | | | AW161133, AA506157, AA492248, AI298933, |
| | | | | | AA594861, AA013286, BE673778, AI421629, |
| | | | | | AA018334, AA905534, AI684501, AA427401, |
| | | | | | AA082812, BE768733, AA287601, AW157614, |
| | | | | | BE768540, D79434, BF946436, AI658777, |
| | | | | | BF541249, AV696430, AA287752, H98178, BF540910, |
| | | | | | D79454, D79495, AA018335, AV692094, |
| | | | | | R11115, H98502, BE768718, D79471, BE768713, |
| | | | | | AV692366, AV694591, AA808656, BE768500, |
| | | | | | D62307, R84940, AA037183, AA804276, D79442, |
| | | | | | AA284650, T93079, N46576, D62351, |
| | | | | | D62288, AV696341, AW440057, D62360, AW163531, |
| | | | | | AI057422, D79425, R11059, AA359531, |
| | | | | | AU156237, W27841, AA013043, AA323139, BF219327, |
| | | | | | AI991658, D79500, AW613472, BE768582, |
| | | | | | D61951, T93170, AL524958, BE544935, D62369, |
| | | | | | AV657638, D62200, AI702248, BF948281, |
| | | | | | AA134819, D62264, D79447, AV656951, D79470, |
| | | | | | BE043970, D62243, AA934540, N67412, |
| | | | | | AW118285, AA483825, D62298, AI911842, AI033466, |
| | | | | | R31032, X93846, D79508, AI371542, |
| | | | | | R31522, D79465, AW590942, AW466905, AA180979, |
| | | | | | AA059251, AI689493, AW661808, AW006273, |
| | | | | | D63025, AW449881, AI866210, AA059003, |
| | | | | | N71916, AA381297, AW873906, AW590669, |
| | | | | | N55843, D79405, AW169134, BE390691, AA585262, |
| | | | | | AI754249, BE389098, AA059266, AI459286, |
| | | | | | AI991649, N84299, AI655153, BE548704, |
| | | | | | AW016856, AI400471, AI400469, BF218780, |
| | | | | | AY007166.1, AL034379.8, AK021792.1. |
| HBJAB02 | 31 | 837309 | 1-1679 | 15-1693 | AL529646, AL529645, BE898304, BG112747, |
| | | | | | BF791411, BG036058, BE392384, BE621757, |
| | | | | | BE548173, BE895853, BG034671, AA808894, |
| | | | | | BE901085, BE278873, AW152607, BE795658, |
| | | | | | AW166898, BG122141, BE782474, BF972826, |
| | | | | | BE793716, BE140314, AW750993, AA826362, |
| | | | | | AW517942, BE714673, T59668, BE731030, |
| | | | | | BF939314, BE732766, BE745104, AI290469, |
| | | | | | BF477770, AI805651, AI961329, AA581089, |
| | | | | | BE902575, AW197375, AA974066, AI950259, |
| | | | | | BF802171, W27729, AV693783, AA877530, |
| | | | | | AA715365, AI968889, AA885542, AA160748, |
| | | | | | AA386371, AA335719, BF873961, W73105, |
| | | | | | BF223151, BE740826, AL120854, BE548914, |
| | | | | | AA318192, AA501478, BF125073, AI948815, |
| | | | | | AA581100, AA658457, AI621069, T59802, |
| | | | | | AA468534, AA503715, BF850755, AW956069, |
| | | | | | AW841506, AI144504, AA352215, BE897964, |
| | | | | | BF883404, BF373009, BE090290, BE168997, |
| | | | | | AW855521, AW820855, BG230749, BF376598, |
| | | | | | BE622839, AV699089, AV647789, AI567702, |
| | | | | | AV726156, AW961037, AW411235, AV726058, |
| | | | | | AW020397, AV706279, AV702427, AV651955, |
| | | | | | AV702026, BE393551, AV727787, AV660608, |
| | | | | | AV687176, AW021717, AV698545, AV687909, |
| | | | | | AV709256, AV708438, AV656903, AV661704, |
| | | | | | AV696106, AV697196, AW409775, AW951263, |
| | | | | | AV689111, AV655280, AV728157, AV692345, |
| | | | | | AV659322, AV654908, AV656478, AV708893, |
| | | | | | AV709314, AV708381, AV660728, BG168549, |
| | | | | | AV659536, AV691080, AV706219, AV695545, |
| | | | | | AV652001, AV705159, AV648263, AV703169, |
| | | | | | AV728518, AV707541, AW952409, AV709660, |
| | | | | | AV726624, AV706854, AV729220, AV709604, |
| | | | | | AV687035, AV696866, AV728997, AV704955, |
| | | | | | AV726816, AV725920, AV652156, AV701707, |
| | | | | | AV656283, AV704234, AV708025, AV707933, |
| | | | | | AV684604, AV729378, AV708980, AV692691, |
| | | | | | AV701914, AV708723, AV702516, AV693523, |
| | | | | | AV709407, AV705693, AV708992, AV729263, |
| | | | | | AV726103, AV708704, AV727029, AV726520, |
| | | | | | AV728733, AV725826, AV702021, AV725134, |
| | | | | | AV705280, AV645906, AV683415, AW265004, |
| | | | | | AW964228, BE047925, AV705076, AV707792, |
| | | | | | AV729259, AA127565, AW022102, AV686064, |
| | | | | | AV701067, AV704124, BC000131.1, AK000069.1, |
| | | | | | AC015651.18, AF147378.1, AK027463.1, AF097996.1, |
| | | | | | AF217986.1, AF217994.1, BC000090.1, |
| | | | | | BC003658.1, BC008282.1, AL356376.9, S71381.1, |
| | | | | | AK026494.1, BC006378.1, BC004362.1, |
| | | | | | AL137283.1, AK000212.1, AY026527.1, Y08991.1, |
| | | | | | BC007199.1, AF218004.1. |
| HBJAC40 | 32 | 841235 | 1-1753 | 15-1767 | BF345048, AW958511, BF530417, BF975837, |
| | | | | | BE253816, BG250686, BE887472, BF527935, |
| | | | | | BE263703, BE909332, BF527878, BE881895, |
| | | | | | BF194837, BF972454, AW025541, AL048612, |
| | | | | | BF525861, AI859062, BF835934, AI199762, |
| | | | | | BF955165, AI052782, H12219, BF955173, AW015231, |
| | | | | | BE379375, AI681619, BF364391, AI379848, |
| | | | | | AI363268, BF740272, AA703554, R60286, BF955168, |
| | | | | | R52740, BE258881, AA448130, R90880, |
| | | | | | W46453, BF090044, R25794, R22673, R52690, H08245, |
| | | | | | H08001, AA447988, AA912056, AI245669, |
| | | | | | R36729, AI290546, H07130, M78974, BE179040, |
| | | | | | T77037, AA070715, H08144, R58852, |
| | | | | | H38448, Z44633, H49103, W46520, R09542, R85342, |
| | | | | | AI879032, AI590525, R43378, R90851, |
| | | | | | T31004, R67310, F13258, BE164925, AA364956, F08103, |
| | | | | | T32340, BE907755, Z40495, C03430, |
| | | | | | BF884758, R85671, T35911, T30880, F28188, BF115735, |
| | | | | | AW161049, AW072139, BF820428, R60889, |
| | | | | | R60792, AA694126, AI086328, BF961135, AI272235, |
| | | | | | BE258962, AI363035, F04345, R46793, |
| | | | | | AA095937, BF952087, F10861, H06622, BF841177, |
| | | | | | BF925698, AA401578, BF820431, BF945162, |
| | | | | | BF772214, AA095307, R54673, BE677392, |
| | | | | | AW027215, AI360330, AF072812, T16940, |
| | | | | | AL035745, R09655, BF945153, BE081049, BE179106, |
| | | | | | AA382430, W23297, AW162615, AA946598, |
| | | | | | AI017807, AI220189, AW002147, R85343, H41244, |
| | | | | | BF527814, AI863690, AA394215, AW961330, |
| | | | | | AV652536, AV652547, AW963011, AV654689, |
| | | | | | AW954779, AW958365, AW954506, AV708498, |
| | | | | | AW957970, AW950179, AW963847, AV709494, |
| | | | | | AV725063, AV706850, AV725970, AF131218.1, |
| | | | | | BC002882.1, AL136698.1, AF195661.1, |
| | | | | | BC007604.1. |
| HBJCR46 | 33 | 815649 | 1-3194 | 15-3208 | BF980168, BF001800, BF221545, BE180558, |
| | | | | | BG117357, BG165887, BE747286, BE867206, |
| | | | | | BE559905, BF029089, BE884542, BE180560, |
| | | | | | BE882087, BF672818, BE180608, BG255311, |
| | | | | | BF695020, AI765879, AV701340, AI832097, |
| | | | | | AV701354, BG164080, BE568492, BF979546, |
| | | | | | BE268392, BE180559, AI927915, AI675415, |
| | | | | | BF195785, BF662916, BE673547, AI086866, |
| | | | | | AI956035, BF671543, AU146956, AA479515, |
| | | | | | BF063974, W19888, AW992096, BE504075, |
| | | | | | AW069858, AW992159, AA626631, BE019647, |
| | | | | | BE221636, AA479513, BF575729, AU144777, |
| | | | | | AA973047, AA936602, BF671187, BE545703, |
| | | | | | AV701112, AU144811, AU160319, AI472144, |
| | | | | | AI263407, BE019684, AU118130, AW614133, |
| | | | | | AI954073, AI767153, BF445898, AW087744, |
| | | | | | AI913738, BE397963, AI628089, AI675273, |
| | | | | | AA447852, AI635143, AW129685, AI287605, |
| | | | | | AA486193, W00613, AW135604, AI754985, |
| | | | | | AI334344, BF062454, AW119185, AW576204, |
| | | | | | BE041839, N54388, BF354864, AI275063, |
| | | | | | BE175440, AA883965, AI554276, AI082201, BE718001, |
| | | | | | AW771023, AI274243, AW337565, AA150018, |
| | | | | | BE175441, AW771580, AA447700, AW052155, |
| | | | | | AW771203, AA085991, AA085621, AI954014, |
| | | | | | AW068250, BF725222, AA486299, BF087209, |
| | | | | | BF834780, AA971016, AW854246, AA150083, |
| | | | | | H08089, BF735392, BE180609, AV683146, |
| | | | | | AA677738, AI220075, AV701437, AA740363, |
| | | | | | AA909807, H71626, R61225, N49411, AV689665, |
| | | | | | C05160, AA888983, AI026772, AV692963, |
| | | | | | AW580238, AI816858, AA340276, BE180555, |
| | | | | | AW862217, R61226, H82142, AW068158, |
| | | | | | H08090, BF997557, AW862230, AI565387, AI824475, |
| | | | | | T32511, BE169765, BE002988, AI004624, |
| | | | | | AW514293, AA775740, T31977, AI660017, AA347780, |
| | | | | | N63302, AW468684, AA908821, AA953180, |
| | | | | | AA897589, AI217393, AI536640, AA337664, |
| | | | | | BF364138, BE816022, AA652646, Z19403, |
| | | | | | C04239, H71627, AA347779, R14260, AW168255, |
| | | | | | BF833756, Z42097, AV655482, AI431630, |
| | | | | | BE088874, BF348891, H82048, AA130053, AA781872, |
| | | | | | BE544862, Z28501, AI434730, BF575085, |
| | | | | | AA328725, BF084834, R96217, AU155530, Z38367, |
| | | | | | AA301061, AA370106, AI810366, AW836437, |
| | | | | | AA371349, AI991790, H54404, AW015692, |
| | | | | | Z42140, AI905103, AW242449, BF327421, |
| | | | | | AI824674, AW195816, BE173133, BF812520, R86231, |
| | | | | | AI274472, H54488, AW379997, BF476783, |
| | | | | | D62662, AA382472, AW379945, AL079373, |
| | | | | | AA703490, AW381290, BF328480, AW392784, |
| | | | | | AI823416, BF961200, BF910517, BE728262, |
| | | | | | BE408949, BE277648, AA458950, BF797287, |
| | | | | | BE866243, AA923063, Z24943, AA236098, |
| | | | | | BE160734, AA397692, C02287, BF812876, |
| | | | | | BF444939, AF150734.1, AL136738.1, AK000984.1, |
| | | | | | AF124434.1, AL033531.10, AL031287.3, AL033532.36, |
| | | | | | Z97876.1, AC007034.4, AL035304.1. |
| HBJDW56 | 34 | 520401 | 1-623 | 15-637 | AC005532.1, AL031319.5, AL354933.8. |
| HBJEL16 | 35 | 847030 | 1-736 | 15-750 | AI279501, BE867835, AL528252, AA569392, |
| | | | | | AW856935, AA071326, AA587712, AA258409, |
| | | | | | AI341817, BE898008, BE696253, AW576885, |
| | | | | | AA837880, AW576895, AI584147, AL525748, |
| | | | | | AW383278, AA071368, BF330803, AW383120, |
| | | | | | AI393286, AL513864, C00710, AW857093, |
| | | | | | AA644480, AL528253, AW499908, BF326342, |
| | | | | | AW749039, BF771813, AA193585, AW383268, |
| | | | | | BG031591, AL040224, AW383242, BE904616, |
| | | | | | AW751656, AW383266, AW383144, R15553, |
| | | | | | AW383205, AW383131, BF931485, AA258753, |
| | | | | | AW383275, AW383146, AW886371, AW997055, |
| | | | | | AW996855, BE929916, BE005368, AA188924, |
| | | | | | BF350669, BF327032, Z99943.1, BC007881.1, |
| | | | | | AL035308.1, AF087020.1, AL035302.1, AF092425.1, |
| | | | | | AF095727.1, AF092424.1, AF239756.1. |
| HBJKD16 | 36 | 853358 | 1-1615 | 15-1629 | BG259133, BG258754, BE895955, BE535182, |
| | | | | | AU119776, BE296370, AW361272, AA205862, |
| | | | | | BE079707, AI743764, BF669591, BF102652, |
| | | | | | AA768863, AA767455, AA683506, BF374311, |
| | | | | | W39021, AA583062, W94893, BE737722, |
| | | | | | AI128320, AA703242, AA402965, H12229, AA027163, |
| | | | | | AI338954, W92057, AA769377, AA811137, |
| | | | | | AW470052, AA027162, AV713020, AI680487, |
| | | | | | R19758, AA283191, AA531492, AI700367, |
| | | | | | BF946853, AW514119, AA644413, AI004120, |
| | | | | | AW876599, BE868122, AI831977, AI219655, |
| | | | | | AA197283, H17722, AA890197, N70828, AA164346, |
| | | | | | AV750338, BF791719, AA164345, AA767095, |
| | | | | | AA393969, AA765421, H17611, BF247968, |
| | | | | | AI254347, AA253013, AA534905, AA470446, |
| | | | | | AA182675, H12230, H43795, T32973, AW386765, |
| | | | | | AU146033, AA078964, R51414, AI269757, |
| | | | | | T33350, R45177, AI203452, Z44609, AI041094, |
| | | | | | AV749975, H43709, BF336945, AI268058, |
| | | | | | T30703, R85203, R51302, R51996, BE738484, W84649, |
| | | | | | R51995, AA824604, W01425, AA907096, |
| | | | | | BF801374, BE544754, AI469616, AU156273, |
| | | | | | AW297202, T83337, H14279, BE929477, |
| | | | | | AA252973, BE242053, T18899, AA248529, H14306, |
| | | | | | BE698663, T33352, BG059012, AA361817, |
| | | | | | AA236020, AA810717, BE243263, AA876139, |
| | | | | | BF240162, BF893858, BE217859, F13420, |
| | | | | | H53830, F08935, AA078866, AV727864, AA721692, |
| | | | | | Z40480, AI383780, H52715, H48241, |
| | | | | | AW751348, T83485, AI567913, AI247225, BE694869, |
| | | | | | BE940539, BE713625, BF858355, BF801742, |
| | | | | | BF824816, BE713728, BE713771, BE713469, |
| | | | | | AA463921, C01352, AW608887, BE714022, |
| | | | | | AW876620, AW876628, N89830, BE002346, |
| | | | | | AA192537, AA319174, BE714013, AV709029, |
| | | | | | AW991462, AI080442, BF993596, N57976, |
| | | | | | AA034034, BF799178, BF818732, AW392976, |
| | | | | | AW876544, BE568245, AW835734, AK000087.1, |
| | | | | | AK021899.1, AF217983.1, AC008074.3, AK024658.1. |
| HBMBM96 | 37 | 561935 | 1-1062 | 15-1076 | AI888795, AA047754, AI561027, BF676343, |
| | | | | | AA047704, AI187148, AA314069, AA536040, |
| | | | | | AW976024, AA704393, AI754653, BE973547, |
| | | | | | AV762633, BF857849, BE897079, AU144320, |
| | | | | | BF681619, AV757032, AW972919, AW819125, |
| | | | | | AW151824, AV763457, BF854308, AI306232, |
| | | | | | AI251576, AA904211, BF589788, AA812058, |
| | | | | | BE245576, AL042667, AL042670, AI521525, |
| | | | | | AI891080, AW961593, AI583466, AW274191, |
| | | | | | BE878926, AW020150, AI459904, T74524, |
| | | | | | AI280266, AI459943, AA653139, AW572721, |
| | | | | | F16345, AV729669, AA515728, BF805088, |
| | | | | | BE350953, AI601229, AA297802, AA747757, |
| | | | | | AA297145, AI926102, AA629540, AI436433, |
| | | | | | AI679221, AA084609, BF724838, AW270385, |
| | | | | | AA164955, H59737, BG029528, AI473995, |
| | | | | | AI340641, AW504667, AW969831, AA805049, |
| | | | | | AI858691, AI749893, H07953, AC000057.1, |
| | | | | | AC008891.7, AC011484.4, AC005920.1, AC005225.2, |
| | | | | | AC006011.2, AC006126.1, AC005837.1, |
| | | | | | AL031658.11, AL109825.23, AC005940.3, AC018828.3, |
| | | | | | AE000658.1, AC008481.7, AC022383.3, |
| | | | | | AC022425.6, AL109804.41, AL049766.14, AC022384.4, |
| | | | | | AC004089.25, AC002352.1, AC005015.2, |
| | | | | | AL512378.7, AC004797.1, Z93930.10, AC009756.9, |
| | | | | | AC008397.7, AP001711.1, AL035422.12, |
| | | | | | AL135838.5, AC005519.3, AC008403.6, AL109935.39, |
| | | | | | AC004878.2, AL590763.1, AC005696.1, |
| | | | | | AL159977.10, AP001725.1, AC009131.6, AL121983.13, |
| | | | | | AC005907.1, AC009060.7, AL353807.18, |
| | | | | | AF111169.2, AC005231.2, AL121972.17, AL049760.26, |
| | | | | | AL354932.26, AP000547.1, AC002425.1, |
| | | | | | AC005544.1, AC011442.5, AL031228.1, AC004526.1, |
| | | | | | AF243527.1, AC005081.3, AL035681.13, |
| | | | | | AC005291.1, AC009309.4, AC008440.8, AC032011.14, |
| | | | | | AL139113.21, AL139022.4, AF196972.1, |
| | | | | | AC004019.20, AC020550.4, AC003982.1, AC009077.7, |
| | | | | | AL034423.21, AL031311.1, AC000025.2, |
| | | | | | AC007664.12, Z93241.11, AC009032.7, AC005944.1, |
| | | | | | AC002039.1, AC003690.1, AC005756.1, |
| | | | | | AC011247.10, AF196779.1, AC008760.6, AC008265.15, |
| | | | | | AJ295844.1, AC004150.8, AL162426.20, |
| | | | | | Z99716.4, AC011472.7, AC011461.4, AC022392.4, |
| | | | | | AC005399.19, AL353194.13, AC011005.7, |
| | | | | | AC011895.4, AL391827.18, AC027319.5, AF168787.1, |
| | | | | | AC002470.17, U91326.1, AC021188.6, |
| | | | | | AC074013.5, AC011479.6, AC005098.2, AF228703.1, |
| | | | | | AC003104.1, AC006013.3, AC010422.7, |
| | | | | | AC008569.6, AL158830.17, AL118520.26, Z83845.14, |
| | | | | | AC024075.4, AC007536.9, AC073073.2, |
| | | | | | AL391803.14, AC005332.1, AL117348.25, AC008946.6, |
| | | | | | AC004686.1, AC018636.4, AC026172.3, |
| | | | | | AC010677.4, AC018720.5, AC006211.1, AC008745.6, |
| | | | | | AL445435.11, AC004383.1, U91321.1, |
| | | | | | AC004971.3, AC090514.1, AP003352.2, AF001549.1, |
| | | | | | AC007225.2, AL162615.13, AC010271.6, |
| | | | | | AC020906.6, AC010748.5, AL139396.17, AC020558.4, |
| | | | | | AC006121.1, AC011737.10, AL132838.4, |
| | | | | | AP001727.1, AC020934.7, AC011445.6, AL096701.14, |
| | | | | | AP000045.1, AF283321.1, AL031597.7, |
| | | | | | AL024508.1, AC091394.2, AC007690.11, AC019205.4, |
| | | | | | AP001747.1, AC022211.5, AC011495.6, |
| | | | | | AP000300.1, AC020913.6, AC002549.1, AC006536.2, |
| | | | | | AC005821.1, AC004893.1, AC087071.2, |
| | | | | | AC005529.7, AC009812.17, AC005071.2, AC006965.3, |
| | | | | | AL157938.22, AP000692.1, AP001728.1, |
| | | | | | AL445263.6, AC007957.36, AL139021.6, AP000347.1, |
| | | | | | AC009314.4, AL137792.11, U91322.1, |
| | | | | | AL022316.2, AC009506.5, AL359092.14, U95090.1, |
| | | | | | AL049869.6, AC090955.2, AC011467.7, |
| | | | | | AL139415.10, AC000360.35, AP002007.4, AC007055.3, |
| | | | | | AC023114.5, AC009086.5, AC007151.2, |
| | | | | | AL022476.2, AC004965.2, AC011497.6, AP000113.1, |
| | | | | | AC005052.2, AC004890.2, AC020904.6, |
| | | | | | AL356915.19, AL050341.18, AC006077.1, AF312032.1, |
| | | | | | AC008474.7, AC020916.7, AC008623.4, |
| | | | | | AC008962.8, AC008102.17, AL590762.1, AP000553.1, |
| | | | | | AC008551.5, AP001718.1, AL162272.10, |
| | | | | | AC006451.5, AC006023.2; AC004813.2, U91323.1, AP002851.2, |
| | | | | | AL008721.1, AP000117.1, |
| | | | | | AL365505.15, AL031721.1, AC004821.3, AL139785.5, |
| | | | | | AC005701.1, AC006441.13, AP000212.1, |
| | | | | | AP000134.1, AC034198.6, AC010618.7, AL049569.13, |
| | | | | | AL356257.14, AC018808.4, AL391136.9, |
| | | | | | AP000193.1, AC068724.7, AC004824.3, AL109628.5, |
| | | | | | AC005088.2, AL049757.14, AF288742.1, |
| | | | | | AC022436.5, AL132780.5, AC010319.7, AC074121.16, |
| | | | | | AL138849.12, AC004882.2, AP000050.1. |
| HBMUH74 | 39 | 866160 | 1-712 | 15-726 | AI633540, BE999936, AL529110, AI911597, |
| | | | | | AW016785, AA479308, AI381011, AI057451, |
| | | | | | AI283542, AI224172, AI025510, BF929951, |
| | | | | | AW589256, AU156824, AU155569, BF063133, |
| | | | | | R43074, R25758, BF818086, AL529111, |
| | | | | | BE567017, BE077233, H09061, AA479409, AL136843.1, |
| | | | | | AK001927.1, AK027756.1, AK001324.1, AC009318.11. |
| HBQAB79 | 40 | 810542 | 1-1317 | 15-1331 | BE926412, W27043, BG006701, AW500368, |
| | | | | | AB020689.1. |
| HBSAK32 | 41 | 856387 | 1-578 | 15-592 | AI740936, AI742064, AI832483, BE856354, |
| | | | | | W89126, AI741855, AA552666, AL525133, |
| | | | | | AW293469, AI032044, AI769344, AI199155, |
| | | | | | AL537059, AA769290, AA481420, AA425849, |
| | | | | | AA968823, R73406, AW290963, AA653956, |
| | | | | | AA481658, AA244354, BF477489, AI278115, |
| | | | | | BF664060, N92264, AI014386, N45235, |
| | | | | | AA723656, AI354229, BE041734, W24441, BE350121, |
| | | | | | BG109716, R73405, BF690465, AI675727, |
| | | | | | AL530882, AA570628, AA992527, AW089841, |
| | | | | | BE858139, C21531, AA029467, AA029534, |
| | | | | | AI951077, BG004006, AK026029.1, AL442086.1, |
| | | | | | AL161656.20. |
| HBXCX15 | 42 | 637542 | 1-1205 | 15-1219 | AA595781, AW277007, AI274544, AA548746, |
| | | | | | AC006329.5, AC009412.6. |
| HCDCY76 | 43 | 837972 | 1-1378 | 15-1392 | AI569872, AI384105, AI333327, AW015889, |
| | | | | | AI376057, AI422820, AI334381, AI358937, |
| | | | | | BE856323, AW135953, R26141, AA902950, |
| | | | | | AI092798, W23737, AW970455, AW382273, R26355, |
| | | | | | AW377602, AW377466, AW852110, BE695760, |
| | | | | | AI200091, BE695755, AW377603, AW377467, |
| | | | | | AW852111, BE695754, BE695766, BE695759, |
| | | | | | AA662446, AB054881.1, AB032417.1. |
| HCDDL48 | 44 | 839743 | 1-799 | 15-813 | C14389, AW975618, AW949645, AW964468, |
| | | | | | AV724520, C14331, AV718692, AV718707, D59502, |
| | | | | | AW966065, AW966075, C14429, AV718489, |
| | | | | | D59619, D80210, D80240, D80268, AV699550, |
| | | | | | AV723927, D80219, AV699746, AV720211, |
| | | | | | D80212, AW949642, AW966330, AW978634, |
| | | | | | AV719822, AV718844, AV719324, AV719468, |
| | | | | | AW966062, AV722801, C15076, D81030, |
| | | | | | AW966053, AW966389, D51423, D51799, |
| | | | | | D80253, AW177440, D80166, AW949653, AV720731, |
| | | | | | AV699447, D59467, D80195, D58283, |
| | | | | | AW949656, F13647, D80043, D80188, AW965185, |
| | | | | | AW965197, AW964737, D80391, AW973541, |
| | | | | | AV719783, AV718800, AV720464, AV718770, |
| | | | | | AV720203, AW966531, D80227, AW959628, |
| | | | | | AW959570, AW960553, AW949643, AV719557, |
| | | | | | D80022, AV699927, AV720791, D80193, |
| | | | | | D80196, AW949641, AW973447, AW975605, |
| | | | | | AW966013, AW975621, AW959799, AV719188, |
| | | | | | AW959582, D59927, AW949631, D80045, |
| | | | | | AV720878, AW966054, AV718633, AW978661, |
| | | | | | AW973488, AW960465, D80038, AW973307, |
| | | | | | AW973334, AV723097, AW966534, AV701357, |
| | | | | | AV718931, AA305409, D80366, AW949630, |
| | | | | | D59859, AW973474, AW966029, AV721386, |
| | | | | | AV718938, AW966041, AW949646, AW949658, |
| | | | | | AW966050, AW949618, AW962245, AW949655, |
| | | | | | AV718681, D59889, AV718440, AV720028, |
| | | | | | AW959597, AW965177, D57483, AW973485, |
| | | | | | AW966022, D59610, AW965163, D80164, |
| | | | | | AW966059, AV700889, AW978648, D59787, |
| | | | | | AV720812, AW975613, AW949629, D59275, |
| | | | | | AW965184, AW949657, AW973330, AW964756, |
| | | | | | AW753067, AW965175, AW959202, AW973482, |
| | | | | | AW958993, AW959136, D51060, D80269, |
| | | | | | D80024, D50979, AW965158, AW949632, T03269, |
| | | | | | AW965196, D80378, AW960454, AW960473, |
| | | | | | AW949654, AW958992, AV699682, D80241, |
| | | | | | AW959062, AW964477, AW956434, AW964488, |
| | | | | | AW962082, AV701004, AW964532, AW965176, |
| | | | | | D50995, C14014, AW966043, C75259, |
| | | | | | AW956397, AW966030, AW966032, AW960532, |
| | | | | | AW177501, AW949633, AW177511, AW753053, |
| | | | | | AW966023, AV718530, AV742048, C14407, |
| | | | | | AV742001, AV700229, AV738928, AV699669, |
| | | | | | AW960564, AV701335, D81026, AV742667, |
| | | | | | D51022, AW975623, AV701043, AV701332, |
| | | | | | AV719049, AV701017, AV701248, AV701431, |
| | | | | | AV701149, AW752082, AW959469, AV719628, |
| | | | | | AW960504, AV720150, Z21582, AV645389, |
| | | | | | AV645344, AV720533, AV720654, D80134, |
| | | | | | AW960570, AW378532, AW178893, AV701130, |
| | | | | | AV701419, AW352117, D58253, AV719913, |
| | | | | | AV701125, AV701166, AA305578, AW960414, |
| | | | | | AV744690, AV681510, AV681491, AW973465, |
| | | | | | AV699866, AW179328, D80949, AV699652, |
| | | | | | D80248, AV719000, AW960474, AW973490, |
| | | | | | AW973445, AW966368, AV703738, AV645343, |
| | | | | | AW973470, D80133, AV745080, AV701422, |
| | | | | | AV742732, D51250, AV701154, AV701428, |
| | | | | | AW960514, AV701443, AF271371.1, X67155.2, |
| | | | | | AF058696.1, D34614.1, AB028859.1, D88547.1, |
| | | | | | AB002449.1, U79457.1, D50010.1, AB038216.1. |
| HCE1G78 | 45 | 761204 | 1-1882 | 15-1896 | AW025289, AI935720, BG222525, AA724676, |
| | | | | | BF844613, BE707252, AW385203, AW580449, |
| | | | | | AW243018, BE932090, R15390, BF436472, |
| | | | | | BF351100, AW014134, AA074234, R18788, |
| | | | | | BF819553, BE162530, H14886, BF087139, |
| | | | | | AA772066, F35935, R42130, R40003, AI628487, |
| | | | | | BE169397, R13943, AI540418, BE167881, |
| | | | | | BF800299, BE142196, AI804744, BE931587, BE166493, |
| | | | | | AW890237, AL036574, AI675744, R88613, |
| | | | | | AW607153, BF082899, AW935303, U45975.1, |
| | | | | | AC005005.1. |
| HCE5F78 | 46 | 838101 | 1-1718 | 15-1732 | AC007318.4, AK025051.1. |
| HCEDR26 | 47 | 771144 | 1-1405 | 15-1419 | AW809560, BF822291, AW805745, T06675, |
| | | | | | T41328, AW809450, BF884442, BF773357, |
| | | | | | BF738231, BE163588, BF998055, H00095, |
| | | | | | BF900030, AA346118, AA644090, BF725844, |
| | | | | | BF725688, AI919265, AI801505, AW103406, |
| | | | | | AW855803, BF673854, AA833896, AW958962, |
| | | | | | AA630854, AI798521, AW855730, AV702109, |
| | | | | | AA833875, BF725884, AA513851, AW814024, |
| | | | | | AI537020, AW474825, AW243793, AW275432, |
| | | | | | AW970064, AC010326.6, AC010645.5, |
| | | | | | AC010522.3, AL353748.13, AC003006.1, AL136418.4, |
| | | | | | AL139054.1, AL356805.5, AP000501.1, |
| | | | | | AP001760.1, AC004840.3, AC007374.6, AL445184.11, |
| | | | | | AC018738.4, AC008264.10, AC018641.3, |
| | | | | | AC005102.1, AC007383.4, AC020908.6, AC011497.6, |
| | | | | | AP000338.2, AC004526.1, AC013356.8, |
| | | | | | AC011247.10, AL137072.8, AP000216.1, AC006011.2, |
| | | | | | AC020558.4, AL024498.12, U62293.1, |
| | | | | | AC004913.2, AC020983.7, AC002044.1, AL355343.18, |
| | | | | | AC022148.5, AL022316.2, AL354864.16, |
| | | | | | AL035400.13, AC005529.7, AL109797.18, AC004975.2, |
| | | | | | AC004895.2, AC002472.6, AP001132.4, |
| | | | | | AC005881.3, AF258547.1, AC002350.1, AL049776.3, |
| | | | | | AP002028.1, AC027130.5, AC002558.1, |
| | | | | | U91321.1, AC008891.7, AC008745.6, AC020913.6, |
| | | | | | AC004859.2, AF243527.1, AL589723.7, |
| | | | | | AL031311.1, AC010742.4, L44140.1, AC090950.1, |
| | | | | | AC026172.3, AL138741.13, AC003048.1, |
| | | | | | AL137012.6, AC008397.7, AL117352.12, AC005081.3, |
| | | | | | AL109801.13, AL109798.19, AF258545.2, |
| | | | | | AL163279.2, AL035587.5, AC010422.7, AC010789.9, |
| | | | | | AF045555.1, AC011480.3, AC004491.1, |
| | | | | | AC022217.5, AC011470.5, AP003357.2, AC007283.3, |
| | | | | | AP001711.1, AC005409.1, AC008812.7, |
| | | | | | AC008569.6, AF168787.1, AC005082.3, AL158207.15, |
| | | | | | AL118505.17, AL135927.14, AC007227.3, |
| | | | | | AC020917.4, Z98949.1, Y14768.1, AC009412.6, |
| | | | | | AL121992.24, AL117382.28, AC004156.1, |
| | | | | | AP001694.1, AC007051.3, Z82215.1, AC004796.2, |
| | | | | | AC073347.3, AC007664.12, AC016776.6, |
| | | | | | AC020916.7, AP000505.1, AC010328.4, AC004804.1, |
| | | | | | AC009269.6, AJ400877.1, AF111167.2, |
| | | | | | AC004167.1, AC007536.9, AC007216.2, AL365364.19, |
| | | | | | AP001052.1, AL139099.2, AF283320.1, |
| | | | | | AC009131.6, AL034420.16, AC004755.2, AC000052.16, |
| | | | | | AC003043.1, AL121891.22, AC002314.1, |
| | | | | | AC005920.1, AL159977.10, AD001527.1, AL021808.1, |
| | | | | | AC026464.6, AC005702.1, AL355476.12, |
| | | | | | AC011455.6, AC009244.24, Z85986.1, Z83844.5, |
| | | | | | AC004150.8, AL136980.5, AL158823.11, |
| | | | | | AL158040.13, AL133367.4, AP002392.3, AC000353.27, |
| | | | | | AC005899.1, AC011489.6, AL035086.12, |
| | | | | | AC005971.5, AL136087.12, AL445483.13, AL133387.8, |
| | | | | | AP001752.1, AC009220.10, AC008755.6, |
| | | | | | AC007993.15, AL138883.12, AL353804.22, AL031767.13, |
| | | | | | AC009314.4, AC006252.4, |
| | | | | | AC007666.12, AC019205.4, AL121886.22, AC010320.9, |
| | | | | | AC009753.5, AC005800.1, AC040160.4, |
| | | | | | AC004815.2, AL136179.15, AC008536.6, AL096841.6, |
| | | | | | AC008482.5, AC074142.3, AL109921.21, |
| | | | | | AC011442.5, AC006333.3, AL158830.17, AC003029.2, |
| | | | | | AC015982.9, AC012099.4, AL138733.15, |
| | | | | | AC005412.6, AC027319.5, AC016742.10, AL359092.14, |
| | | | | | AC012594.7, AL133294.10, AC011005.7, |
| | | | | | AC007919.18, AL449305.4, AP000744.4, AC005291.1, |
| | | | | | AC005011.2, AC005098.2, AC009068.10, |
| | | | | | AL356244.12, AL137230.3, AF235097.1, AL132768.15, |
| | | | | | Z93015.9, AP001718.1, AC004019.20, |
| | | | | | AP001720.1, AP001725.1, AC010378.6, AL132640.4, |
| | | | | | Z82901.1, AL139376.17, AP002852.3, |
| | | | | | U52111.2, AC002492.1, AC004253.1, AL355353.23, |
| | | | | | Z82190.1, AL008718.23, AL354932.26, |
| | | | | | AL031657.5, AL445237.16, AL133448.4, AC007225.2, |
| | | | | | AL353653.19, AC007390.3, AC008543.7, |
| | | | | | AC004738.1, AF288742.1, AC006211.1, AC007739.2, |
| | | | | | AL133545.10, AF111169.2, AL121601.13, |
| | | | | | AC008474.7, AC004882.2, AC002301.1. |
| HCEEQ25 | 48 | 531784 | 1-978 | 15-992 | AW444547, BF514399, AL534267, AI567447, |
| | | | | | BE747694, BG152517, AW298411, AW865264, |
| | | | | | AA807579, AA554958, BE889430, AA612578, |
| | | | | | BF798462, AI078409, AU157259, AI819391, |
| | | | | | AA643770, AU120121, H77386, AW438907, |
| | | | | | U78181.1, U78180.1, AC003687.1, AC073838.6, |
| | | | | | AL157823.9, AC008962.8, AC011005.7, AC002094.1, |
| | | | | | AC007220.4, AL136984.20, AC020750.3, |
| | | | | | AL031666.6, AL136110.17, AL161781.12, AC026191.3, |
| | | | | | AC020744.4, AL031672.13, AL162424.20, |
| | | | | | AC002425.1, AL022721.1, AL353665.13, Z75887.1, |
| | | | | | Y10196.1, AL139340.12, AL356257.14, |
| | | | | | AC021863.5, AC025464.4, AL353812.13, AC090954.1, |
| | | | | | AC009077.7, AC007956.5, AL117382.28, |
| | | | | | AC005789.1, AL049555.6, AL035086.12, AC008403.6, |
| | | | | | AP001754.1, AL035684.25, AC007204.1, |
| | | | | | AL021395.16, AC020552.4, AC022384.4, AC009137.6, |
| | | | | | AL157701.2, AC010530.7, AL139113.21, |
| | | | | | AC010605.4, AL137139.9, AC083866.2, AL035695.17, |
| | | | | | AC007021.3, AC079175.24, AC010412.7, |
| | | | | | AL021707.2, AL135927.14, AC007227.3, AC009497.3, |
| | | | | | AF109907.1, AC008651.7, AL035587.5, |
| | | | | | AL133259.24. |
| HCEEU18 | 49 | 688041 | 1-1215 | 15-1229 | AL045384, AL042668, AI525108, T85422, |
| | | | | | AL046089, BE843928, H08562, AA921935, AA815292, |
| | | | | | AW972431, F23282, BE794230, U91320.1, |
| | | | | | AC026400.3, AC008469.4, AB018295.1, AL117630.1, |
| | | | | | AC009032.7, AC003043.1, AC008745.6, AC007405.6, |
| | | | | | AC018648.5, AL354932.26, AC004867.5, |
| | | | | | AL117381.32, AC084865.2, AC004967.3, AC013429.12, |
| | | | | | AL121808.4, AC020754.4, AC005098.2, |
| | | | | | AC016395.4, AL050335.32, AC005088.2, AC020913.6, |
| | | | | | AF001548.1, AC004876.2, U91321.1, |
| | | | | | AF334404.1, AC005279.1, AL355392.7, AC011497.6, |
| | | | | | AL031658.11, AC008440.8, AC005412.6, |
| | | | | | AL445222.9, AC005231.2, AC005089.2, AC018711.4, |
| | | | | | AC019205.4, AC026191.3, AC011490.7, |
| | | | | | AL161626.20, AL109897.30, Z98051.6, AC011495.6, |
| | | | | | AL137792.11, AC009087.4, AL133215.16, |
| | | | | | AC010271.6, AL136305.14, AC004125.1, AC020915.6, |
| | | | | | AC007052.4, AC004815.2, AC006357.5, |
| | | | | | AC005944.1, AC004703.1, AC090955.2, AC004019.20, |
| | | | | | AC004813.2, AC011479.6, AF168787.1, |
| | | | | | AC012384.16, AC004797.1, AC011443.6, AC005052.2, |
| | | | | | AC007282.4, AL080243.21, AL031680.20, |
| | | | | | Z84469.1, AC006116.1, Z84466.1, AC007374.6, |
| | | | | | AP001717.1, AC007956.5, AL449305.4, |
| | | | | | AP003352.2, AC006014.2, AL034549.19, AC078962.30, |
| | | | | | AF030453.1, AC051619.7, AL049761.11, |
| | | | | | AC006454.3, AC005821.1, AL133551.13, AL157938.22, |
| | | | | | AL009181.1, AL133353.6, AL031670.6, |
| | | | | | AC005488.2, AC000025.2, AF205588.1, AC012076.4, |
| | | | | | AL355094.3, AC011455.6, AC020934.7, |
| | | | | | AL157372.18, AC087094.2, AC008397.7, AC083863.2, |
| | | | | | AC005527.3, AC022515.5, AC004966.2, |
| | | | | | AC009086.5, AC022384.4, AC005056.2, AL049795.20, |
| | | | | | AC004841.2, AL121825.19, AC002425.1, |
| | | | | | AL121900.26, AC055120.5, AP000687.2, AC021999.4, |
| | | | | | U80017.1, AC022392.4, AL132713.11, |
| | | | | | AC008403.6, AC018644.6, AC036103.8, AC020663.1, |
| | | | | | AC018719.4, AC027319.5, AL118505.17, |
| | | | | | AC002039.1. |
| HCEGG08 | 50 | 844506 | 1-2520 | 15-2534 | BF347820, BF340446, BE963976, AV706183, |
| | | | | | AV702427, AV728270, AV707783, AV706724, |
| | | | | | BE619195, BF436323, AV725927, AV706746, |
| | | | | | AV726505, AV658362, AV701611, AV704592, |
| | | | | | AV723449, AV730781, AV727932, AV732149, |
| | | | | | AV730288, AV704974, AV751921, AV659189, |
| | | | | | AV731313, AV752043, AV753374, AV731744, |
| | | | | | AV725369, AV731708, AA910649, AV702637, |
| | | | | | AV730547, AV761002, AV760693, AV731977, |
| | | | | | AV732002, AV731043, AV746276, AV731694, |
| | | | | | AV726674, AV730711, AV702798, AV662191, |
| | | | | | AV729983, AV731759, AV752443, AV751555, |
| | | | | | AV710938, AV731275, AV751573, AV732653, |
| | | | | | AV730171, AV701237, AV732353, AV730165, |
| | | | | | AV732155, AI815089, AV757088, AV710534, |
| | | | | | AV701320, AV730816, AV704916, AV731915, |
| | | | | | AV656240, AV707088, AV733303, AV756895, |
| | | | | | AV757887, AV705020, AV756053, AV755874, |
| | | | | | AV752447, AV758481, AV726067, AV705263, |
| | | | | | AV711496, AV711240, AV732089, AV710417, |
| | | | | | AV745906, AV711274, AV732746, AV702869, |
| | | | | | AV647654, AV728872, AV745415, AA701287, |
| | | | | | AV758003, AV706104, AV707117, AV727103, |
| | | | | | AV652156, AV758133, AV710825, AV711567, |
| | | | | | AV702409, AV763440, AV757553, AV710495, |
| | | | | | AV723452, AV761270, AV710375, AV728777, |
| | | | | | AV727189, AV702354, AV707171, AV729129, |
| | | | | | AV702498, AV714368, AV707686, AV763171, |
| | | | | | AV702787, AV755473, AV752684, AV709897, |
| | | | | | AV721645, AV710562, AV710906, AV746382, |
| | | | | | AV706357, AV707882, AV710935, AV687176, |
| | | | | | AV755714, H17354, AV725387, AV705234, |
| | | | | | AV705280, AV725386, AV706035, AV705047, |
| | | | | | AV757171, AV763669, AV727355, AI338026, |
| | | | | | AV704611, AV730778, AV709407, AV707685, |
| | | | | | AV704116, AV752993, AV732200, AV703012, |
| | | | | | AV730859, AV646736, AV724987, AA725780, |
| | | | | | AV702581, AV756386, AV757864, AV704924, |
| | | | | | AV701783, AV728715, AV703417, AV755335, |
| | | | | | AV701728, AV693117, AV757686, AV757281, |
| | | | | | AV702671, AV729357, AV702954, AV721318, |
| | | | | | AV728455, AV730456, AW295635, AV707589, |
| | | | | | AV709935, AV730866, AV707948, AV726520, |
| | | | | | AV758766, AV705662, AV697638, AV732255, |
| | | | | | AV706683, AV723195, AV709356, AV726624, |
| | | | | | AV745756, AV703591, AV708423, AA580304, |
| | | | | | AV755783, AA059396, AV726830, AV733811, |
| | | | | | AV645778, AV726738, AV652808, AV725281, |
| | | | | | AV706047, AV731653, AV729220, AV704279, |
| | | | | | AW304383, AV726480, AV706290, AV656004, |
| | | | | | AV725152, AV699148, AV702537, AI268730, |
| | | | | | AV702026, AV730018, AV722093, AV728844, |
| | | | | | AV706814, AV725568, AV705504, AV707798, |
| | | | | | AI761274, AV730449, AV707690, AV758022, |
| | | | | | AV710146, AV706889, AV706662, AV757671, |
| | | | | | AV737377, AV702958, AV652547, AV704981, |
| | | | | | AV705866, AV703232, AA442825, AV728289, |
| | | | | | AV731884, AV728249, AV701538, AV706234, |
| | | | | | AV731793, AV709025, AV703367, AV727576, |
| | | | | | AV706453, AV705343, AV757673, AV708809, |
| | | | | | AV706899, AV736429, AV721993, AV701560, |
| | | | | | AV701586, AV711413, AV701499, AV762873, |
| | | | | | AV701496, AV705416, AB051530.1, AJ244004.1, |
| | | | | | AJ244005.1, AJ244003.1, X12660.1, D78345.1, |
| | | | | | AJ244007.1, U94592.1, D50010.1, D13316.1, |
| | | | | | AB025273.1, AF144029.1, AJ276256.1, AJ276254.1, |
| | | | | | X87559.1, Z30183.1, X65235.1, Y14219.1, |
| | | | | | X82834.1, AJ244006.1, Z16423.1, AF144028.1, |
| | | | | | AJ276255.1, U45328.1, AB005666.1, R19887, |
| | | | | | R36218, R36219, R45109, R47916, R48022, R45109, |
| | | | | | R56735, R56889, R60948, R61616, |
| | | | | | R69372, R69373, H04883, H10768, H16569, H16611, H17326, |
| | | | | | H19244, H19243, H26851, H75829, |
| | | | | | H75830, N78459, W15236, W39643, AA099547, AA099546, |
| | | | | | AA133785, AA133786, AA135871, AA137176, |
| | | | | | AA464784, AA491517, H65400, AA902408, |
| | | | | | AA932084, AA938012, AA436997, AA488171, |
| | | | | | AA488225, AA897754, AA922133, AA972881, |
| | | | | | Z39481, Z42770, Z43409, Z43600, |
| | | | | | T16709, AA947105, F02239, F02924, F06672. |
| HCFLN88 | 51 | 610000 | 1-1420 | 15-1434 | AL526786, BE622815, BE746913, BG167566, |
| | | | | | BE612603, BE613343, BE543099, AW328570, |
| | | | | | AI084727, AW511229, BE879597, AA643500, |
| | | | | | AI090381, BE876617, AW055002, AI744096, |
| | | | | | AA714840, AI148138, AA598703, AW340721, |
| | | | | | BE559510, AI125728, AI830384, AU151986, |
| | | | | | AI885716, BF432640, AI475597, AW339888, |
| | | | | | AI377299, AI309247, AW005497, AW771450, |
| | | | | | BE622365, AI139390, AI422379, N95665, |
| | | | | | AI144110, BF341713, AI919264, AI475648, AI189926, |
| | | | | | BF809564, AI559248, BE396630, AI817016, |
| | | | | | AI640708, AA825735, AV662025, BF526593, |
| | | | | | AI708507, AA935563, AW939178, AW939138, |
| | | | | | AW939190, AA961207, N66071, N69365, |
| | | | | | AA603786, AW939128, AI285062, AI826293, |
| | | | | | AW951255, BF512843, AA620317, AW605529, |
| | | | | | N80991, AI285338, AW381729, BF956527, |
| | | | | | AI031873, AW381749, BG056758, AW371517, |
| | | | | | AW381756, R78288, AI434319, AI282698, |
| | | | | | AI343784, AW002119, AW169595, N48713, |
| | | | | | AW371499, AI537993, N26561, R52366, |
| | | | | | AI916353, R93746, BE828699, AA835499, AW072300, |
| | | | | | W70306, AA907306, AW748173, N68294, |
| | | | | | AI468129, BG032430, H89920, AI080137, AA326474, |
| | | | | | H69097, AA826574, AW303330, AI858652, |
| | | | | | AI804227, AA322294, AI342977, AA291513, N35677, |
| | | | | | AI824463, T86711, H49562, Z19236, |
| | | | | | AI500205, AW966976, AI187820, R78289, AL525884, |
| | | | | | W76006, BE828722, N81088, F37932, |
| | | | | | R31642, AA905077, AA922535, AA877249, BF957167, |
| | | | | | AA780926, BG055657, AW087260, AI202070, |
| | | | | | AW129497, AA911554, AA045568, R32359, |
| | | | | | AA204681, AA057054, AA364763, R63145, |
| | | | | | AI277392, AI886719, BE616036, AW238934, |
| | | | | | AI082383, BG164867, BG150873, BE548567, |
| | | | | | BG035187, N91393, BF957863, H69096, R88359, |
| | | | | | AW328569, BF743483, BF742356, BC001967.1, |
| | | | | | BC000956.2, AC005089.2, X89985.1, AJ223979.1. |
| HCHAB84 | 52 | 834326 | 1-1345 | 15-1359 | X84712, BF526942, BF036429, BF035689, |
| | | | | | BF034330, BE878646, BG117306, BE906856, |
| | | | | | BE871642, AV703538, AW955111, BE729985, |
| | | | | | BE958344, BE271782, BF698225, BE568321, |
| | | | | | BG250080, BF826293, BE156569, AW579884, |
| | | | | | BF977502, AA587630, BE621946, BF512422, |
| | | | | | BF695706, AV764128, AA448786, AI032411, |
| | | | | | AA477231, BF695587, AA641139, BE621432, |
| | | | | | H02682, H02590, H29948, AW972521, |
| | | | | | AA186733, BF909586, R22544, BE673152, AW405966, |
| | | | | | AI358557, R22543, BG169787, BF813006, |
| | | | | | BF742389, AW673871, AA327923, AW392393, |
| | | | | | AA311766, BF916201, BF742334, R70413, |
| | | | | | AV763358, AA505606, AA477230, AW794624, |
| | | | | | AW674083, AA595661, AA579044, AW265468, |
| | | | | | AA807704, AA642809, AW021674, AA618263, |
| | | | | | AA405570, BG180320, AA533066, AI702049, |
| | | | | | AI061313, AI254267, AA084439, AA491767, |
| | | | | | BG059139, AL042667, AL042670, AA187682, |
| | | | | | AV763460, BF131490, AA313025, AL121039, |
| | | | | | AA557945, AW148821, BF901147, AW402784, |
| | | | | | AA693484, AV758870, AW410844, AW873417, |
| | | | | | AA601376, AL119909, AI251024, AI444575, |
| | | | | | BF725761, AW963489, BF857486, AI141202, |
| | | | | | AA776665, AW069110, AA601290, AW469462, |
| | | | | | AW270385, AI572680, AW028376, BF817511, |
| | | | | | AA809116, BF739035, AI064968, AA640310, |
| | | | | | AA535216, AI679759, AI753113, BF030482, |
| | | | | | AA600863, AI185160, AW192930, AL138262, |
| | | | | | BG118544, AW675677, AW023390, AW672927, |
| | | | | | R67038, AI445699, AI312267, AA659832, |
| | | | | | AV647070, BF804385, AA610644, AI821901, |
| | | | | | AV764383, AW105463, BF770715, R83577, |
| | | | | | AU157209, AI039257, AA602906, AA809546, |
| | | | | | AW820105, AA502991, AV762112, AI252611, |
| | | | | | AI567676, AI476049, AA015948, AF126023.1, |
| | | | | | AF126024.1, BC005943.1, U02057.1, AC002492.1, |
| | | | | | AL365364.19, AP001760.1, Z68276.1, |
| | | | | | AC008649.6, AC007842.1, AL157823.9, AL162587.20, |
| | | | | | AF001711.1, AC021752.5, AC007405.6, |
| | | | | | AP000133.1, AP000211.1, AC090514.1, AC004922.2, |
| | | | | | AG013449.8, AL034451.26, AC008891.7, |
| | | | | | AC020659.5, AL139039.17, AF168787.1, AC010463.6, |
| | | | | | AC003102.1, AL139353.3, AC006261.1, |
| | | | | | AC009756.9, AC008946.6, AP000563.1, AC002310.1, |
| | | | | | AC008068.4, U47924.1, Z69719.1, |
| | | | | | AL050349.27, AC003048.1, AL359983.7, AC009412.6, |
| | | | | | AL391839.9, AL031846.2, AL121655.1, |
| | | | | | Z95324.2, AL389875.1, AC005207.1, AC020716.3, |
| | | | | | AC009137.6, AP000252.1, AC026172.3, |
| | | | | | AC006111.3, AP001692.1, AC007333.6, AC005821.1, |
| | | | | | AB038653.1, AL035684.25, AC005081.3, |
| | | | | | AC008745.6, AL136300.22, AC005902.7, AC073073.2, |
| | | | | | AL034418.5, AJ295844.1, AL139317.5, |
| | | | | | AC020904.6, AF139813.1, AC005519.3, AL445483.13, |
| | | | | | AP003357.2, AC087239.18, AL049869.6, |
| | | | | | AC020906.6, AC025280.4, L78810.1, AC008567.4, |
| | | | | | Z83844.5, AC008821.5, AC009220.10, |
| | | | | | AC073898.1, AC009311.3, AC004542.1, AC002306.1, |
| | | | | | AL031311.1, AC016683.7, AL158207.15, |
| | | | | | AC023105.7, AC006449.19, AL139100.9, AC016594.6, |
| | | | | | AL356805.5, AC008044.4, AL133517.11, |
| | | | | | AL133541.21, AC016763.8, AC002554.1, AL020993.1, |
| | | | | | AC008403.6, AC005355.1, AL121675.36, |
| | | | | | AL359695.6, AC005261.1, AL163032.3, AL513550.9, |
| | | | | | AP000511.1, AL589677.6, AC026464.6, |
| | | | | | AL096712.20, AC024561.4, AC011448.3, AL117348.25, |
| | | | | | AC010627.5, AC073657.5, AC005288.1, |
| | | | | | AC010271.6, AP001745.1, AL135783.6, AC090950.1, |
| | | | | | AF334404.1, AC007055.3, AC008771.4, |
| | | | | | L44140.1, AL031427.15, AC010319.7, AC007637.9, |
| | | | | | AL158158.14, AL035086.12, AL451125.7, |
| | | | | | AC018711.4, AC012085.4, AL135752.6, AC009247.12, |
| | | | | | Z84466.1, AF053356.1, AC008009.4, |
| | | | | | AC025165.27, AL133211.9, AL158830.17, AC002551.1, |
| | | | | | AL109984.14, AC002477.1, AL159168.15, |
| | | | | | AF205588.1, AC007383.4, AP000146.1, AC010491.3, |
| | | | | | AC006483.3, AE000658.1, AC004883.2, |
| | | | | | AC025264.16, AL133230.25, AC007390.3, AF042090.1, |
| | | | | | AL035455.30, AC005280.3, AC008897.7, |
| | | | | | AC069255.18, AC011495.6, AC005038.5, AC005914.1, |
| | | | | | AL136228.8, AP001709.1, AC022211.5, |
| | | | | | AL139113.21, Z97181.1, AL022323.7, AL137244.28, |
| | | | | | AE006462.1, Z98048.1, AL133453.3, |
| | | | | | AF111168.2, AC083884.6, AC010422.7, AP001630.1, |
| | | | | | AC010458.5, AL353716.18, AL109935.39, |
| | | | | | AL139316.5, Z94160.1, AC008857.5, AL157372.18, |
| | | | | | AP002007.4, AC005080.2, AC005412.6, |
| | | | | | AC008481.7, AC009123.6, AP000356.1, AL137787.11, |
| | | | | | AC004854.2, AL121886.22, AL133375.25, |
| | | | | | AC003684.1, AP002392.3, AL121594.6, AC027319.5, |
| | | | | | AC026185.3, AC005759.1, AC004263.1, |
| | | | | | AC020552.4, AC032011.14, AC004686.1, AL049636.22, |
| | | | | | AC007957.36, AJ243213.1, AL139343.9, |
| | | | | | AC091394.2, AL117381.32, AL163636.6, AC005527.3, |
| | | | | | AC008521.5, AP002427.3, AL354932.26, |
| | | | | | AC011891.3, AL138836.15, AC005529.7, AC004975.2, |
| | | | | | AL442166.1, AB023048.1, AC008555.5, |
| | | | | | AC011445.6, AC005781.1, AC080011.21, AL121712.27, |
| | | | | | AC020934.7, AC008372.6, AL031587.3, |
| | | | | | AL121601.13, AL133355.12, AC026445.4, Z84488.1, |
| | | | | | AL050347.1, AL161747.5, AP000744.4, |
| | | | | | AC083876.2, AL359236.4, AL133448.4, AL163284.2, |
| | | | | | AC008543.7, AC007255.4, AL096701.14, |
| | | | | | AC010203.13, AL157818.12, AL133312.3, AC005180.2, |
| | | | | | AC010620.4, AF038458.1, AC004659.1, |
| | | | | | AC007277.2, AC000353.27. |
| HCMSX51 | 53 | 788643 | 1-2239 | 15-2253 | AL520206, AL522291, AL520207, BG115714, |
| | | | | | BG023953, BF343959, AU133571, BE839880, |
| | | | | | AW954438, BE264316, BG261277, BE879757, |
| | | | | | AU131026, BE265959, BE278903, BF725639, |
| | | | | | AW246741, AA864833, AU148856, BF111640, |
| | | | | | AA706935, AA431813, N38742, BE857705, |
| | | | | | BF476344, AU152863, AU125122, AA480041, |
| | | | | | AW170367, AI094797, AU154528, N48379, |
| | | | | | BF913004, N26479, AI803158, AL120744, |
| | | | | | N35219, AW245159, AI089912, AI927351, N20323, |
| | | | | | AL046695, AA476664, N35530, AI078494, |
| | | | | | AA015687, AI016568, BE857202, AI587317, |
| | | | | | AA446620, AW629254, AI433184, AA548282, |
| | | | | | W03412, N27597, W00855, AA825427, AI128747, |
| | | | | | AI082265, H38927, BF970202, R48359, |
| | | | | | AI569253, N29410, N44883, AW014479, AA934555, |
| | | | | | N41471, AW974179, R15948, AA573084, |
| | | | | | AA233832, AA017058, W16680, AI312737, R60804, |
| | | | | | N67483, R15949, Z43237, BE811896, |
| | | | | | N45053, BE832888, T11764, Z43099, AA431409, R48260, |
| | | | | | AI933045, AW874096, AW105691, AA336676, |
| | | | | | AA044969, BF362640, AW893387, AW892550, |
| | | | | | AW892516, R60299, N35043, T49574, |
| | | | | | Z41630, AA013473, N35211, AA738419, AA223632, |
| | | | | | H86402, T49573, AA017209, BF941569, |
| | | | | | AA635071, AA054652, H86066, AI351292, F02575, |
| | | | | | N79527, T11765, T35773, AW993110, |
| | | | | | AW194575, BE893541, AA448030, AI086309, BF737533, |
| | | | | | AF001690.1, AF029231.1, U96629.1, AB007042.1, |
| | | | | | AB011091.1, T66574, T66575. |
| HCNCO11 | 54 | 775086 | 1-732 | 15-746 | BF926420, BF926408, BF875996, AV705104, |
| | | | | | AV726755, AW964429, AW950395, AV703435, |
| | | | | | AV707451, AV707628, AW961373, AV705453, |
| | | | | | AW964210, AW964423, AV704361, AW952896, |
| | | | | | AW961510, AV726887, AV729165, AW963643, |
| | | | | | AV707705, AW963965, AV707556, AV702814, |
| | | | | | AW963219, AV704916, AV706906, AV703045, |
| | | | | | AW950229, AV690921, AV704674, AV728297, |
| | | | | | AV702810, AW960535, AI557262, AW963644, |
| | | | | | AV708024, AV701594, AV727806, AV727803, |
| | | | | | AW957298, AV650843, AW957682, AV704283, |
| | | | | | AV708829, AV701751, AW950078, AW950079, |
| | | | | | AW949946, AW961329, AW954386, AW954962, |
| | | | | | AW957974, AW952228, AV725024, AW960663, |
| | | | | | AW957083, AW950256, AV649266, AV704144, |
| | | | | | AV703160, AW963857, AW966775, AW958568, |
| | | | | | AW964298, AW958569, AW966684, AW951998, |
| | | | | | AV704342, AV703361, AV704848, AV703833, |
| | | | | | AV703425, AV705771, AV653846, AV728884, |
| | | | | | AW960406, AW954104, AW945153, AV650865, |
| | | | | | AV705189, AW958320, AW958316, AV729457, |
| | | | | | AV728929, AV729285, AV726743, AW949454, |
| | | | | | AW953619, AW955397, AW949863, AV701787, |
| | | | | | AW945196, AV708035, AV702901, AW961052, |
| | | | | | AV701953, AW963108, AV729170, AW958127, |
| | | | | | AV703284, AV706964, AV728355, AW963612, |
| | | | | | D50992, AV703367, AV706742, AV703862, |
| | | | | | AV706047, AV709139, AV652860, AW955394, |
| | | | | | AV702749, AV708590, AV707020, AW951793, |
| | | | | | AW951816, AW967188, AV705481, AV706133, |
| | | | | | AV702435, AV702958, AW955616, AW954194, |
| | | | | | AW962970, AV726728, AV705420, AV726770, |
| | | | | | AV695489, AV691061, AW963234, AW955139, |
| | | | | | AV649942, AW962367, AW964203, AW954242, |
| | | | | | AW954413, AV727101, AV707189, AW966146, |
| | | | | | AW951740, AW960600, AW952132, AV703632, |
| | | | | | AW961431, AW964278, AW958290, AW959722, |
| | | | | | AV659467, AV706802, AV705998, AV709332, |
| | | | | | AV705516, AV728913, AV728341, AV709281, |
| | | | | | AW958045, AW950597, AV707266, AW950411, |
| | | | | | AW960545, AV705267, AV704712, AV704401, |
| | | | | | AV702819, AV702458, AV702187, AW965827, |
| | | | | | AV727386, AW949731, AV707117, AV702298, |
| | | | | | AV701626, AV727268, AV703465, AW954783, |
| | | | | | AW953992, AW963581, AW958104, AW950254, |
| | | | | | AV705154, AW962980, AW957286, AW962378, |
| | | | | | AW958093, AW963811, AW954221, AV727618, |
| | | | | | AW963652, AV652536, AW962929, AV704033, |
| | | | | | AW950520, AW952361, AV701614, AV705518, |
| | | | | | AV728428, AV729392, AV702035, AV709623, |
| | | | | | AV702315, AV703266, AV707197, AW945183, |
| | | | | | AV727756, AV707238, AV706910, AW961377, |
| | | | | | AW945164, AW950681, AV647033, AV647066, |
| | | | | | AV647129, AW957628, AW952419, AV707649, |
| | | | | | AW957779, AV647144, AV702975, D59751, |
| | | | | | AV650924, AV693604, AW960143, AW963486, |
| | | | | | AV704876, AV705321, AV652547, AV650877, |
| | | | | | AW955698, AV707907, AW956167, AW963667, |
| | | | | | AV703264, AW963401, AV653784, AV727589, |
| | | | | | AW963641, AW955697, AW955632, AW955629, |
| | | | | | AV728741, AW961403, AW949521, U94592.1, |
| | | | | | Z30183.1. |
| HCNSD29 | 55 | 862314 | 1-1714 | 15-1728 | AU130793, AA902780, BG114197, AA675900, |
| | | | | | BE548792, BE796388, Z78308, BF973800, |
| | | | | | BF125408, BF382619, BF894864, AA902842, |
| | | | | | AW083941, BF243278, AW131275, AA155995, |
| | | | | | AW771771, AA938206, BE251257, AI745367, |
| | | | | | AA448317, AW511804, AA448455, AI370549, |
| | | | | | BE139488, AW176079, AA156223, H73833, |
| | | | | | BF940408, H73162, AW084204, BF062122, |
| | | | | | AW028149, BF924722, BF433518, AI263130, |
| | | | | | AA411961, AW071942, BF694503, AA743704, |
| | | | | | AV764156, BF948901, AW082575, R11580, |
| | | | | | AA412712, BG153595, BG058948, BF893682, |
| | | | | | AU130757, BF667868, AF049523.1, BC000273.1, |
| | | | | | AF049528.1, AK024810.1, U70667.1, |
| | | | | | AF049524.1, AK023109.1, R34683, R34788, |
| | | | | | R63327, R63326, R63340, R63341, H15969, H27538, |
| | | | | | H27547, H27621, H82731, H83344, |
| | | | | | H83606, H83696, N20620, N32195, N33798, N36103, N36549, |
| | | | | | N41405, N41578, N44109, W19354, |
| | | | | | W25310, W38906, W60991, W73124, N89856, AA027859, |
| | | | | | AA027925, AA034908, AA034975, AA133603, |
| | | | | | AA133602, AA172294, AA261835, AA262483, |
| | | | | | AA523928, AA551549, AA563835, AA857095, |
| | | | | | AA872771, AI095007, AI096629, C05812, C15709, |
| | | | | | AA247765, AA393650, AA400834, AA487693, |
| | | | | | AA488710, AA663750, Z21548, AA843596, |
| | | | | | AA844473, AI041193, AI083985, Z41640, |
| | | | | | Z46025, Z44537, F03607, D11797, AI262317, AI264408, |
| | | | | | AI304594. |
| HCQCC96 | 57 | 845066 | 1-2152 | 15-2166 | BF970581, BG117166, AV695085, AV686338, |
| | | | | | AI341460, AW173384, AV693976, BF032394, |
| | | | | | BG024316, BE893802, BG254562, AW055235, |
| | | | | | W39204, BG170478, AW978735, BF572731, |
| | | | | | AW968956, AI909118, AI909124, AW592429, |
| | | | | | BG171038, AW118938, AI689438, AI419443, |
| | | | | | AI801242, AW438695, AI123971, N59864, |
| | | | | | AA707755, AA974210, AW130020, AA489046, |
| | | | | | AA768780, AI146982, AW768627, AI093766, |
| | | | | | AW889585, AW298736, BF111650, AA284319, |
| | | | | | AA907244, AW874520, AI535676, AW579265, |
| | | | | | AI955386, AA279581, AA983814, BF185409, |
| | | | | | BE622718, N59886, AI859864, AI498376, |
| | | | | | BG171039, BG116650, W01363, AI699807, AA824487, |
| | | | | | T86598, AA994605, AW044013, T85108, |
| | | | | | AA489144, AW768600, AA811658, AW271482, |
| | | | | | BE895361, AI631722, AW021293, R64514, |
| | | | | | T77523, AA736753, H44608, AI955411, AV689519, |
| | | | | | N90263, AL119283, H94626, T77559, |
| | | | | | AL119309, T86597, AI909117, AW376940, N79005, |
| | | | | | N77027, AW105078, N62828, AI701272, |
| | | | | | AI334730, T07505, AW848643, AW243861, AI909110, |
| | | | | | BG007292, BE162291, BE162293, AA532611, |
| | | | | | AP001816.2, AL022153.1, AC004804.1, |
| | | | | | AC015982.9, AC006840.17. |
| HCUCF89 | 58 | 637986 | 1-516 | 15-530 | AI524118, BE277210, AL039145, BF698704, |
| | | | | | BE276480, BE409047, BF698510, BG150796, |
| | | | | | BF666395, AW089101, BF945647, BE274150, |
| | | | | | BF699964, AL038072, AU121417, AI630176, |
| | | | | | AA847952, AW410354, AP001759.1, AC069162.8, |
| | | | | | AC091529.1, AC018787.5, AL138706.9, |
| | | | | | AC006449.19, AP000744.4, AK023598.1, AL513550.9, |
| | | | | | AP001468.1, AC006014.2, AL035691.17, |
| | | | | | AE000658.1, AC005971.5, AC005049.2, AC002543.1, |
| | | | | | AL109743.4, AC005488.2, AL121891.22, |
| | | | | | AL031727.42, AC005182.2, AC006975.2, AK022018.1, |
| | | | | | AC005725.1, AL035405.10, AL158830.17, |
| | | | | | AF053356.1, AC008050.6, AC008962.8, AC007912.6, |
| | | | | | AL137783.12, AL031295.1, AC011515.4, |
| | | | | | AC004089.25, AL161747.5, AL021937.1, AC068640.29, |
| | | | | | AC004098.1, AL139081.21, AE006467.1, |
| | | | | | AC069279.6, AC008055.6, AC013445.8, AC000070.2, |
| | | | | | AC006050.1, AL022326.1, AL391646.12, |
| | | | | | AC020658.6, AL121601.13, AC005104.1, AP000946.3. |
| HCUCK44 | 59 | 790277 | 1-1129 | 15-1143 | AL532468, BE621866, AL521895, BE621760, |
| | | | | | BE538472, AL521894, AV734260, AV723629, |
| | | | | | BE770935, BE790853, AI140351, BE621673, |
| | | | | | BG168718, BF793790, BE908998, BE545559, |
| | | | | | BE616433, BE395052, BE621070, BG164550, |
| | | | | | BF664130, BE937841, AI859347, AV696398, |
| | | | | | AW977552, BE731169, BE514231, BE312999, |
| | | | | | BE717043, AV696286, BF726404, BE018100, |
| | | | | | BE717057, AA121548, AI815642, AA768342, |
| | | | | | BF326554, BE281457, BF430984, AI864674, |
| | | | | | AA530873, BF338307, BE717061, BF977210, |
| | | | | | AA127712, BE676694, AA722381, BE717055, |
| | | | | | BF971805, BE795728, BE717048, AA987515, |
| | | | | | AW275917, AA417302, AI354682, AI859814, |
| | | | | | BF686844, BG035461, AW474962, N92869, |
| | | | | | AI025466, AA768339, BE396293, BE301588, |
| | | | | | AI051671, AW753719, BE965688, BE812296, |
| | | | | | AI920875, AW089493, BE535563, AW190165, |
| | | | | | R83064, AA130959, BE717112, AA587755, |
| | | | | | AA045598, N21328, AV712375, AA314322, |
| | | | | | AA844332, AW578738, AA100477, AI371694, |
| | | | | | AA043186, AI567303, BE717183, BE891492, |
| | | | | | BF809525, AI350331, AI039892, AW193146, |
| | | | | | AA828283, AI952434, BE717068, AW377665, |
| | | | | | AI289086, AA100476, AI014387, AA917482, |
| | | | | | BE560356, AA975893, N21020, AA045597, |
| | | | | | AV758595, AV760858, H94056, AA306867, |
| | | | | | AA621534, AW406948, BE218977, AI564973, |
| | | | | | BE741064, AA729835, BF594159, AA417265, |
| | | | | | AI187288, BE548903, AA661773, BF027132, |
| | | | | | H80956, W04309, AA649285, AW615725, |
| | | | | | AI419448, AW088039, N47889, AI952495, R89903, |
| | | | | | AI816957, BE927438, AI083853, BF029994, |
| | | | | | AW103201, AA580315, N27984, AI289415, T40562, |
| | | | | | BF593347, D82429, N80197, AI018462, |
| | | | | | AA868207, AI873582, AI955989, H81296, BE616655, |
| | | | | | AW138496, AI833059, AI288157, T91268, |
| | | | | | R63140, BE044820, BF594190, AA130829, D12288, |
| | | | | | AA298770, AW952882, AI699667, AI942324, |
| | | | | | AA310276, W22908, BG165580, AI091426, |
| | | | | | BE829457, BE829712, BE829791, BE829635, |
| | | | | | BE829638, AA074395, D12293, BE829628, T91580, |
| | | | | | AV737050, H81350, BE536089, AA353671, |
| | | | | | AA053266, AI202414, AI832968, BF382776, |
| | | | | | AA342277, AW084334, BE833477, W25596, |
| | | | | | AW886418, BE829841, AA297193, BF797820, |
| | | | | | AW351513, BF245513, AW377656, T98269, |
| | | | | | AA342276, D12294, BF086669, BF084242, |
| | | | | | BE833566, BF084293, AI908913, BF084274, |
| | | | | | AI868829, BE771088, BF155956, BF084243, |
| | | | | | BF084295, BF084296, BF086521, BE817957, |
| | | | | | BF084297, R83013, BF084208, BF084209, |
| | | | | | BF084211, BE928501, BF086673, BF086541, |
| | | | | | BF093333, BF089556, BF084298, AI220723, |
| | | | | | BE928502, BF093356, BF093368, BF093353, |
| | | | | | BF084241, T85780, BF084260, AA344066, |
| | | | | | BE870474, AA382073, BF084210, BE253749, |
| | | | | | BF086528, BF155939, AI310801, BE817887, |
| | | | | | BF093347, BE928490, AI866230, BE696034, |
| | | | | | BF084199, BF093349, AI908912, AA807562, |
| | | | | | BF095869, T91628, AA193223, BF095965, |
| | | | | | BE747715, AL122042.1, AC007842.1, BC004512.1, |
| | | | | | AP000892.4, N51146, N74141, AA100050. |
| HCUDD64 | 60 | 835082 | 1-388 | 15-402 | BF109963, AI870761, AI149403, BE675981, |
| | | | | | AI979111, AI590348, AI769440, AA568609, F04371, |
| | | | | | R68556, N24429, R85927, AW973928, |
| | | | | | W02539, BG150863, R79201, N69412, R79466, T80848, |
| | | | | | AI494453, R28549, AW440020, AL390151.1. |
| HCWAE64 | 61 | 535893 | 1-457 | 15-471 | AL043265, BE895962, BF091850, BF924502, |
| | | | | | BF930204, AW973724, BE906549, BF972009, |
| | | | | | AA558125, BG163769, AW993087. |
| HDPDI72 | 62 | 897277 | 1-1536 | 15-1550 | AV717810, AC018828.3, AC011464.5, AC022383.3, |
| | | | | | AC022384.4, AC034193.4, AC002472.6, |
| | | | | | AC021015.4, AC008119.6, AL356299.16, AC004951.5, |
| | | | | | AC018808.4, AF003626.1, AP000215.1. |
| HDPGE24 | 63 | 801947 | 1-2611 | 15-2625 | BE876192, AU145980, BE839859, AW953709, |
| | | | | | AV651029, AW866434, AW866436, AW866430, |
| | | | | | AV687299, AA604920, AA604512, AI887664, |
| | | | | | AW813014, BE839866, AA164729, AI566037, |
| | | | | | AA602341, AA602613, AA214047, BE839860, |
| | | | | | AI355441, AW855356, AA506540, AU119708, |
| | | | | | AW855353, AI884345, AV656490, AI049591, |
| | | | | | AW853687, AW995969, AI963674, BG058784, |
| | | | | | BF681462, BE811870, AA551394, BE081412, |
| | | | | | BE672638, AV687875, BE564307, AW935217, |
| | | | | | BE811892, BE145548, BE563924, AW577107, |
| | | | | | AV704081, AA631460, AW380640, AA366464, |
| | | | | | BG012149, BF694965, AW341886, AW866268, |
| | | | | | AI537997, F29519, AI537504, AI567884, |
| | | | | | BF874935, AV659506, AW363563, AA631500, |
| | | | | | AI363970, AA669020, AI270484, H78415, |
| | | | | | BE709511, AA640505, BE178526, AI989765, |
| | | | | | AW866337, AW953693, AA484751, AA342969, |
| | | | | | BF882965, AA484783, AV659374, BE796439, |
| | | | | | AV695480, AV659391, AW024055, AV659405, |
| | | | | | AI832956, T81440, AA654981, R70506, |
| | | | | | BF852810, AA484906, AW997573, AW379425, AI932609, |
| | | | | | AA631380, AA570339, BE708328, AI597820, |
| | | | | | BF694852, BE815355, AW934969, AW902128, |
| | | | | | AV684943, AA366571, BG260565, AA632800, |
| | | | | | AW007894, AW192258, AI886084, AV764490, |
| | | | | | H82763, AW131401, T69164, AA605054, |
| | | | | | AW573583, AA834697, AW858120, AW893702, |
| | | | | | AW573573, AW074527, AV714931, AW820698, |
| | | | | | AI679343, AA558871, BF853927, AW438596, |
| | | | | | BF883928, Z32833, AA503427, AW393438, |
| | | | | | AA610678, AA522988, AA483882, R95100, |
| | | | | | AW893701, T59151, AW965008, AA848158, |
| | | | | | BE067011, T98359, T68422, AI679520, BF935516, |
| | | | | | AA528276, BE839943, BE929829, AL120269, |
| | | | | | AV759172, H02561, AV760701, AW802714, |
| | | | | | BE541237, N21656, AI457389, BE066950, |
| | | | | | T30343, AI679960, H78215, AV700663, AW978714, |
| | | | | | AL135377, AA243867, AW151713, AW102955, |
| | | | | | BF884208, AW157616, BF846275, BG034591, |
| | | | | | BF106210, BG011353, AA161288, BF883454, |
| | | | | | AC000353.27, AF001893.1, AC006121.1, |
| | | | | | AC005484.2, AP001710.1, AL590762.1, AC009961.11, |
| | | | | | AL035555.10, AL160411.25, Z83822.1, |
| | | | | | AC022402.4, AL136139.6, AC005291.1, AC007225.2, |
| | | | | | AC007021.3, AC018828.3, AC010742.4, |
| | | | | | AL391259.15, AC090943.1, AC090514.1, Z98946.15, |
| | | | | | AL450263.15, AL034372.33, AC008873.4, |
| | | | | | AP002812.3, AF224669.1, AC006030.2, AL031311.1, |
| | | | | | AL122020.5, AL049759.10, AL117692.5, |
| | | | | | Z94801.1, AC008670.4, AL022318.2, AC008892.5, |
| | | | | | AC027124.4, AP000555.1, AP001169.1, |
| | | | | | AC018502.5, AC002378.1, AL390074.17, AC083863.2, |
| | | | | | AC066597.4, AC002091.1, AC079141.7, |
| | | | | | Z94056.1, AC005157.1, AL354720.14, AC026391.6, |
| | | | | | AP001715.1, AC040160.4, AL139109.14, |
| | | | | | Z97054.1, AC002289.1, AC007450.1, AC007482.7, |
| | | | | | AE000658.1, AL499604.9, Z84484.1, |
| | | | | | AP001724.1, AL109865.36, AC066608.5, AC073101.7, |
| | | | | | AC007850.29, AL137139.9, AL079342.17, |
| | | | | | AC018642.6, AC007773.1, AC024163.2, AL162231.20, |
| | | | | | AC007097.4, AL035685.21, AP000352.2, |
| | | | | | AL021368.1, AF111167.2, AC007363.3, AF088219.1, |
| | | | | | AC004125.1, AC009137.6, AC018755.3, |
| | | | | | AL158828.14, AC026398.4, AL356652.19, AC005846.1, |
| | | | | | AC023510.16, AL355096.4, AC034240.4, |
| | | | | | AL049713.20, AC011742.3, AL163853.4, AC015982.9, |
| | | | | | AL138743.5, AC007907.2, AC091492.1, |
| | | | | | AC021188.6, AC018682.4, AL138878.10, AL390025.1, |
| | | | | | AC006050.1, AB026898.1, AC011236.8, |
| | | | | | AC004024.2, AC005214.1, AC002464.1, AL139113.21, |
| | | | | | AC005046.3, AP000246.1, AP000207.1, |
| | | | | | AC007563.2, AC005520.2, AL137128.4, AL031670.6, |
| | | | | | AL442167.1, AL163285.2, AC011816.17, |
| | | | | | AC024166.3, AC011739.7, AC013734.4, AL021154.1, |
| | | | | | AC005881.3, AC005697.1, AL022165.1, |
| | | | | | AL391114.12, AL023513.1, Z98044.13, AC000094.3, |
| | | | | | AP000129.1, AL139415.10, AC011242.8, |
| | | | | | Z98304.1, AL589693.3, AL391122.9, AL445435.11, |
| | | | | | AC003071.1, AF131216.1, AL360272.23, |
| | | | | | AC087071.2, AC003962.1, AL136123.19, AC020908.6, |
| | | | | | AP001830.4, AC008450.5, AL445669.9, |
| | | | | | AJ271736.1, AL034550.31, AL118557.5, AC008891.7, |
| | | | | | AP000782.3, AP000500.1, AC011464.5, |
| | | | | | AC011311.11, AL158196.24, AC025262.27, AL049869.6, |
| | | | | | Z93341.5, AC022468.5, Z92542.2, |
| | | | | | AL034384.1, AP001728.1, AL031387.4, AC002994.2, |
| | | | | | AL591807.1, AC022407.6, AL160231.4, |
| | | | | | AC007065.5, AC005539.1, AL050318.13, U91322.1, |
| | | | | | AL133415.12, AC010252.3, AC068781.18, |
| | | | | | AL133500.3, AC008011.11, AJ400877.1, AL390738.4, |
| | | | | | AC044797.5, AC006445.11, AP000688.1, |
| | | | | | AL445071.14, AL133545.10, AL035089.21, Z98884.11, |
| | | | | | AL355535.14, AC007999.12, AC022007.3, |
| | | | | | AC083871.2, AP000350.1, AL354696.11, U80017.1, |
| | | | | | AP001671.1, AL121997.7, AC007282.4, |
| | | | | | AL139330.17, AL049779.6, AL163282.2, U82671.3, |
| | | | | | AL445928.8, AP001412.2, AC022392.4, |
| | | | | | AJ400879.1, AL161454.10, AC090957.1, AP001922.4, |
| | | | | | AC003091.1, AC005971.5, AL121905.23, |
| | | | | | AL161935.10, AC022267.8, AL158141.14, AC025165.27, |
| | | | | | AL158198.14, AL160036.12, |
| | | | | | AL136303.15, AC004707.1, AC012450.9, AF131215.1, |
| | | | | | AL132657.33, AC006965.3, AL161937.13, |
| | | | | | AC005969.4, AC018633.2, AC004764.1, AL359846.11, |
| | | | | | AL118556.4, AF196970.1, AL137787.11, |
| | | | | | AL360169.17, AC018769.2, AC000052.16, AF190464.1, |
| | | | | | AL137100.4, AL445248.7, AC008738.6, |
| | | | | | AC018523.9, AC005670.1, AC010605.4, AC007541.9, |
| | | | | | AL049795.20, AL096712.20, AC006057.5, |
| | | | | | AC004019.20, AC006071.1, AC026166.4, AL132640.4, |
| | | | | | AC022201.4, AC008569.6, AC003049.1, |
| | | | | | Z84469.1. |
| HDPIU94 | 64 | 813352 | 1-2182 | 15-2196 | AU140297, AL529544, AL529545, AU124978, |
| | | | | | AI740820, AU116885, AU126162, AW960772, |
| | | | | | AI565169, BF111956, BG251247, BG177689, |
| | | | | | BE780814, AI628285, AA482031, BE784432, |
| | | | | | AA947029, AW954823, AW190175, AA315300, |
| | | | | | AU143854, AA707674, AI332610, N50136, |
| | | | | | AU148736, AU127152, AW768480, BF947113, |
| | | | | | AA223261, AW955931, AI276839, AA189165, |
| | | | | | AA804584, AA767472, AA223378, AA894857, |
| | | | | | AA252718, R46372, AA939277, N59367, |
| | | | | | AA219127, AA774827, AV762911, BE546354, |
| | | | | | N72682, AA219510, AV761697, AA872005, |
| | | | | | AW188325, W02461, R21326, AI923716, |
| | | | | | D29223, R68368, BF771937, BE769443, AA322537, |
| | | | | | R08745, AA417592, R08746, AW952240, |
| | | | | | AA299861, AW377015, AA337351, H60482, N76470, |
| | | | | | BF088734, AA218745, AA336556, BE896274, |
| | | | | | AI810734, AW118290, BF380800, T30177, D29202, |
| | | | | | BF910258, AA337527, AA336555, R68574, |
| | | | | | AI167609, AA376922, AW968355, BF351657, |
| | | | | | AI832198, AW972092, AW968356, AW972093, |
| | | | | | AW968729, AI432644, AI623302, AW971740, |
| | | | | | AI432654, AI432650, AI432653, AW081103, |
| | | | | | AW858522, AW972091, AW969229, BE672759, |
| | | | | | AW972090, AI432677, AI431230, AI431307, |
| | | | | | AI431316, AI431328, AI431353, AI431312, |
| | | | | | AI432655, AI431310, AW128900, AI431238, |
| | | | | | AL045327, AI431354, AI432666, AA580821, |
| | | | | | AI431347, AI431315, BF448552, BE672748, |
| | | | | | AI432661, AL134524, AI431323, AI431337, |
| | | | | | AI432675, AI431321, AI492519, BE672745, |
| | | | | | BE672732, AI431246, BE672719, U46344, AI431235, |
| | | | | | AI431243, AI432647, AI432651, BE672738, |
| | | | | | AI431255, AI432674, AI431330, AI432649, BE672767, |
| | | | | | AI791349, AW601637, AI431248, AI431241, |
| | | | | | AL042842, AI431254, BE672774, AI431357, |
| | | | | | AL042729, AI432672, AI432665, BE672742, |
| | | | | | AL042931, BF589777, AI432662, BE672627, |
| | | | | | AW577201, AI431345, BE672644, AL042655, |
| | | | | | AI431351, AL042508, AI431231, AI431346, |
| | | | | | AL042853, AI432676, AI432673, AI432658, |
| | | | | | AW128884, AI431257, AW577199, AL042533, |
| | | | | | AL043166, AL047611, AI431340, AL135012, |
| | | | | | BE672622, BE672792, AI432657, AL042802, |
| | | | | | AW128846, AI431247, AI432664, AI432645, |
| | | | | | BE672718, AL042787, AL042515, AL042832, |
| | | | | | AI431751, AL043295, AI431314, AI492520, |
| | | | | | BE672634, BE672743, AI355008, AI492510, |
| | | | | | AL042898, AI431350, AL043091, AI431318, |
| | | | | | BE883591, BG167830, BE672749, BE672744, |
| | | | | | AI682915, AL040207, AW128897, AI866786, |
| | | | | | AW129223, AL042488, AI432643, AL043278, |
| | | | | | AK022626.1, BC001240.1, AK001284.1, AF064854.1, |
| | | | | | AL133074.1, AL133053.1, AL136763.1, |
| | | | | | AL133049.1, AL133076.1, AL122101.1, AL136755.1, |
| | | | | | AL136758.1, AL133068.1, AL136825.1, |
| | | | | | AL133051.1. |
| HDAIY31 | 65 | 886159 | 1-1964 | 15-1978 | AL533296, AU142272, BE560264, BG117407, |
| | | | | | BE407326, BG116397, BE314927, BE315405, |
| | | | | | BF205715, AI935180, BE313422, AW965613, |
| | | | | | BF315382, AI701496, BF727272, BF115518, |
| | | | | | AI829152, AW474694, H23483, AL040572, |
| | | | | | AI005000, AA311926, BE297986, AI298282, |
| | | | | | BE743406, AI675622, AW845300, BF306252, |
| | | | | | AA037364, AI097581, BF308743, BE296105, |
| | | | | | AW148771, AI339720, AA455474, BE670969, |
| | | | | | H23486, T66744, BE818161, R17317, AI268300, |
| | | | | | AW070382, AI291626, AW409641, AA834030, |
| | | | | | AI880154, R17812, R13082, AA324613, H23484, |
| | | | | | T27067, H86644, BF892771, R46701, |
| | | | | | AA349448, R20964, AA923102, H05150, H23485, T87222, |
| | | | | | N77062, Z43932, H23020, AW136846, |
| | | | | | AI742491, AI372678, T16039, T66743, AI372676, R45314, |
| | | | | | BF681190, H08379, AW864486, AA732753, |
| | | | | | BE312682, AW864516, H29561, R22677, AA324777, |
| | | | | | AA774961, R25545, F10589, AI523364, |
| | | | | | AA379005, T26481, BF904678, Z39993, H06774, H24087, |
| | | | | | AA670426, R20154, Z42195, R44466, |
| | | | | | R18635, F07975, Z44889, R59906, AI560142, R53460, |
| | | | | | R43016, R20237, AI745398, BF904916, |
| | | | | | H24300, R41995, R53461, H06899, AW801037, T74057, |
| | | | | | F07778, H08380, AA323177, BF763326, |
| | | | | | M85501, F12373, BF689358, H08954, R44142, F04562, |
| | | | | | F01724, F04134, F04226, T15999, |
| | | | | | AA037520, AA677085, BF335984, R40512, R20492, AL533261, |
| | | | | | BF858775, R56265, R13207, AA987631, |
| | | | | | T34814, R42746, BE747609, F09993, AA099781, R63798, |
| | | | | | R43692, AA902512, AA455473, R55721, |
| | | | | | F04028, AI984376, AI243094, AA776086, BE504276, |
| | | | | | BE155765, T10103, Z38178, T16439, |
| | | | | | BF851177, T10102, BF851176, T16686, BF335999, F01506, |
| | | | | | BF851173, BE818200, R14040, BF851221, |
| | | | | | BE814269, BF851178, BE327839, H06858, AW003241, |
| | | | | | BE394938, BE393786, BF851170, BF884029, |
| | | | | | H13338, BF858389, AA234656, AW748209, |
| | | | | | AI393102, R47781, R50313, R50305, |
| | | | | | AA976743, BF851229, BF335998, AV727501, BG165051, |
| | | | | | AA323766, AI758272, BG163618, BG113299, |
| | | | | | AI922707, BG164558, BF037292, BF341801, |
| | | | | | AV746964, BF792961, BG030364, AA643623, |
| | | | | | AI702406, BF970449, AW827289, BF921103, |
| | | | | | BE895585, AW827227, AW827206, AI471361, |
| | | | | | AW050578, AW196105, BG249582, AV682575, |
| | | | | | BG108406, AL036736, BE138658, AI345608, |
| | | | | | BE620202, AI431909, AI345471, AI805769, |
| | | | | | AI308032, BG027280, AI344785, AL041772, |
| | | | | | AI452993, AL134999, BG260037, AW983691, |
| | | | | | AW071417, AI924686, BF753056, BG112718, |
| | | | | | AI608936, AI963216, AW082594, AI335426, |
| | | | | | AI348777, BE965355, BF885000, AV735098, |
| | | | | | AI620284, R40432, AI269580, AI886124, BF814541, |
| | | | | | AI802833, AW302992, AI812015, BF343099, |
| | | | | | BF793644, AI799195, AI824576, AW168031, |
| | | | | | AL118506.27, AK023132.1, AK024508.1, AL137301.1, |
| | | | | | AK026542.1, AL389982.1, AK024538.1, |
| | | | | | AL359596.1, AF260566.1, AL137550.1, AL442072.1, |
| | | | | | BC008417.1, AL359615.1, BC003687.1, |
| | | | | | AK000432.1, BC004370.1, AL117585.1, AB063070.1, |
| | | | | | AK000647.1, BC008365.1, AF146568.1, |
| | | | | | AK026784.1, AF003737.1, AB055366.1, AB063084.1, |
| | | | | | AL110221.1, AK026462.1, AL110225.1, |
| | | | | | AL136892.1, AK027164.1, AK025967.1, AK026528.1, |
| | | | | | BC008280.1, AK027204.1, AB019565.1, |
| | | | | | AL359618.1, AK026629.1, AK025391.1, AL122050.1, |
| | | | | | AB050510.1, BC002733.1, AB060916.1, |
| | | | | | AL359941.1, AF217966.1, AL512754.1, AL117460.1, |
| | | | | | AK025798.1, AB055303.1, AB060887.1, |
| | | | | | AL136799.1, AF061943.1, AF078844.1, AK024524.1, |
| | | | | | AL136928.1, AB051158.1, BC008070.1, |
| | | | | | AF090943.1, BC005151.1, AF225424.1, AJ012755.1, |
| | | | | | AL080060.1, BC008382.1, AL137271.1, |
| | | | | | AB056421.1, AL117583.1, AK000083.1, AB060929.1, |
| | | | | | AL050277.1, BC003548.1, AK026534.1, |
| | | | | | AF056191.1, AL136805.1, AL512718.1, AF026816.2, |
| | | | | | AL137556.1, AL049452.1, BC006164.1, |
| | | | | | AL137560.1, AK026045.1, AB055374.1, S78214.1, |
| | | | | | AL133557.1, AK026593.1, AL049382.1, |
| | | | | | AF271350.1, S61953.1, AF090934.1, AK026526.1, |
| | | | | | AL390154.1, BC001967.1, AK027116.1, |
| | | | | | AF177336.1, Z82022.1, AF183393.1, AK026630.1, |
| | | | | | AL389939.1, BC003684.1, AF090896.1, |
| | | | | | AK026551.1, AL110280.1, AF091084.1, BC007326.1, |
| | | | | | AF097996.1, BC002839.1, BC008899.1, |
| | | | | | AK026959.1, AB060863.1, AB063046.1, AL137459.1, |
| | | | | | AB048954.1, AK027213.1, BC001045.1, |
| | | | | | AB052200.1, AF125948.1, AL442082.1, AL136845.1, |
| | | | | | AL122093.1, AB060214.1, BC007199.1, |
| | | | | | U42766.1, AK026408.1, X72889.1, BC008780.1, |
| | | | | | AL137526.1, AL512719.1, AB055361.1, |
| | | | | | AK026762.1, AB060825.1, AL136768.1, AL583915.1, |
| | | | | | AK025484.1, AL353956.1, AL133565.1, |
| | | | | | AL512750.1, BC003683.1, AF113222.1, AK026532.1, |
| | | | | | AL133104.1, AB052191.1, BC009033.1, |
| | | | | | AK026504.1, AK027096.1, AB048953.1, AF162270.1, |
| | | | | | AF218014.1, AL136786.1, U39656.1, |
| | | | | | AB056427.1, AB063008.1, BC006440.1, X69819.1, |
| | | | | | BC004951.1, AK025414.1, AK027193.1, |
| | | | | | AL049464.1, AL137538.1, AK000486.1, AL136843.1, |
| | | | | | AL359601.1, AB055368.1, AK026927.1, |
| | | | | | BC007198.1, AF11847.1, AL353940.1, U80742.1, |
| | | | | | AL117394.1, AB056768.1, BC006412.1, |
| | | | | | BC009341.1, AL137480.1, AL136749.1, AK000618.1, |
| | | | | | AK026464.1, AB050534.1, AL133067.1, |
| | | | | | Y16645.1, AL137557.1, AL110196.1, AK000445.1, |
| | | | | | AB047615.1, AK026642.1, AK025906.1, |
| | | | | | AK000137.1, AK026947.1, AK025491.1, BC004958.1, |
| | | | | | AB063079.1, AK025573.1, AB060839.1, |
| | | | | | AF207829.1, AK025312.1, AL359623.1, AK025524.1, |
| | | | | | AK025772.1, AL117440.1, AK000391.1, |
| | | | | | AF090901.1, AL050393.1, X65873.1, BC008983.1, |
| | | | | | BC006525.1, AK026647.1, AB048964.1, |
| | | | | | AL080074.1, AK026353.1, AB047904.1, AL049314.1, |
| | | | | | AL137648.1, AB056420.1, AJ242859.1, |
| | | | | | BC001963.1, AB060852.1, AL512689.1, AF219137.1, |
| | | | | | AL050149.1, AF125949.1, AL050146.1, |
| | | | | | AL136864.1, AL359620.1, BC008488.1, AL050138.1, |
| | | | | | AL122123.1, AL162002.1, AL122049.1, |
| | | | | | AB060826.1, AL049300.1, BC005890.1, AK026086.1, |
| | | | | | AK026480.1, AB062942.1, AB060908.1, |
| | | | | | AL512733.1, BC006807.1, AL122098.1, AL117457.1, |
| | | | | | AK026855.1, AL136787.1, BC005678.1, |
| | | | | | AL080137.1, BC008387.1, BC003122.1, AL117435.1, |
| | | | | | AK026744.1, AL136844.1, AK026608.1, |
| | | | | | AL080127.1, AL136789.1, AL162062.1, AF090900.1, |
| | | | | | AL133016.1. |
| HDPOC24 | 66 | 777493 | 1-1763 | 15-1777 | BE795755, BE799575, BF346049, BE736856, |
| | | | | | BE735839, BE613439, BE295320, BG165897, |
| | | | | | BG028052, BE904063, BF525670, BG248216, |
| | | | | | AI762392, BE798809, BE876262, BE538403, |
| | | | | | BE541775, BE278995, BE867896, AI928014, |
| | | | | | BE735450, BE792862, AI302814, AI417544, |
| | | | | | AI861926, BE868781, AI620234, AI949339, |
| | | | | | AW292331, AA425932, AI635177, AA716408, |
| | | | | | BE964527, AI148619, AI188537, AI751315, |
| | | | | | AW298424, AI570424, BE019043, AI333093, |
| | | | | | BE563878, BG166956, AI679326, AI339585, |
| | | | | | BE208614, AI912361, AI199939, AI638579, |
| | | | | | BF035843, AA575835, AW562325, AW167212, |
| | | | | | AA613113, AJ403125, BE300704, BG230624, |
| | | | | | AA631882, AA654351, AI188665, AI744337, |
| | | | | | AI042080, AA554771, BF205494, AI751314, |
| | | | | | AI357368, N42873, AI623763, BE205782, |
| | | | | | BG015408, BF061667, AW296851, N73029, BE548655, |
| | | | | | AI080401, AI200653, AI346327, AI804793, |
| | | | | | AA723378, AI219032, AI923960, AW512977, |
| | | | | | AI334021, BF739379, AI961597, AI933388, |
| | | | | | AW118019, AI750231, H49782, AW516158, W73379, |
| | | | | | AI682039, AW068519, AI199855, AI858410, |
| | | | | | AW275973, AW338079, AA856546, AW071218, |
| | | | | | AA428801, AI128328, AW026790, BE673142, |
| | | | | | AW513049, AA582918, BG056078, AA936754, |
| | | | | | AW513987, AA579898, AW192791, R55015, |
| | | | | | R80153, BF197452, AI738833, AU157028, |
| | | | | | AW627680, R62188, BG152556, AW516091, |
| | | | | | BG057769, AI538819, AW085840, AI500700, |
| | | | | | AW082065, BE614205, N34466, C75025, |
| | | | | | R55153, AW630976, R81484, AI687198, BE271478, |
| | | | | | AA975810, AI207300, BG253177, H13762, |
| | | | | | BE463629, H13709, AA983929, T97913, AI719056, |
| | | | | | AI203064, R80154, AI074832, AW104721, |
| | | | | | R47833, AA852278, AA812419, AA088385, R64576, |
| | | | | | AI362616, AW068781, W73403, R21634, |
| | | | | | AA553687, BE544315, D31024, W44598, BF346027, |
| | | | | | N33449, AA573257, AA857087, R49975, |
| | | | | | AI915025, AI382413, BF847025, R54690, AW591357, |
| | | | | | AW953807, N53663, BF752914, AA469380, |
| | | | | | AA469299, BF111939, AW301188, N50673, |
| | | | | | AW270044, BE549470, BE540690, AI673113, |
| | | | | | AI380538, AA364267, W39364, AW572002, |
| | | | | | AW080124, R81724, N42422, BE785221, |
| | | | | | D20947, BE966528, W44617, BF829622, W38340, |
| | | | | | AA948112, BE074077, AL137555.1, AK025951.1, |
| | | | | | AK025804.1, BC001979.1, AL445222.9, |
| | | | | | AF151783.1, AK023580.1. |
| HDPOL37 | 67 | 745377 | 1-1475 | 15-1489 | BF982675, BG257755, BE745491, AI521447, |
| | | | | | N24987, W85947, R25481, AV711665, Z42066, |
| | | | | | AI697574, AW856800, T07905, AC009475.4, |
| | | | | | AC019086.7. |
| HDPOO76 | 68 | 838594 | 1-631 | 15-645 | AI631291, AL514675, BF446962, AI952912, |
| | | | | | AI082051, AI927718, AI817234, AW245405, |
| | | | | | AW575213, AI685485, AW574689, AI888313, |
| | | | | | AI928811, AA633918, AL536751, AW162001, |
| | | | | | AI521576, AI679267, AA603095, AW248663, |
| | | | | | AI671689, AI924805, AW169272, AW054977, |
| | | | | | AI684117, AI832595, AI922601, AW157761, |
| | | | | | AW075901, AI889359, AA669133, AA703928, |
| | | | | | AI758895, AI571907, AA669154, AI859391, |
| | | | | | AA554494, AI862750, AW574888, AW584019, |
| | | | | | AA633909, AA808156, AI355530, AI554282, |
| | | | | | AA809056, AI815905, AI983159, AI354570, |
| | | | | | AI819952, AW151518, AI084731, AI057539, |
| | | | | | AW081146, AI625578, AI924682, AI813754, |
| | | | | | AL048086, AI499158, AL037721, AA419273, |
| | | | | | AI700129, AL047695, AA553789, AI573001, |
| | | | | | AA528248, AI445750, AL533609, AI829209, |
| | | | | | AA526860, AI613217, AW474840, AA554506, |
| | | | | | AW069560, AI431443, AA570449, AI951113, |
| | | | | | AI951467, AW003625, AL534624, AW069492, |
| | | | | | AW673253, AI446757, AA554747, AV752260, |
| | | | | | AI357759, AI963287, AI754386, AW069472, |
| | | | | | AW190719, AI366924, AI985885, AI581145, |
| | | | | | AI888058, AI446317, AA707441, AW513126, |
| | | | | | AI755259, AA857824, AI818937, N53460, |
| | | | | | AI830983, AI683296, AI979226, AI499271, AI754716, |
| | | | | | AI754656, AI473621, AW068917, AI469380, |
| | | | | | AI572562, AW069143, AA528145, AI133425, |
| | | | | | AL514933, AL515938, AA856795, AI439870, |
| | | | | | AA837512, AW069647, AI753065, BF727130, |
| | | | | | AI499184, AW069215, AI114467, AI590989, |
| | | | | | AA843416, BE301245, AI709159, AA641263, |
| | | | | | AW081870, AA634277, AV721845, AI754110, |
| | | | | | AA195865, AI587607, BE349590, AI969527, |
| | | | | | AI754626, AA602513, AA573933, AL514611, |
| | | | | | AW087865, AI357073, AI753654, AI888336, |
| | | | | | AW029296, AA192477, AA527851, AA580503, |
| | | | | | AW470015, AW731755, BE502103, AA216753, |
| | | | | | BF038258, AA528131, AI889358, AA599109, |
| | | | | | AI754886, AW081293, AW084704, AW087222, |
| | | | | | AA187317, AI924023, AA218923, AA190596, |
| | | | | | AW068928, BE940493, AI871952, AW512176, |
| | | | | | AW069219, BE894844, AW576085, AA191365, |
| | | | | | AW071065, AW575169, BF445295, AI754759, |
| | | | | | BF436621, AI753493, AW512937, BF727176, |
| | | | | | AA522806, AL037409, AW068911, AW819809, |
| | | | | | AA306718, AI758688, AW157795, AL035715, |
| | | | | | AI753579, AA804168, BF980477, AA196449, |
| | | | | | AW003403, AI984065, AI752481, AI568890, |
| | | | | | BE614527, BG117376, BF528439, AL037426, |
| | | | | | W58346, AA523191, AL516342, BE614612, |
| | | | | | AI752342, AW518064, AL515562, AA773618, |
| | | | | | AA173279, AA856791, AI753102, AA580521, |
| | | | | | BE965989, AW170076, AI753489, AA147200, |
| | | | | | AL518696, AW819898, AA526479, AI749092, |
| | | | | | BE677500, BG222277, AW613436, AL516147, |
| | | | | | AW874258, AI951645, AL518437, AW439452, |
| | | | | | AI568278, AI751016, AW246769, H93032, |
| | | | | | BG109873, AI753312, AW269472, BG060002, |
| | | | | | AI754417, AW273084, AW512870, AA171509, |
| | | | | | AL047947, AW249724, AI626114, AW406418, |
| | | | | | AI753171, BG059609, AA100962, AW069301, |
| | | | | | BC008633.1, BC004251.1, BC009275.1, AK025375.1, |
| | | | | | BC001301.1, BC002409.1, AC006483.3, |
| | | | | | X63432.1, AK025873.1, X00351.1, AC005218.1, |
| | | | | | AL031311.1, V00478.1, AC035147.3, M10277.1, |
| | | | | | AC008695.9, AL589182.3, AL512624.4, AP000529.1, |
| | | | | | AL080243.21, AL034402.9, D50604.1, |
| | | | | | AL354707.17, AL139042.15, AL359552.16, V00479.1, |
| | | | | | V00481.1. |
| HDPPQ30 | 69 | 684292 | 1-1049 | 15-1063 | AL041375, BE140949, BE077105, BF880881, |
| | | | | | AA809125, AW177869, AI890297, AW338376, |
| | | | | | AA171400, BE328286, AA218684, AV683406, |
| | | | | | AI310670, AW902110, AA489390, AI523205, |
| | | | | | AI792092, AI760835, AI821056, AI821805, |
| | | | | | AI801563, AW901945, AA526542, AW902135, |
| | | | | | BF876674, AI819419, AW022796, AA084320, |
| | | | | | AI254267, AW504667, AW162314, BF530611, |
| | | | | | AA661583, AA515727, AA935827, AI521525, |
| | | | | | H62123, AW265006, AW021674, AA324108, |
| | | | | | AI609992, BF812696, AI174703, BG231195, |
| | | | | | AI310787, AI280535, AA720582, AI753904, |
| | | | | | AI984168, AA584493, AI349130, AW169183, |
| | | | | | AI609984, AW264548, BE245594, AI797998, |
| | | | | | AW020150, AW238341, AI568376, AI610012, |
| | | | | | AI572680, AI278440, AI277373, AA232928, |
| | | | | | AW020094, BE676856, AI609974, AA425283, |
| | | | | | AI224583, AW192419, F23338, AI926102, |
| | | | | | AW162332, AA555232, AW104161, AA804726, |
| | | | | | AW021399, BE676988, AA525753, AW971320, |
| | | | | | BF882222, AA167656, BF949151, AA689351, |
| | | | | | AA584241, AL044701, AW511778, AA557945, |
| | | | | | AW265468, AW328446, BG180320, AA568303, |
| | | | | | AA493546, AA807684, AA280886, AW855527, |
| | | | | | AI889995, BE063437, BE154909, AA568311, |
| | | | | | AI345566, AA599712, AW275432, BF870762, |
| | | | | | AA810158, AA182928, R23873, AA492496, |
| | | | | | BF904892, AI815583, AW674277, AI816537, |
| | | | | | AA636077, BE244308, AA595661, AW084445, |
| | | | | | AA657808, AW510403, BG152746, BF800073, |
| | | | | | AW962791, AA180056, AW243817, AA604601, |
| | | | | | F29968, AI344906, AI318548, AW085626, |
| | | | | | AI369076, AI860423, BF681222, AA610381, |
| | | | | | AV759517, AI915081, AW157128, R73744, |
| | | | | | AW571716, BF448553, AW303052, AA507623, |
| | | | | | AW129188, AV763650, AA703818, AL042667, |
| | | | | | AL042670, AA493808, AI733523, AA679946, |
| | | | | | AA578711, AW576299, R92703, AA347203, |
| | | | | | AW072963, AV706458, AW152439, BF792474, |
| | | | | | BF061241, AV764119, AI567676, H05066, |
| | | | | | AL022315.1, AC005531.1, AC005080.2, AC011475.6, |
| | | | | | AC008372.6, AC020626.6, AP001630.1, |
| | | | | | D28126.1, AL137073.13, AL590762.1, AC011444.5, |
| | | | | | AL034548.25, AP001748.1, AC004967.3, |
| | | | | | AP001717.1, AL354932.26, AC006121.1, AL034377.1, |
| | | | | | AL356299.16, AC002126.1, AC012476.8, |
| | | | | | AC002544.1, AC007172.6, AP000359.1, AL137787.11, |
| | | | | | AC021016.4, U91326.1, AC007934.7, |
| | | | | | AC018751.30, AC009516.19, AC008736.6, AL354873.19, |
| | | | | | AC009996.7, X62355.1, AC005996.2, |
| | | | | | Z93241.11, AL031729.16, AC006071.1, Z68285.2, |
| | | | | | AC008745.6, AC010789.9, AL121652.2, |
| | | | | | AL049569.13, AL133507.8, AF053356.1, AC005052.2, |
| | | | | | AL022316.2, AC020897.6, AC008403.6, |
| | | | | | AC008379.6, AL121653.2, AC008569.6, AJ277557.1, |
| | | | | | AC027319.5, AC083866.2, AL008718.23, |
| | | | | | AC004755.2, AP000045.1, AL031666.6, AC005933.1, |
| | | | | | AC026464.6, AC005632.2, AL136162.17, |
| | | | | | AF207550.1, AL031255.1, AL050335.32, AC009123.6, |
| | | | | | AC011005.7, AL109923.29, AC000360.35, |
| | | | | | AP000553.1, AC008392.6, AC005913.2, AL121992.24, |
| | | | | | AL162426.20, AC009314.4, AL158823.11, |
| | | | | | AC005412.6, AP000346.1, AL121989.12, AC008397.7, |
| | | | | | AL137012.6, AC021396.6, AL499628.1, |
| | | | | | AC002352.1, L35532.1, AL138784.30, AC010422.7, |
| | | | | | AC005695.1, AL359092.14, AC011533.6, |
| | | | | | AC072052.6, AC008543.7, AC008427.7, AC002425.1, |
| | | | | | AF001548.1, AC007956.5, AC024561.4, |
| | | | | | Z95113.2, AC003982.1, AL034422.24, AL135927.14, |
| | | | | | AC007227.3, AL355512.22, AF243527.1, |
| | | | | | AL589723.7, AL157838.24, AC005696.1, AL136084.11, |
| | | | | | AL445248.7, AC004790.1, AC011495.6, |
| | | | | | AC005098.2, AC005754.1, AL035684.25, AF190464.1, |
| | | | | | AP000501.1, AC004228.2, AL035405.10, |
| | | | | | AC005856.1, AC006011.2, AC004884.1, AC008753.8, |
| | | | | | AL391647.16, AF051976.2, AC005180.2, |
| | | | | | AL023583.25, AL136418.4, AL139054.1, AC011455.6, |
| | | | | | AP003352.2, AC020908.6, AC005071.2, |
| | | | | | AC008666.5, AL080243.21, AC005874.3, AL109653.14, |
| | | | | | AF134471.1, AC027130.5, AC009412.6, |
| | | | | | AC007969.3, AC005015.2, AL513008.14, AC018690.5, |
| | | | | | AL117338.15, Z93928.1, AP000345.1, |
| | | | | | AL096763.14, AC004878.2, AL121601.13, AL139389.16, |
| | | | | | AC025436.2, AC002477.1, L47222.1, |
| | | | | | Z97056.1, AL133163.2, AC003110.1, AC005488.2, |
| | | | | | AL136117.12, AC002302.1, AC004081.1, |
| | | | | | AC008812.7, AC009131.6, AC026765.22, AL353706.6, |
| | | | | | AL392084.6, AL121656.2, AC068724.7, |
| | | | | | AP001711.1, AL050343.17, AF254983.2, AL512883.5, |
| | | | | | AF134726.1, AL158850.8, AP001725.1, |
| | | | | | AL357515.26, AC008755.6, AC010463.6, AC004144.1, |
| | | | | | AL133211.9, AC009086.5, AC068499.1, |
| | | | | | AL161747.5, AC007201.1, AP001883.5, AC004802.1, |
| | | | | | AC008651.7, AC010792.4, AC004867.5, |
| | | | | | AP000512.1, AC005060.3, AL031847.17, AC007003.4, |
| | | | | | AC008892.5, AC011442.5, Z97632.1, |
| | | | | | AC011994.10, AC005940.3, AC004882.2, AL034423.21, |
| | | | | | AC003007.1, AL049776.3, AC006026.2, |
| | | | | | AC002416.1, AP002456.3, Z83844.5, AL139339.22, |
| | | | | | AL137139.9, AC006162.1, AC008545.3, |
| | | | | | AP001710.1, AC004655.1, AF023268.1, AL121983.13, |
| | | | | | AP000252.1, AC008536.6, AL137791.19, |
| | | | | | AL035588.21, AC004643.1, AL356747.18, AC009309.4, |
| | | | | | AC005779.1, AC004883.2, AL353597.20, |
| | | | | | AL445071.14, AC004826.3, AP001705.1, AC005533.2, |
| | | | | | AP000793.5, AP000031.1, AL008582.11, |
| | | | | | AL049760.26, AC020906.6, AB020878.1, AF003626.1, |
| | | | | | AC084865.2, AL133367.4, AL359983.7, |
| | | | | | AC004816.1, AL163201.2, AC020558.4, AC008752.6, |
| | | | | | AC004020.1, AL161669.5, AL358777.12, |
| | | | | | AL121897.32, AC009244.24, AL133448.4, AC010319.7, |
| | | | | | AP000689.1. |
| HDQHM36 | 70 | 852328 | 1-1533 | 15-1547 | AA287570, AA255853, AI361900, AV763026, |
| | | | | | AV763058, BG164602, BF965394, AW105346, |
| | | | | | BG164455, AI570805, AW088846, AI754653, |
| | | | | | AA600202, AC003962.1, AC005081.3, AC018809.4, |
| | | | | | AL035658.7, AC007957.36, AC009060.7, AL109984.14, |
| | | | | | AL590762.1, AL133477.16, AC004671.1, |
| | | | | | AC000134.14, AC002288.1, AC005488.2, AC006483.3, |
| | | | | | AC011895.4, AC024561.4, AL121928.13, |
| | | | | | AL022476.2, AC005531.1, AC005332.1, AC010311.8, |
| | | | | | AL096841.6, AC011475.6, AC002310.1, |
| | | | | | AC004686.1, AL050318.13, AC004965.2, AC008440.8, |
| | | | | | AC020904.6, AC011491.5, AP000555.1, |
| | | | | | AC013355.7, AC004985.2, AC016587.7, AC009412.6, |
| | | | | | AP000557.2, AC019205.4, AL139150.12, |
| | | | | | AC005919.1, AC011495.6, AC005231.2, AC087071.2, |
| | | | | | AC009228.4, AC021036.5, AC010605.4, |
| | | | | | Z83822.1, L78833.1, AL049872.3, AL122035.6, |
| | | | | | D87675.1, AL445184.11, AF053356.1, |
| | | | | | AC022007.3, AC006120.1, AC005911.6, AC005280.3, |
| | | | | | AL157938.22, AC020931.5, Z85986.1, |
| | | | | | AC010530.7, AC005015.2, AL022326.1, AL080243.21, |
| | | | | | AC009123.6, AC015801.25, AC007216.2, |
| | | | | | AC083866.2, AC027319.5, AC004477.1, AC020916.7, |
| | | | | | AC004408.1, AL034549.19, AP000558.1, |
| | | | | | AL035072.16, AE006462.1, AL121655.1, AL139331.19, |
| | | | | | AL391827.18, AC020917.4, AL133387.8, |
| | | | | | AC002316.1, AL109825.23, AL451075.15, AP001717.1, |
| | | | | | AL121845.20, AL139317.5, AC005940.3, |
| | | | | | AC005702.1, AC009516.19, AC005971.5, AB023049.1, |
| | | | | | AC004812.1, AD000092.1, AL159191.4, |
| | | | | | AC009756.9, AC008805.7, AC008403.6, AL121897.32, |
| | | | | | AL022328.21, AC008962.8, AC009131.6, |
| | | | | | AL121753.30, AF045555.1, AC008569.6, AC009144.5, |
| | | | | | AC011485.6, AL359091.10, AC005098.2, |
| | | | | | AC005071.2, AC011811.42, AC009247.12, Z83845.14, |
| | | | | | AC006449.19, AC004019.20, AC009318.11, |
| | | | | | AC006160.9, AC013429.12, AC011465.4, AP001725.1, |
| | | | | | AC004253.1, AC006285.11, AC006388.3, |
| | | | | | AL359382.23, AL031311.1, AC006511.5, AC005088.2, |
| | | | | | AB023048.1, AC004089.25, AC002470.17, |
| | | | | | AC023490.5, AC018751.30, AL033529.25, AC011472.7, |
| | | | | | AC005899.1, AC018663.3, AF001549.1, |
| | | | | | AL160269.14, AL136137.15, AC007374.6, AC011005.7, |
| | | | | | L44140.1, AC008753.8, AP000501.1, |
| | | | | | Z85987.13, AC009570.13, AC005077.5, AL121601.13, |
| | | | | | AP000556.2, AF030453.1, AC004867.5, |
| | | | | | AC021016.4, AC007383.4, AL022313.1, Z82215.1, |
| | | | | | AC020913.6, AE006465.1, AC008616.6, |
| | | | | | AC018719.4, AC009314.4, AC011464.5, AC024163.2, |
| | | | | | AC006312.8, U80017.1, AL121890.34, |
| | | | | | AC018636.4, AL583856.6, AF111167.2, AL136131.15, |
| | | | | | AF196969.1, AL117336.22, AC005682.2, |
| | | | | | AC008543.7, AC011450.4, AF037338.1, AP000511.1, |
| | | | | | AL033528.19, AL137073.13, AC011461.4, |
| | | | | | AC011487.5, AC006211.1, AC000353.27, Z97832.11, |
| | | | | | AL121712.27, AL132780.5, AC008745.6, |
| | | | | | AL096840.25, AC005480.3, AL136979.16, U91326.1, |
| | | | | | AF002812.3, AC004865.1, AL160471.5, |
| | | | | | AC008760.6, AC004166.12, AC018638.5, AP003357.2, |
| | | | | | AC007850.29, AC016995.4, AC073657.5, |
| | | | | | U78027.1, AC005696.1, AF312032.1, AL356481.16, |
| | | | | | AC007934.7, AL391280.15, AL139100.9, |
| | | | | | AC011311.11, AC011484.4, AC004703.1, AC016894.7, |
| | | | | | AL121992.24, AL121972.17, AC011455.6, |
| | | | | | AC005288.1, AL109804.41, AC022211.5, AL022320.23, |
| | | | | | AL049776.3, AC005057.2, AC008806.4, |
| | | | | | AP001732.1, AC023344.4, AP002852.3, Z99716.4, |
| | | | | | AL138784.30, AL365364.19, AL031286.1, |
| | | | | | AC009079.4, AL354707.17, AC020915.6, AP001711.1, |
| | | | | | AC009244.24, AP000030.1, AP000134.1. |
| HE2CM39 | 71 | 553651 | 1-552 | 15-566 | AW138760, BG236171, AI928443, AI264363, |
| | | | | | BF432779, AA581388, BF446513, AW170385, |
| | | | | | AI366182, AI970247, AA854958, AI354301, |
| | | | | | AI081061, AI140964, AW243493, AW104079, |
| | | | | | AI366181, AA732881, AI039682, R46377, |
| | | | | | AA425694, H11979, AI871576, AI082699, AA428526, |
| | | | | | AW207325, H72841, AI767870, N35990, |
| | | | | | AW168999, AI537179, AI678150, AW972093, AI283218, |
| | | | | | AA405499, Z39960, AI191091, AA626013, |
| | | | | | AW139286, F03140, AA890408, AI349325, AI871195, |
| | | | | | AW088879, AI914847, AA192077, AW090285, |
| | | | | | N95266, AA788656, BE674514, AI634559, |
| | | | | | AI269823, AA894693, BG109270, AW806761, |
| | | | | | BG029829, BE965355, AI623941, AI537677, |
| | | | | | AW169784, AW161156, AI918449, AI538885, |
| | | | | | AI521005, BF061283, BF853807, AW059828, |
| | | | | | AI345688, AV743631, BF342261, AI866820, |
| | | | | | BE138644, AW161579, AI587121, AW302992, |
| | | | | | BE789764, AI540759, AI348917, AI540674, |
| | | | | | AI581033, AI349957, AI345005, AW827289, |
| | | | | | BE048087, BF924855, AL120853, BG164558, |
| | | | | | BG151388, AW827227, BF812936, BE964614, |
| | | | | | BG031664, BE047952, BF751347, AW072719, |
| | | | | | AI648567, AI621341, AI310940, AL041016, |
| | | | | | AI567582, BE904096, AV750565, BF339322, |
| | | | | | AW023338, AI698427, AW074869, AA641818, |
| | | | | | AI859991, BE620444, AV736808, AI874166, |
| | | | | | AI434741, AV756122, AW268302, BE544111, |
| | | | | | AI310575, BE878735, BF750879, BG107576, |
| | | | | | AI307736, AW089275, AI349645, AI919593, |
| | | | | | AI799674, AI559872, BE910373, AI580674, |
| | | | | | AW089572, AI568060, AI340533, AI670009, |
| | | | | | AI921254, AI917963, BE543089, AI890507, |
| | | | | | BE887488, AI690748, AI340511, AI345608, |
| | | | | | AW162194, AI473451, AI933992, AW302954, |
| | | | | | AI800473, AI572717, AL037558, BF753023, |
| | | | | | BE256001, BE879396, AI288285, AL040241, |
| | | | | | AI345253, BF680133, AI307494, AI539153, |
| | | | | | AW151136, AW044029, AI345677, BE138658, |
| | | | | | AI446373, BE895585, AI340627, AW163834, |
| | | | | | BE974031, BE963286, AW020095, AV741327, |
| | | | | | AI494201, BF699668, AI538878, AW263804, |
| | | | | | BF339594, AI251830, AI813633, AI345745, |
| | | | | | AI348854, AI345471, AI696611, AI336582, BE886728, |
| | | | | | BE964683, BE894455, BG114432, AV714085, |
| | | | | | AV712713, BE965169, N25081, AL037041, |
| | | | | | AV704350, AI345224, AL119863, BE966699, |
| | | | | | BG001235, AI868204, BF752999, AA761557, |
| | | | | | AI267185, AL048323, AW083778, BG249669, |
| | | | | | BG029086, AA070889, BF904180, AA464646, |
| | | | | | BG113299, AL048340, AI311892, AW021373, |
| | | | | | BE621472, AI290153, AL036673, AI335426, |
| | | | | | AI348777, AW081255, AW772685, AI866770, |
| | | | | | AI345261, AI702301, BF970449, AW301505, |
| | | | | | T99953, AI273179, AI805769, BF572734, |
| | | | | | AL036772, AL036396, AI610357, AA904121, |
| | | | | | AW058233, BG254745, BF751710, AI436429, |
| | | | | | BE781369, BF904189, BF726207, BF338002, |
| | | | | | BF343568, N99092, BE172412, BG166654, |
| | | | | | AL119791, AA127565, AV755793, AI343059, |
| | | | | | AA572758, N29277, AW834302, BE890131, |
| | | | | | BF924856, AW946806, AB063084.1, AL359620.1, |
| | | | | | AK024538.1, AB050534.1, AL357195.1, AL137665.1, |
| | | | | | AK026551.1, BC003687.1, AL136844.1, |
| | | | | | AB048954.1, BC006440.1, AF352728.1, AK026647.1, |
| | | | | | AL136644.1, AL389939.1, AK026855.1, |
| | | | | | AB044547.1, AB055368.1, BC009294.1, AL389935.1, |
| | | | | | AF061943.1, AL512750.1, AK027144.1, |
| | | | | | AL359622.1, AF028823.2, AL137478.1, AL137547.1, |
| | | | | | AY034001.1, BC003602.1, AL136768.1, |
| | | | | | AF090934.1, BC008282.1, AL137463.1, AF026816.2, |
| | | | | | L19437.2, AK027193.1, AK026746.1, |
| | | | | | BC000090.1, AF061795.1, AF151685.1, AY026527.1, |
| | | | | | BC001963.1, BC004530.1, AB049900.1, |
| | | | | | L30117.1, AK027146.1, AB056809.1, U80742.1, |
| | | | | | AK026626.1, AB062750.1, BC004244.1, |
| | | | | | AF205073.1, AL512719.1, BC000051.1, AL136622.1, |
| | | | | | BC008417.1, AF260566.1, AL050092.1, |
| | | | | | BC003122.1, AL122110.1, AB063093.1, M64349.1, |
| | | | | | AK026762.1, AL136893.1, AL049465.1, |
| | | | | | AK027614.1, BC007499.1, AF111112.1, AK000418.1, |
| | | | | | BC001236.1, AK026480.1, AL133640.1, |
| | | | | | AL080154.1, BC001045.1, AF017790.1, BC001056.1, |
| | | | | | AB049758.1, AF056191.1, BC006133.1, |
| | | | | | AB019565.1, AB049892.1, AF162270.1, BC009311.1, |
| | | | | | BC004529.1, AL122050.1, BC002535.1, |
| | | | | | AK025084.1, AL512733.1, AB056420.1, AK000647.1, |
| | | | | | AF217982.1, AL583915.1, AL117394.1, |
| | | | | | M92439.1, AL110218.1, AF271350.1, AL080086.1, |
| | | | | | BC008196.1, AL512754.1, AL133557.1, |
| | | | | | S69510.1, AL050116.1, AL122045.1, AL512765.1, |
| | | | | | AL133113.1, BC008893.1, BC006201.1, |
| | | | | | S76508.1, AB055361.1, AL137556.1, AK000247.1, |
| | | | | | AL162008.1, AL136787.1, AK026597.1, |
| | | | | | AB048975.1, AL137529.1, BC004874.1, AL353940.1, |
| | | | | | BC006807.1, AF104032.1, X98834.1, |
| | | | | | BC007053.1, AF051325.1, AK026526.1, AL137574.1, |
| | | | | | AL137550.1, AB063077.1, AK000310.1, |
| | | | | | BC002466.1, AL117440.1, AK024546.1, BC004368.1, |
| | | | | | AJ006417.1, S77771.1, AK026542.1, |
| | | | | | AK026534.1, AF091084.1, X82434.1, AL122049.1, |
| | | | | | AL080159.1, AK000432.1, AB050410.1, |
| | | | | | AK027161.1, BC004362.1, AB060863.1, BC006410.1, |
| | | | | | AK027182.1, AL389957.1, AB060903.1, |
| | | | | | AK025015.1, Y14314.1, AL133016.1, AL137558.1, |
| | | | | | BC001655.1, AL157482.1, AB056768.1, |
| | | | | | AL080126.1, AL050138.1, AL096751.1, AL136752.1, |
| | | | | | AL136915.1, BC002733.1, AL389982.1, |
| | | | | | AL110280.1, U51587.1, AL137476.1, AF230496.1, |
| | | | | | AK026593.1, AF285167.1, S61953.1, |
| | | | | | BC008780.1, BC007326.1, AF003737.1, BC004945.1, |
| | | | | | BC006509.1, AF218031.1, AK025967.1, |
| | | | | | AK025391.1, AK027121.1, AL512684.1, AK026057.1, |
| | | | | | AK025410.1, AF218014.1, BC002750.1, |
| | | | | | AJ299431.1, BC006103.1, AL122106.1, AK000636.1, |
| | | | | | AF177336.1, AL359583.1, AK026744.1, |
| | | | | | AL117460.1, AK025632.1, BC007567.1, AL133075.1, |
| | | | | | BC003548.1, AF090900.1, AF262032.1, |
| | | | | | AK027142.1, AF125948.1, AF111847.1, BC008078.1, |
| | | | | | BC002697.1, BC007732.1, AL117435.1, |
| | | | | | AJ012755.1, AL137479.1, X72889.1, AK027868.1, |
| | | | | | AK026591.1, AL136799.1, AL080060.1, |
| | | | | | AL080158.1, AK027102.1, AL512718.1, AK026086.1, |
| | | | | | AB048964.1, AF217966.1, BC006508.1, |
| | | | | | AL390154.1, AL512761.1, BC004370.1, AB060873.1, |
| | | | | | AB060905.1, AB047941.1, BC008280.1, |
| | | | | | AL133098.1, AK026784.1, AL512746.1, AB047801.1, |
| | | | | | AF305835.1, AL157431.1, AL133568.1, |
| | | | | | AL133014.1, AF146568.1, BC006412.1, AK027136.1, |
| | | | | | AF227198.1, BC007346.1, BC008365.1, |
| | | | | | AL050277.1, BC006332.1, BC005073.1, AL133093.1, |
| | | | | | AK000618.1, AL137560.1, BC006832.1, |
| | | | | | AK026045.1, AF143723.1, BC003650.1. |
| HE2PO93 | 72 | 771655 | 1-1309 | 15-1323 | BG250792, BF340156, BF691370, BE958544, |
| | | | | | AI913576, BE892390, BE467084, AI769974, |
| | | | | | BF978990, AI985726, AI978876, AA805536, |
| | | | | | BG114463, BF976892, AI879646, AI640283, |
| | | | | | BF212660, BE813503, BF212750, BE245388, |
| | | | | | AI151263, BE813657, AW994769, AI474103, |
| | | | | | BF326782, AW078667, N66384, BF382578, |
| | | | | | BE881936, AI268780, AA137260, BE865738, |
| | | | | | AW118966, AI690850, BF211945, AA150376, |
| | | | | | AW020353, AI218961, AI458422, AI758351, |
| | | | | | BF030723, AA631892, AI350813, AW079202, |
| | | | | | AI038862, AA150275, BF082705, BF240677, |
| | | | | | AA912346, T17277, BE003683, BE813513, |
| | | | | | AW468933, AI003046, BE048238, AA137259, |
| | | | | | AI208534, BE770261, R77850, AW955572, |
| | | | | | BF743116, AW183342, AL047998, AA928199, |
| | | | | | AI282290, AL047999, R77760, BF215622, |
| | | | | | AL121406, T34660, H60032, BF336987, AA362660, |
| | | | | | AA330116, Z40410, AW370452, AI473113, |
| | | | | | AA306043, AA343807, BF239599, AA621093, |
| | | | | | BF240906, BF887439, BF886985, R40472, |
| | | | | | N52225, AW168049, AA789087, BE770101, BF885967, |
| | | | | | AL534441, AA962715, BF212646, N73192, |
| | | | | | BE871372, BE715872, AC009709.7, AC007911.8. |
| HE6FU11 | 73 | 827236 | 1-1986 | 15-2000 | AA992948, AI638341, AW134923, AI038302, |
| | | | | | H54037, AI581139, AJ007581.1, AK027323.1, |
| | | | | | AF314058.1, AL021578.4, AB027710.1, AB024964.1. |
| HE6FV29 | 74 | 588454 | 1-1512 | 15-1526 | AA984763, AA406303, AA599164, AA600957, |
| | | | | | BF922107, AL046225, AI623434, BF760969, |
| | | | | | AI890702, D29050, AL449223.7, AP000114.1, |
| | | | | | AP000046.1, AP001717.1, AC006039.2, |
| | | | | | AL078463.11, AL035460.15, AC060232.5, AL161730.9, |
| | | | | | AF277315.3, AC010198.8, AC010319.7, |
| | | | | | AC005099.1, AP003114.1, AC020906.6, AL117377.18, |
| | | | | | AC004841.2, AL161937.13, AC004951.5, |
| | | | | | AL161781.12, AL157858.5, AL391260.13, AL158828.14, |
| | | | | | AP000302.1, AC007193.1, AF123462.1, |
| | | | | | AC027644.9, AC006254.10, AL035662.65, AL139396.17, |
| | | | | | AC004084.1, AC015937.7, AF008191.1, |
| | | | | | AL355916.2, AD001502.1, AF283320.1, AC005082.3, |
| | | | | | AC005399.19, AC003030.1. |
| HE9EA10 | 75 | 827796 | 1-2100 | 15-2114 | AI990816, BG112919, BE503434, AI797355, |
| | | | | | AW303578, BE502346, AI750156, BE786552, |
| | | | | | AA514648, AI631128, AU158865, AU148743, |
| | | | | | AI611129, AU153354, BE540704, AU150538, |
| | | | | | BF508791, BF223713, N77793, AW103270, |
| | | | | | AI206873, N62886, AI652672, AW003920, |
| | | | | | AW515809, AW003207, AI055940, AI039096, |
| | | | | | AW205084, AI206877, BE175285, AI522151, |
| | | | | | BE709434, BF436332, AI365206, AI274835, |
| | | | | | AW798986, AA962334, BF001393, AI220417, |
| | | | | | AA226874, AA062659, AI696208, AI970440, |
| | | | | | BF353450. |
| HEBCY54 | 76 | 600355 | 1-1175 | 15-1189 | AL530975, AA747512, AI215061, T15637, |
| | | | | | Z39819, AA350340, AA866209, R00414, AW074717, |
| | | | | | F08597, AW953260, Z43761, U97145.1. |
| HEBDF77 | 77 | 692347 | 1-1806 | 15-1820 | BE550371, AA991780, BE671948, BE672217, |
| | | | | | AI907477, BF591700, BE504304, BE220403, |
| | | | | | BE222339, AI281980, AI015798, BG149662, |
| | | | | | H29013, R88622, AI656870, H06705, R39800, |
| | | | | | F07755, Z40840, C15636, C15624, |
| | | | | | AA133829, H29114, H06754, F06113, T15386, D81469, |
| | | | | | BE503273, BF062276, BE041662, BE041633, |
| | | | | | F06114, F02370, AI363908, AW148827, N46729, |
| | | | | | AA663853, BG149723, BE699475, BG105603, |
| | | | | | R12748, AL039029, BE699467, BF946316, |
| | | | | | AB023144.2, AL078460.6. |
| HEBDQ91 | 78 | 840288 | 1-1559 | 15-1573 | AW964157, AI564075, AA167586, AW204637, |
| | | | | | R85100, AA824367, Z45398, AA324333, |
| | | | | | AA332411, AW341163, T81885, BG055317, |
| | | | | | AA378561, T05032, BE218722, Z41111, T71210, |
| | | | | | AV705201, AV703158, AW953763, AC008623.4. |
| HEBFR46 | 79 | 847064 | 1-1290 | 15-1304 | BF339246, AW957665, BG258103, AW075995, |
| | | | | | BF309372, BE868083, AW576203, BF308177, |
| | | | | | BE881903, BF689190, AI051657, AA311371, |
| | | | | | BG059809, W56301, AW058408, AA102223, |
| | | | | | BE301190, AI091799, R05745, D61582, |
| | | | | | R01123, AA102222, AA375163, BG029189, AW293550, |
| | | | | | AI752483, AA376452, AW275432, BF812696, |
| | | | | | AI439525, AW151541, AW084324, AL121039, |
| | | | | | AW265468, AI702049, AW162314, AW327673, |
| | | | | | AA577706, BE273825, BF940118, AI270280, |
| | | | | | AW148821, AW162332, AA807704, BG059139, |
| | | | | | AA661583, AW238137, AA601674, BG180320, |
| | | | | | AV742390, BE244308, AW410844, AI433952, |
| | | | | | AI828721, AA631915, AL079734, BG152746, |
| | | | | | AW473160, AW021399, AW020094, BE677164, |
| | | | | | AA728954, AI860423, AI039257, BF679568, |
| | | | | | AW243817, AI049999, AW148964, AI538404, |
| | | | | | AI826857, AI753131, AI690379, BE676856, |
| | | | | | AI003469, AV758870, BF214695, AW502688, |
| | | | | | AW631267, AI904840, AA603359, AI251696, |
| | | | | | AI819419, AI090377, AI254508, BE176819, |
| | | | | | AI554399, AA112864, AI355246, AW151848, |
| | | | | | AW962971, AI028148, AI308529, BF868826, |
| | | | | | BF970107, AA507499, AI751698, AL036896, |
| | | | | | AC006483.3, BC000787.1, AK024787.1, AC010616.5, |
| | | | | | AK027150.1, AC004659.1, AL078611.1, |
| | | | | | AK000385.1, AC005519.3, AC009756.9, AC002543.1, |
| | | | | | AC005052.2, AL354836.13, AC016995.4, |
| | | | | | AL023879.1, AC003108.1, AL139824.22, AL121675.36, |
| | | | | | AL358777.12, AC015651.18, AC011444.5, |
| | | | | | AC004966.2, AC011526.7, AC010319.7, AL121579.4, |
| | | | | | AL158040.13, AC007421.12, AC005531.1, |
| | | | | | AL391259.15, AL096701.14, AC002996.1, AC067945.4, |
| | | | | | AL109923.29, Z97183.1, AL133458.19, |
| | | | | | AC010271.6, AF279660.2, AL035086.12, AP000280.2, |
| | | | | | AL445184.11, AC008440.8, AC008848.7, |
| | | | | | AL139809.16, AC018663.3, AP000039.1, AP000107.1, |
| | | | | | AF195658.1, AP000557.2, AC004974.1, |
| | | | | | AC010789.9, AC004552.1, AC004985.2, AL160256.21, |
| | | | | | AC018633.2, AL121897.32, AC090944.1, |
| | | | | | AC020983.7, AP001715.1, AC007374.6, AL117382.28, |
| | | | | | AF207550.1, AC010422.7, AL137852.15, |
| | | | | | AC008635.6, AL035659.22, AP000463.2, AB017653.1, |
| | | | | | AL359236.4, AC005358.1, AL035683.9, |
| | | | | | AL139785.5, AL159168.15, AC000353.27, AC000379.1, |
| | | | | | L35532.1, AL357972.18, AC011479.6, |
| | | | | | AL159990.12, AL138849.12, AC008891.7, AP000555.1, |
| | | | | | AC010530.7, AC008744.6, AC025212.5, |
| | | | | | AL451162.14, AF167081.1, AC007240.2, AC003007.1, |
| | | | | | AL512489.11, AC004673.1, AC004752.1, |
| | | | | | AL138733.15, AL354948.7, AC011740.7, Z85986.1, |
| | | | | | AC005484.2, AC013355.7, AC016596.5, |
| | | | | | AL031711.30, U73636.1, AC006064.9, U91327.1, |
| | | | | | AL031680.20, AC004089.25, AL132640.4, |
| | | | | | AL109935.39, AC010326.6, AC007676.19, AL133229.40, |
| | | | | | AL136228.8, AC018797.4, AL033519.42, |
| | | | | | AL096791.12, AL391139.19, AC002312.1, Z97054.1, |
| | | | | | Z83840.7, AC004821.3, AC002060.3, |
| | | | | | AL139184.8, AC005280.3, AF107885.2, AB032485.1, |
| | | | | | AP000256.1, AF312032.1, AL035705.22, |
| | | | | | AC012379.7, AC020904.6, AC008521.5, AL356214.20, |
| | | | | | AF224669.1, AP000691.1, AC018673.4, |
| | | | | | U07561.1, AC008392.6, AC004263.1, AP002906.2, |
| | | | | | AL031058.1, AL355480.22, AC006530.4, |
| | | | | | AC009362.8, AF258545.2, AL049759.10, AL035249.6, |
| | | | | | AL008582.11, AJ009616.3, AL050404.3, |
| | | | | | AL122020.5, AP000098.1, AL133163.2, AC025166.7, |
| | | | | | AC087311.22, AL513366.11, AL353678.11, |
| | | | | | Z97632.1, AC005041.2, AL121586.31, AC006449.19, |
| | | | | | AC010412.7, AL355336.15, AL022316.2, |
| | | | | | AL353748.13, AC010526.7, AC005911.6, AC016025.12, |
| | | | | | AC084864.2, AC004066.1, AP001748.1, |
| | | | | | AC026120.33, AL050307.13, AP000361.1, AL157372.18, |
| | | | | | AL353710.7, AL049780.4, AC011895.4, |
| | | | | | AC005695.1, AL161937.13, AL354928.9, AC008738.6, |
| | | | | | AC008372.6, AP000503.1, AC002404.1, |
| | | | | | AC008482.5, AL121967.11, AC010378.6, AL449209.2, |
| | | | | | AC026672.44, AL356805.5, AL031662.26, |
| | | | | | AL449143.18, AL034369.1, AF134726.1, AL049843.18, |
| | | | | | AC008623.4, AC072061.8, Z98948.1, |
| | | | | | AC004662.1, U62317.2, AC012476.8, AC008397.7, |
| | | | | | Z98752.16, AL161670.4, AC007957.36, |
| | | | | | AC009399.5, AC008755.6, AF317635.1, AC009812.17, |
| | | | | | AC002546.1, AC003043.1, AC022211.5, |
| | | | | | AC007746.3, AL050335.32, AC005015.2, AC022405.5, |
| | | | | | AC004476.1, AL109804.41, AF001549.1, |
| | | | | | AC016602.6, AL109799.6, AC008044.4, AC004851.2, |
| | | | | | AL049795.20, AL162505.20, Z83851.17, |
| | | | | | AL359541.11, AL031282.1, AC009470.4, AL034422.24, |
| | | | | | AL133332.12, AC005365.1, AL157789.6, |
| | | | | | Z98051.6, AC006151.3, AC024561.4, AC009086.5, |
| | | | | | AC005570.1, AC010679.6, AC009469.4, |
| | | | | | AC008857.5, AC007845.12, AC005091.1, AL132713.11, |
| | | | | | L78810.1. |
| HEBGE07 | 80 | 798096 | 1-1853 | 15-1867 | AI016066, AC010170.3, AC006515.7, AC008641.6, |
| | | | | | AC019086.7, AC016587.7, AL078581.11, |
| | | | | | AC037433.6, AL121975.9, AC022267.8, AC009225.3, |
| | | | | | AC091493.1, AC006257.1, AL160411.25, |
| | | | | | AL033397.7, AL122023.3, AP001671.1, AL121983.13, |
| | | | | | AL024506.1, AL135785.10, AC079383.17, |
| | | | | | AC024085.5, AC020552.4, AC087069.2, AC008115.3, |
| | | | | | AL162571.9, AC078841.4, AC008543.7, |
| | | | | | AC083876.2, AC005071.2, AC019041.8. |
| HEGAU15 | 81 | 834379 | 1-1111 | 15-1125 | W92008, W92009, AC009404.5. |
| HEQBF89 | 82 | 786205 | 1-845 | 15-859 | AI250552, AI251284, AI251203, AI284543, |
| | | | | | AW270385, AV759518, AL138455, AA904211, |
| | | | | | BF337291, AL119625, AI254770, BF725761, |
| | | | | | AI249853, AA704393, AI251034, AW020198, |
| | | | | | BE139139, AW963474, AA557911, AV762645, |
| | | | | | N57681, BE138387, AL037632, AW979191, |
| | | | | | BE252421, AW020088, AW276678, AL157893.16, |
| | | | | | AL132656.14, AC007383.4, AC006435.7, |
| | | | | | AC005952.1, AL133258.16, AP001695.1, AC004987.2, |
| | | | | | AL096751.1, AL031733.3, AC006443.1, |
| | | | | | AC006345.4, AL139317.5, D83989.1, AC005015.2, |
| | | | | | AC023880.5, AF213884.1, AC006994.4, |
| | | | | | AL449305.4, AL355480.22, AL356244.12, AC006241.1, |
| | | | | | AC002316.1, AL353802.14, AL035420.15, |
| | | | | | AL136126.34, AL354776.15, Z98742.5, AC005000.2, |
| | | | | | AL139081.21, AC010530.7, AL049795.20, |
| | | | | | AC006064.9, AC023105.7, AF312915.1, Z97352.1, |
| | | | | | AC004837.1, AL162426.20, D87675.1, |
| | | | | | AC004686.1, AC007688.15, AL022165.1, AC008736.6, |
| | | | | | Z83845.14, AL031295.1, AL158052.10, |
| | | | | | AC026431.3, AP000112.1, AC002477.1, AL031283.26, |
| | | | | | AC015550.18, AL117336.22, AC018695.6, |
| | | | | | AL357497.17, AF196779.1, AL121601.13, AC005231.2, |
| | | | | | AC005874.3, AF134471.1, AC010543.8, |
| | | | | | AP000089.1, AF283320.1, AC004703.1, AC011479.6, |
| | | | | | AL022320.23, AP001705.1, AC040160.4, |
| | | | | | AL163282.2, AL121932.19, AJ009611.6, AC009953.4, |
| | | | | | AP001726.1, AC044797.5, AL133174.15, |
| | | | | | AC002464.1, AL050308.9, AC005103.3, AL035587.5, |
| | | | | | AL034429.1, AL157938.22, AL031577.1, |
| | | | | | AL137073.13, AF243527.1, AC005940.3, AL359091.10, |
| | | | | | AL135839.15, AC005519.3, AL354932.26, |
| | | | | | AL161779.32, AF042090.1, AC004383.1, AC006468.9, |
| | | | | | AE006467.1, AC006130.1, AC004887.2, |
| | | | | | AL021393.1, AC008623.4, AC005900.1, AC022405.5, |
| | | | | | AC024028.10, Z84466.1, AL021155.1, |
| | | | | | AC072052.6, AL355834.4, AC020956.6, AC005049.2, |
| | | | | | AC037475.9, AL136450.8, AL445664.14, |
| | | | | | AL161415.2, AC007193.1, AL353594.13, AP001666.1, |
| | | | | | AC007686.5, AP000065.1, AC009506.5, |
| | | | | | AC021188.6, AL121952.18, AC004520.1, AL121903.13, |
| | | | | | AL121808.4, AC008427.7, AC004883.2, |
| | | | | | AC011491.5, AL138733.15, AP000501.1, AF047825.1, |
| | | | | | AC008372.6, AL352978.6, AC002430.1, |
| | | | | | AC013429.12, AC006254.10, AC008592.4, AL365505.15, |
| | | | | | AC011742.3, AC005920.1, AC008747.5, |
| | | | | | AC018711.4, U95742.1, AL161747.5, AC007384.3, |
| | | | | | AF039907.1, AL139039.17, AL583856.6, |
| | | | | | AL499604.9, AL353759.8, AC003070.1, AC008622.5, |
| | | | | | AC084865.2, AC005911.6, AC005480.3, |
| | | | | | AC008055.6, AC009412.6, AC002059.3, AC004841.2, |
| | | | | | AL121751.12, AC004139.1, AC009244.24, |
| | | | | | AC007597.3, Z83846.1, AL139809.16, AP000044.1, |
| | | | | | AC083874.2, AL050335.32, AC018639.8, |
| | | | | | AC009298.3, AC006501.5, AL133387.8, AL135928.6, |
| | | | | | AC021999.4, AP002456.3, AL049869.6, |
| | | | | | AC005399.19, AC004824.3, AC010422.7, AP000131.1, |
| | | | | | AP000209.1, Z68870.1. |
| HFEAY59 | 84 | 658685 | 1-1139 | 15-1153 | AA339768, AI150703, BE386477, AC005919.1. |
| HFIJA68 | 85 | 847074 | 1-1143 | 15-1157 | AA032221, BE881257, BF573995, BE875216, |
| | | | | | AI686139, AL048969, BF826830, BE061906, |
| | | | | | AU157011, N49425, BE775020, AV763498, |
| | | | | | AA974503, AV710762, BF525393, AV696428, |
| | | | | | BE972379, BF667616, AI354847, BF038189, |
| | | | | | AV691908, AW405593, AV684596, BF916850, |
| | | | | | BG260565, AC004969.1, AC005061.2, AC005053.1, |
| | | | | | AL109827.8, AF186249.1, AC009144.5, |
| | | | | | AP003357.2, AC006277.1, AC006435.7, AC023105.7, |
| | | | | | AL050335.32, AF243527.1, AC005323.1, |
| | | | | | AL022165.1, AC024561.4, AC004848.1, AL353807.18, |
| | | | | | AL445584.16, AP000030.1, AC018638.5, |
| | | | | | AP000505.1, AC012476.8, AL035458.35, Z85987.13, |
| | | | | | AC009060.7, AP000152.1, AC073657.5, |
| | | | | | AP000044.1, AP000112.1, AC006571.12, AC026888.6, |
| | | | | | AL022163.1, AC008569.6, Z98742.5, |
| | | | | | AL118501.22, AP001412.2, AC007845.12, Z85986.1, |
| | | | | | AP001711.1, AL035072.16, AL355392.7, |
| | | | | | AF045555.1, AL049776.3, Y14768.1, Z97985.16, |
| | | | | | AC011443.6, AL445490.6, AL117336.22, |
| | | | | | AP001716.1, AC020916.7, AC090426.1, AC008753.8, |
| | | | | | AL359091.10, D88270.2, AL583856.6, |
| | | | | | AL096791.12, AC007637.9, Z93017.6, AL050318.13, |
| | | | | | AC010150.3, AL365505.15, AC005049.2, |
| | | | | | AP000692.1, AC005250.1, AC007546.5, AC087071.2, |
| | | | | | AC006285.11, AL033529.25, AL121594.6, |
| | | | | | AL160269.14, AL136300.22, AL356481.16, AL158830.17, |
| | | | | | AC019205.4, AC007216.2, AL133448.4, |
| | | | | | AP000501.1, AC018828.3, AP001760.1, AL158198.14, |
| | | | | | AC008892.5, AC022415.5, AL109797.18, |
| | | | | | AC011497.6, AL132780.5, AC005480.3, AC004099.1, |
| | | | | | AL133249.1, AL121655.1, AC005375.4, |
| | | | | | AC009961.11, AC005522.2, AC011895.4, AC016025.12, |
| | | | | | AC012170.6, AL356652.19, AL117381.32, |
| | | | | | AL158823.11, AL138724.12, AC005914.1, AL163201.2, |
| | | | | | AL078461.38, AC034193.4, AC006057.5, |
| | | | | | AC021999.4, AL139415.10, AC004967.3, AL450339.5, |
| | | | | | AF129756.1, AC005231.2, AC002072.1, |
| | | | | | AC002070.1, AC005387.1, AL121658.2, U95742.1, |
| | | | | | AL022721.1, AC011484.4, AC010618.7, |
| | | | | | AC016830.5, AL161670.4, AC006130.1, AL138836.15, |
| | | | | | AL137792.11, AC005778.1, AL121905.23, |
| | | | | | AL049869.6, AC005081.3, AL359236.4, AC020750.3, |
| | | | | | U95740.1, AL137012.6, AC002350.1, |
| | | | | | AL121992.24, AL139809.16, AC005519.3, AL121601.13, |
| | | | | | AF196969.1, AC004990.1, AF168787.1, |
| | | | | | AL136981.22, Z98946.15, AL133373.5, AC005500.2, |
| | | | | | AF254983.2, AL049539.21, AL355094.3, |
| | | | | | AC010463.6, AL121972.17, AL354707.17, AC010530.7, |
| | | | | | AL022323.7, Z99716.4, AC007193.1, |
| | | | | | AL121926.24, AC073138.3, AC073073.2, AC005077.5, |
| | | | | | AL360169.17, AC009244.24, AP001728.1, |
| | | | | | AC005332.1, AL157823.9, AC020931.5, AC018758.2, |
| | | | | | AC005052.2, AC007387.3, AL135927.14, |
| | | | | | AC007227.3, AL359644.10, AC072052.6, AC005251.1, |
| | | | | | AC018636.4, D86992.1, AC006449.19, |
| | | | | | AL021397.1, AP001753.1, AC005291.1, AL031846.2, |
| | | | | | AL133517.11, AL359092.14, AC007242.3, |
| | | | | | AB038653.1, AC018711.4, AC022148.5, AL136137.15, |
| | | | | | AC025168.7, AC011005.7, AC004867.5, |
| | | | | | AL136126.34, AC025588.1, AC009087.4, AP001714.1, |
| | | | | | AC018506.4, AC034240.4, AC073866.16, |
| | | | | | AC007991.7, AC011465.4, AL121886.22, AC007731.14, |
| | | | | | AL356915.19, AL109654.22, AC008610.6, |
| | | | | | AJ246003.1, AF134726.1, AC008543.7, AC004883.2, |
| | | | | | AC005736.1, AL391114.12, AC069255.18, |
| | | | | | AL135839.15, AC006345.4, AL391749.4, AC007488.15, |
| | | | | | AL137918.4, AP001731.1, AL157373.23, |
| | | | | | AC000360.35, AC004873.3, AP002428.3, AC005399.19, |
| | | | | | AC005280.3, AC005200.1, AL391137.11, |
| | | | | | AL080242.11, AC007263.4, AL110502.1, AC026464.6, |
| | | | | | AL031311.1, AC020983.7, AL136980.5, |
| | | | | | AC026448.5, AC004643.1, AC024166.3, AL136295.3, |
| | | | | | AL139317.5, AC002091.1, AC073136.6, |
| | | | | | AC008403.6, AP000134.1, AP000212.1, AC004686.1. |
| HFKEU12 | 86 | 634006 | 1-1017 | 15-1031 | AW419343, AW471004. |
| HFPCZ55 | 87 | 840840 | 1-2721 | 15-2735 | AV714494, BG257295, AU137860, AA455877, |
| | | | | | AA999864, AW880615, N98831, BE048764, |
| | | | | | AW954901, BE348449, N66571, AL045243, |
| | | | | | AI420623, AI817146, AW271213, AU157344, |
| | | | | | W44682, BF955185, BE223107, AI355752, |
| | | | | | AA455880, R54821, BF589210, AI924033, AI887849, |
| | | | | | N63487, AW601474, AI923020, N63481, |
| | | | | | AW903942, AA975919, AI306145, BE767078, |
| | | | | | AA256290, R72348, N94787, BF948057, |
| | | | | | AI919421, AW880496, AW005707, AI584169, AA669696, |
| | | | | | BF754698, H10056, AI250173, AA318076, |
| | | | | | AI440227, BF001047, AW244040, H10110, N94780, |
| | | | | | N44348, AA312915, R55120, BF944396, |
| | | | | | AI358104, AW883910, AI886676, AI418315, BE838574, |
| | | | | | AI570333, BF588691, AW880645, BF909132, |
| | | | | | BF932028, BG153080, AV758808, AI345677, |
| | | | | | AI866820, AI345608, AI340533, AI348995, |
| | | | | | BG029829, AW268261, AI623941, AW020592, |
| | | | | | AI348847, AI310582, AI310606, AI345527, |
| | | | | | AI340511, BE393551, AI307569, AI524654, |
| | | | | | AL119791, AW079334, AA575874, AI336503, |
| | | | | | AW238688, BF680133, AI249877, AI344819, |
| | | | | | AI336633, AI345397, AI345567, AL515047, |
| | | | | | AI345261, AI345253, AI348870, AI345471, |
| | | | | | BE011880, BF672397, AL037582, AL037602, |
| | | | | | AA502794, AW151136, AI310940, AW265004, |
| | | | | | BF885082, BE965121, BE964700, BF924884, |
| | | | | | BF904194, BE907440, AW268072, AW191844, |
| | | | | | AI379711, AI343091, N63128, AI446373, |
| | | | | | AI573026, AI636619, AI582434, AI366992, AA070889, |
| | | | | | AW152182, AI312210, AI805688, AI334895, |
| | | | | | AI801325, AA493647, AI336512, AI473451, |
| | | | | | AI537677, AA761557, AI613343, AW162189, |
| | | | | | AA259207, AW303089, AW411043, AI859991, |
| | | | | | BE543089, AI784214, AI539771, AI929108, |
| | | | | | AI583032, AW089275, AI801556, BF816042, |
| | | | | | AK002039.1, AL117524.1, AC073125.5, BC003056.1, |
| | | | | | AC006112.2, AL360267.10, AC026307.16, |
| | | | | | Z83840.7, BC008040.1, AL121949.13, AK026793.1, |
| | | | | | AL512733.1, AC020904.6, AF218031.1, |
| | | | | | AL049423.1, AL136766.1, BC006181.1, AC004383.1, |
| | | | | | BC000316.1, AY007109.1, AF132730.1, |
| | | | | | AL359894.9, AK000655.1, BC006180.1, AC026756.15, |
| | | | | | AF245044.1, AL161804.4, AK026927.1, |
| | | | | | BC003122.1, AL512454.6, AC004057.1, AF044221.1, |
| | | | | | AC002538.1, AC009087.4, AL133069.1, |
| | | | | | BC004937.1, BC002485.1, AB055303.1, AB060887.1, |
| | | | | | AC007383.4, AF217973.1, BC002849.1, |
| | | | | | AF162270.1, BC004908.1, AC005815.1, AL049557.19, |
| | | | | | AK027162.1, AF285836.1, AF271350.1, |
| | | | | | BC006472.1, AC010137.3, AK026542.1, BC007255.1, |
| | | | | | AL117416.1, AK000568.1, AC083867.4, |
| | | | | | AK026649.1, BC006832.1, AK025435.1, BC003548.1, |
| | | | | | AF061795.1, AF151685.1, AL137479.1, |
| | | | | | AL137267.1, BC000007.1, AF111112.1, Y13350.1, |
| | | | | | AC010723.3, AC010530.7, AK026528.1, |
| | | | | | AK027095.1, AL122106.1, AK027164.1, BC001977.1, |
| | | | | | X72889.1, BC002733.1, AK026462.1, |
| | | | | | AK000137.1, AL162713.19, Z82206.1, BC008365.1, |
| | | | | | BC004362.1, AL157694.7, AL110158.1, |
| | | | | | BC008282.1, U77594.1, BC001767.1, BC008364.1, |
| | | | | | BC008718.1, AC009233.3, X83544.1, |
| | | | | | AB050534.1, AC019176.4, AK025407.1, AK000421.1, |
| | | | | | AL356747.18, AC004837.1, BC005678.1, |
| | | | | | AP001666.1, AL135796.6. |
| HFTBM38 | 88 | 638338 | 1-1927 | 15-1941 | BF968913, AA570398, BF347068, BF344994, |
| | | | | | AA326020, AL079872, BE613028, AW838912, |
| | | | | | BE044516, AA602471, BE672401, BF685077, |
| | | | | | BF746226, BE326895, AI480220, AI937044, |
| | | | | | BE061924, BE220469, BE061912, AA325896, |
| | | | | | AW072853, AI089735, BF330621, AW291237, |
| | | | | | BE772876, AW964693, AA410930, BE772826, |
| | | | | | BF747406, AW304942, AW370278, H29431, |
| | | | | | BF058399, AI862772, AI363103, N94392, |
| | | | | | AW514350, AA570138, BE772883, AA884986, |
| | | | | | AA625753, W61300, BF475720, AW070670, |
| | | | | | BE613183, AA868991, AA325436, BF742302, |
| | | | | | BE772766, BE772830, BF958918, H29336, |
| | | | | | BE839173, BE265582, H17864, H29432, BE839167, |
| | | | | | BE839170, BE772815, R21499, AA323963, |
| | | | | | AW078921, R42881, BE839096, BE839176, H11141, |
| | | | | | R49393, H17865, AI668927, BE839166, |
| | | | | | BE838964, BE839099, AI086318, H43521, BE350499, |
| | | | | | BE328515, BG056148, AI698485, AI621351, |
| | | | | | BG060048, H11056, R50356, AA994447, AI479570, |
| | | | | | AI866814, BF843988, Z41109, AI623712, |
| | | | | | AI970269, BE839097, T78036, BG109901, H42521, |
| | | | | | BE839133, H40983, AI419678, AA730385, |
| | | | | | BE839168, BE839134, W65364, BE083917, R35006, |
| | | | | | Z45394, AW370252, F07180, H46118, |
| | | | | | BE925489, AI940302, BF307296, BF871191, AW020419, |
| | | | | | AA939199, BE781405, AI095222, AW236186, |
| | | | | | AI653578, AI349957, AI345005, AI345014, |
| | | | | | AW953817, AW957086, BE878735, AI345261, |
| | | | | | BG170109, AW967299, AI146301, AA587120, |
| | | | | | AL120831, BE885353, AW058275, BE138644, |
| | | | | | BE881363, BF813196, AI421662, BF814072, |
| | | | | | AI868180, AV682089, AA811656, AI348917, |
| | | | | | AI690472, AW151974, AI340610, AI287476, |
| | | | | | AI348870, AV656903, AW302992, Z98519, |
| | | | | | N75779, AI687568, N25033, AI473471, H12358, |
| | | | | | AI167594, H89138, AW845239, AW152240, |
| | | | | | AI334738, AA903145, AL042959, AI340627, |
| | | | | | AI611728, AI241678, AI348854, BE562685, |
| | | | | | AI344931, AV757546, BE742905, AI634472, |
| | | | | | BE974031, AW827207, AA600801, AI632808, |
| | | | | | AA155840, BG112718, BF872670, BG121551, |
| | | | | | AI918554, AI784214, AI702301, AW239449, |
| | | | | | AI630932, BF344395, BE783206, BG167393, |
| | | | | | AW022682, AW074057, AI584118, AI565932, |
| | | | | | AI679959, AW129717, BF129016, BF680133, |
| | | | | | AI267185, BF812936, BF753056, AI468959, |
| | | | | | AI612885, BF036448, AW081008, BG058217, |
| | | | | | BF815930, AI879377, AI633225, BE889925, |
| | | | | | R41605, BE785905, AI804836, BE790023, BF126355, |
| | | | | | AW083572, AI656270, AW059828, BG105381, |
| | | | | | AI343091, AI335476, AW189563, BE962830, |
| | | | | | AW999906, BE613598, BF764538, BG171581, |
| | | | | | AI309443, AI311892, BE739277, AI307736, |
| | | | | | BE172864, AW020693, AA582431, AI688848, |
| | | | | | AV706353, AI349266, BG253683, BG026764, |
| | | | | | AI349628, AI349246, AI340552, AI584130, |
| | | | | | AA417278, AI500683, AA749184, AI401697, |
| | | | | | AI499104, AL045983, AI799189, AI349245, |
| | | | | | BF969900, AL357752.19, AL132768.15, |
| | | | | | AC078958.30, AC007719.7, AC073848.4, AL139022.4, |
| | | | | | AC021325.5, AC009179.17, Z99297.1, |
| | | | | | AC090498.2, AC079175.24, AC006197.1, AL035407.15, |
| | | | | | AC018904.6, AL122045.1, AL133069.1, |
| | | | | | AC006203.1, AL389935.1, BC001963.1, Z94277.1, |
| | | | | | AC068715.5, U57352.1, AK027115.1, |
| | | | | | AL121585.22, BC004324.1, BC005151.1, AL136915.1, |
| | | | | | Y00093.1, BC008070.1, BC007199.1, |
| | | | | | D89079.1, X59812.1, AF353396.1, BC003122.1, |
| | | | | | AK000137.1, AK024545.1, AK024622.1, |
| | | | | | AF117959.1, BC003105.1, AK025117.1, AL135978.4, |
| | | | | | AL355365.10, BC005165.1, AK025524.1, |
| | | | | | AK025456.1, AF090896.1, AB047930.1, BC004196.1, |
| | | | | | AB050410.1, AF218004.1, AK025549.1, |
| | | | | | AB063100.1, U80742.1, AL080126.1, AL117644.1, |
| | | | | | BC000001.1, AK026021.1, BC008717.1, |
| | | | | | AF111847.1, AL136845.1, AF056191.1, BC004119.1, |
| | | | | | BC000008.1, BC007417.1, AK027104.1, |
| | | | | | AL359623.1, S77771.1, U77594.1, BC004958.1, |
| | | | | | AL133629.1, AF192522.1, AF320073.1, |
| | | | | | AK026164.1, AB056792.1, AB047801.1, AL389957.1, |
| | | | | | BC002444.1, AK024588.1, BC009395.1, |
| | | | | | BC001093.1, BC007255.1, AK026744.1, AF113222.1, |
| | | | | | AL133057.1, AK027188.1, AL137558.1, |
| | | | | | AL389939.1, BC004883.1, BC000283.1, AL080074.1, |
| | | | | | BC004368.1, AF025439.1, BC005805.1, |
| | | | | | AK026590.1, BC001045.1, AK026924.1, AJ010277.1, |
| | | | | | AL139279.7, AL031274.1, AL442643.2, |
| | | | | | AL442082.1, AF105427.1, AK026649.1, BC007796.1, |
| | | | | | BC007609.1, AL133010.1, BC002607.1, |
| | | | | | BC004156.1, AC007390.3, AL161899.21, AL050310.6, |
| | | | | | BC004920.1, AF261134.1, BC000348.1, |
| | | | | | AL162008.1, BC006480.1, BC003052.1, AB063074.1, |
| | | | | | AF217986.1, BC006196.1, AF060866.1, |
| | | | | | BC007207.1, AK000257.1, BC000570.1, AL136752.1, |
| | | | | | AK027136.1, D44497.1, AJ406932.1, |
| | | | | | AL162062.1, AL135933.11, AJ406937.1, BC008930.1. |
| HFTDH56 | 89 | 862021 | 1-806 | 15-820 | BF105071, AI670093, AI669240, AI151442, |
| | | | | | AA194946, AW411125, AI808052, AA024998, |
| | | | | | BF732418, AA700297, H12618, AI688673, |
| | | | | | AI671406, AA702853, AI078393, BE502303, R66047, |
| | | | | | AW885572, AI189137, BF512887, AA425375, |
| | | | | | AI656096, AI287581, AW195085, N93931, R66048, |
| | | | | | AA195715, AI800331, AI654892, T33449, |
| | | | | | BF057001, AA195087, H02011, H90799, AA115390, |
| | | | | | AA195556, AW885729, AA903701, R24216, |
| | | | | | N98972, AI300252, R24215, AW957374, AA195752, |
| | | | | | N69833, AA373336, H90748, Z40465, |
| | | | | | W90007, BF059554, T35437, AA133417, T29924, |
| | | | | | AA024872, AI473272, W40431, AA425467, |
| | | | | | BC001087.1, AK027267.1, AC023154.5. |
| HFVHW43 | 90 | 570948 | 1-1219 | 15-1233 | AI761677, AL047645, BE243506, AA169245, |
| | | | | | BE246405, AA536127, BE064798, AI364568, |
| | | | | | AW575409, AW085690, AI298660, AW844145, |
| | | | | | AA492266, Z23150, AI281401, AA247731, |
| | | | | | AI078409, AL132795.12, AC009274.9, AL133324.13, |
| | | | | | AC034245.4, AL158207.15, AC016831.1, |
| | | | | | AC011491.5, Z82242.1, AC008391.5, AF110184.1, |
| | | | | | AC004659.1, AL161665.5, AP000689.1, |
| | | | | | AL158830.17, AL035685.21, AC005000.2, AL353692.14, |
| | | | | | AL451162.14, AL133551.13, |
| | | | | | AC005057.2, AL133382.8, AL353614.9, AP000338.2, |
| | | | | | AC009247.12, AC005327.1, AP000216.1, |
| | | | | | AC008753.8, AL357519.19, AL157372.18, AL162578.13, |
| | | | | | AC005722.1, AP000499.1, AC005208.1, |
| | | | | | AC016697.8, AC005913.2, AL121658.2, AC008745.6, |
| | | | | | AL137067.7, AC006111.3, AF235097.1, |
| | | | | | AL050341.18, AC004216.1, AC011455.6, AC079754.4, |
| | | | | | AC053467.1, AC008755.6, AC005412.6, |
| | | | | | AC022211.5, AC011461.4, AL121655.1, AL121653.2, |
| | | | | | AL079342.17, AC009470.4, AC016637.6, |
| | | | | | AL133347.28, AC004826.3, AB026898.1, AP003357.2, |
| | | | | | AL391834.8, AC021999.4, AP000744.4, |
| | | | | | AC022007.3, AC005844.7, AC020754.4, AF111168.2, |
| | | | | | AC005355.1, AC007773.1, AL139390.15, |
| | | | | | AC007383.4, AC005104.1, AK022308.1, AC020916.7, |
| | | | | | AC013429.12, AC012170.6, AL354674.5, |
| | | | | | AC004150.8, AC004129.1, AC022002.4, AC005839.1, |
| | | | | | AL136992.22, Z97054.1, AF038458.1, |
| | | | | | AL158198.14, AL050335.32, AL121920.21, U52111.2, |
| | | | | | AL136979.16, AC020744.4, AL450346.4, |
| | | | | | AC004262.1, AL137139.9, AK022406.1, AP001063.1, |
| | | | | | AL133312.3, AC020550.4, AC002115.1, |
| | | | | | AP003475.2, AP001760.1, AL499628.1, AL035249.6, |
| | | | | | AL354928.9, Z99916.1. |
| HGBHP91 | 91 | 693011 | 1-1040 | 15-1054 | AA825851, AA736485, AA805014, AI792627, |
| | | | | | AI862231, AW086361, AI348722, BE139397, |
| | | | | | AI254439, AI349662, AI053450, AI053903, |
| | | | | | AW102980, AC005017.1, AL591770.1, AC005484.2, |
| | | | | | AC018523.9, AL137190.5, AC016691.10, AL354751.7, |
| | | | | | AL513366.11, AC009137.6, AC083871.2, |
| | | | | | AC024166.3, Z77249.1, AL161670.4, AC007934.7, |
| | | | | | AL137139.9, AB026898.1, AL353613.10, |
| | | | | | AC018494.6, AL110502.1, AC026770.6, AL031053.1, |
| | | | | | AC073366.3, AC005014.1, AL138499.4, |
| | | | | | AL158828.14, AP002982.2, AL133396.2, AC007619.22, |
| | | | | | AC007327.1, AL022723.4, AC004832.3, |
| | | | | | AC004491.1, AC005189.1, AC009483.3, AC003950.1, |
| | | | | | AC009961.11, AL031681.16, AC004813.2. |
| HHEAK45 | 92 | 765278 | 1-2000 | 15-2014 | BG170168, BG119757, AU137041, BF307487, |
| | | | | | AI884713, AW583171, BF684161, BF434422, |
| | | | | | AI761426, AW961739, BE388217, AI816016, |
| | | | | | AI361955, AA808964, AU156996, AI869337, |
| | | | | | AA131094, AW291287, AW043617, AA535378, |
| | | | | | AW614114, AI249699, AI361947, AI218746, |
| | | | | | AI827821, AI139529, AI221685, AW961740, |
| | | | | | AI123285, W72783, AI469925, AL049086, AI076164, |
| | | | | | AA448078, N79760, AA927285, AI130718, |
| | | | | | AW103188, AA902207, W74291, AW015957, |
| | | | | | AW473667, AA447579, AI770126, AA886775, |
| | | | | | AI001738, AA884899, AI948509, BE467312, |
| | | | | | AW882943, AI765248, D12320, N72712, |
| | | | | | AA758092, BE295299, W79163, AI624834, N39042, |
| | | | | | BF822970, H23141, AA347762, W07208, |
| | | | | | BE940629, AA889154, AI081857, AI205834, AI377270, |
| | | | | | AA115546, AI220570, W02262, R42088, |
| | | | | | AW072212, N93000, R00155, W72784, AA677121, |
| | | | | | R00154, AI160329, AW450558, AA905549, |
| | | | | | F04905, H53287, AW262887, AA130970, BE856483, |
| | | | | | AI632990, W21211, AA115083, AA347763, |
| | | | | | N48234, AA907343, AI247907, AA665725, H78076, |
| | | | | | AW366883, AK001963.1, AL035690.10, AC010388.5, |
| | | | | | AL136839.1, AF086405.1, AC007533.2, |
| | | | | | AC010209.13, AL133341.12, AC023512.28, AC008379.6, |
| | | | | | AL033529.25, AL110120.11, |
| | | | | | AL133271.22, AC006022.1, AL138721.16, AC004694.1, |
| | | | | | AC005899.1, AL117694.5, AC004129.1, |
| | | | | | AL359236.4, AL121906.18, AC002465.1, AL133510.13, |
| | | | | | AL132986.4, AC004263.1, AL512782.6, |
| | | | | | AL035423.4, AB020867.1, AC008088.8, AC005821.1, |
| | | | | | AC008012.8, AL138878.10, AC087730.2, |
| | | | | | AC022509.21, AL391684.6, AL024474.1, AC012499.7, |
| | | | | | AL356969.12. |
| HHEOW19 | 94 | 886174 | 1-1575 | 15-1589 | AL526527, BG113611, BF978449, BG112152, |
| | | | | | BG119645, AW956161, BG180022, AW592434, |
| | | | | | BF434127, AI688154, AA890706, BE266768, |
| | | | | | BE700345, AI192484, AA908255, AA516363, |
| | | | | | AA446942, AW172490, AA923183, AI499002, |
| | | | | | AI766675, AI203601, AA894580, AI144379, |
| | | | | | BF346299, BF969646, AU118533, BE887334, |
| | | | | | AV760144, BE874811, AA865339, W72592, |
| | | | | | AW005448, AU143717, AU142574, AA906273, |
| | | | | | AI021941, AU128074, AW663560, AU131132, |
| | | | | | AI304388, AA669930, AI304344, AI346611, |
| | | | | | AU125747, AI311556, AA703026, AI266188, |
| | | | | | AL516896, AI025716, AA907108, BE390622, |
| | | | | | AI870412, AI870389, BE785805, AI288868, |
| | | | | | AA733097, BE789031, BF027056, BF035717, |
| | | | | | BE870307, BE389154, AL538540, N21316, |
| | | | | | BE780661, AA075002, AU129647, BG178120, |
| | | | | | AA774581, BE786810, BG165094, AA075113, |
| | | | | | AA443366, H70758, BE387196, AI525737, |
| | | | | | BF346268, AI264657, AA676415, W80864, AA644550, |
| | | | | | AI023409, AA772235, W67811, AW501988, |
| | | | | | AI807013, AA299952, AW474224, AI269880, |
| | | | | | AW629279, BG177563, BF800060, W67866, |
| | | | | | BF034810, BE547050, BG028159, BE083939, |
| | | | | | N80176, AI051331, AW592042, BE247222, |
| | | | | | AI201765, AA860195, AA081004, BE244890, |
| | | | | | AA019463, N34142, W88877, AI193593, |
| | | | | | N67021, AI192316, AW795216, N26033, BE084138, |
| | | | | | BE002622, AI084602, BE774587, BE832659, |
| | | | | | W76106, AW140058, N42641, BE832664, AA058752, |
| | | | | | AW994714, AW994775, AI768257, AA018536, |
| | | | | | AA888922, AW085016, W42800, BE093798, |
| | | | | | AA706242, AW994696, BE813681, AA384060, |
| | | | | | AI860208, N46027, AA081147, R96612, |
| | | | | | AA887957, BE708347, AW993971, AW192384, |
| | | | | | N41872, BF794279, AU120547, AA370582, |
| | | | | | BE832568, AW591801, AW236343, AW157602, |
| | | | | | N40396, AW294314, AW272410, AA723436, |
| | | | | | W35238, N31251, AA886238, BF817120, |
| | | | | | BF818982, AA373471, AW131477, H95094, AA808734, |
| | | | | | AI871211, AL038165, H79809, AI904418, |
| | | | | | AA534807, AI799628, AA299951, BF361806, |
| | | | | | AA001163, AA608755, BE798428, BE084059, |
| | | | | | AA988507, AI761279, AA564284, BE002993, |
| | | | | | AI949117, BF817107, AV756014, AW384875, |
| | | | | | AA393462, AW514936, AA454946, AA922856, |
| | | | | | AW408230, N30627, BE779312, W81429, |
| | | | | | BF448458, AA876205, H58732, AA831555, BG166267, |
| | | | | | BF695720, AI743703, N56626, N66943, |
| | | | | | AA017731, AV684502, AA724567, W24284, BG164949, |
| | | | | | AW957013, AA724553, H03450, BF056116, |
| | | | | | AL522121, H03534, W80538, AA193154, N30204, |
| | | | | | N44250, AA485314, AA485471, AI630146, |
| | | | | | AA806310, AA400785, AL043900, BE160214, |
| | | | | | AI338385, N36376, BG014060, AU133112, |
| | | | | | AW273251, AI218055, BE868284, AA923109, N36810, |
| | | | | | AA814225, N84302, AA017732, AA313506, |
| | | | | | AI906913, AI341766, N76206, AI298554, W03500, |
| | | | | | AW002024, W86743, AA746052, BF365269, |
| | | | | | W81430, AI351319, AC006001.2, AF098276.1, |
| | | | | | AC027644.9, AJ250042.1, BC000882.1, AF098275.1, |
| | | | | | AP002827.3, D13641.1, AC004074.1, |
| | | | | | AF098274.1, AC008267.6, AC005077.5, AK001702.1, |
| | | | | | AF126961.1, AF126960.1, AF126962.1, |
| | | | | | AC005231.2, AF126958.1, AK026600.1, AB060825.1, |
| | | | | | AC006285.11, AK024538.1, AL122050.1, |
| | | | | | AC016025.12, BC002733.1, AL137538.1, AB056809.1, |
| | | | | | AK026927.1, AL136787.1, AK026480.1, |
| | | | | | AL049466.1, AL110196.1, AB063071.1, AL162006.1, |
| | | | | | AL122093.1, AL050277.1, AL110221.1, |
| | | | | | AL110225.1, AK026629.1, AB055361.1, AK026506.1, |
| | | | | | AK026542.1, BC008387.1, AF091084.1, |
| | | | | | AK026583.1, AL049430.1, BC001967.1, AB048954.1, |
| | | | | | BC008070.1, AL133080.1, AL050146.1, |
| | | | | | AL050393.1, AL389935.1, AF090943.1, AL049452.1, |
| | | | | | AK025084.1, AK025092.1, AL122100.1, |
| | | | | | AF090886.1, AL136789.1, AL136586.1, S78214.1, |
| | | | | | AL136882.1, AL137478.1, AB048953.1, |
| | | | | | AK026959.1, AL136844.1, AB063046.1, AK026784.1, |
| | | | | | AL133072.1, U42766.1, BC003687.1, |
| | | | | | AB019565.1, AK026741.1, AF017790.1, AL133557.1, |
| | | | | | AL050108.1, BC007021.1, S61953.1, |
| | | | | | AK027113.1, Y16645.1, AL049283.1, AB047615.1, |
| | | | | | AK000137.1, AB055366.1, AK025484.1, |
| | | | | | AL136892.1, AK000486.1, AL133560.1, AB051158.1, |
| | | | | | AK026744.1, AK024992.1, AK026086.1, |
| | | | | | AL117583.1, AB060908.1, AK025491.1, AL050116.1, |
| | | | | | AF125948.1, AF097996.1, AB060916.1, |
| | | | | | BC001045.1, AL512689.1, BC007199.1, AF217982.1, |
| | | | | | AL050024.1, AL137459.1, AK000083.1, |
| | | | | | AK027204.1, AL359615.1, AL442082.1, BC006807.1, |
| | | | | | AL133565.1, AL049464.1, BC005858.1, |
| | | | | | AK000618.1, AB055315.1, AB056420.1, AL136893.1, |
| | | | | | AL133075.1, AL117457.1, AL133016.1, |
| | | | | | AL157482.1, AL512719.1, AL512718.1, AF090900.1, |
| | | | | | AL389939.1, AB049892.1, AF218014.1, |
| | | | | | AK026045.1, AK026647.1, AL049314.1, AL390167.1, |
| | | | | | AJ242859.1, AL136747.1, AK025015.1, |
| | | | | | AL096744.1, AK000323.1, AL442072.1, AB060914.1, |
| | | | | | AL117394.1, AL136749.1, BC008488.1, |
| | | | | | AL137283.1, AK000445.1, AB060893.1, AL136780.1, |
| | | | | | AK000212.1, AB062938.1, AB060852.1, |
| | | | | | BC008417.1, AL137550.1, AL133606.1, S76508.1, |
| | | | | | AK026592.1, AK027868.1, BC008365.1, |
| | | | | | AL136799.1, AB060826.1, AF078844.1, AL136928.1, |
| | | | | | AK024588.1, AB063070.1, AK026855.1, |
| | | | | | BC008899.1, AK026522.1, AB060863.1, AL117460.1, |
| | | | | | AK025239.1, AB052200.1, AK027142.1, |
| | | | | | AB047904.1, AF260566.1, AL136845.1, AF106862.1, |
| | | | | | AL080124.1, X82434.1, AL137557.1, |
| | | | | | AL133640.1, AL512754.1, AL133081.1, AL353957.1, |
| | | | | | AL117585.1, AL359601.1, AB055368.1, |
| | | | | | AL136768.1, AF090903.1, AL050149.1, AF262032.1, |
| | | | | | AK000206.1, AF111847.1, AL157431.1, |
| | | | | | BC004556.1, AL359620.1, BC006195.1, AL122123.1, |
| | | | | | AB060912.1, AF090934.1, BC001418.2, |
| | | | | | AL512746.1, AK026526.1, AF125949.1, AL359618.1, |
| | | | | | AL137521.1, BC007326.1, AK027096.1, |
| | | | | | Y10936.1, U58996.2, AB052191.1, AL137648.1, |
| | | | | | BC004195.1, AK027213.1, BC007674.1, |
| | | | | | AK027200.1, AE219137.1, Z37987.1, AK026452.1, |
| | | | | | AK025772.1, AL512765.1, AL136864.1, |
| | | | | | AB062978.1, AK024524.1, BC003683.1, AB048964.1, |
| | | | | | AL136615.1, AK025339.1, AF225424.1, |
| | | | | | AL512733.1, AL080137.1, AL133113.1, AF061943.1, |
| | | | | | AL122110.1, AL137429.1, AK026057.1, |
| | | | | | AK026353.1, AK027082.1, AK026613.1, AB047801.1, |
| | | | | | AB055303.1, AB060887.1, AK026534.1, |
| | | | | | AL080060.1, AL110222.1, AL162083.1, AK027114.1, |
| | | | | | AK025410.1, Y14314.1, AF146568.1, |
| | | | | | AF090896.1, AL117435.1, BC008983.1. |
| HHFFL34 | 95 | 753230 | 1-2618 | 15-2632 | BE904333, BE793888, BE878174, BF526368, |
| | | | | | BF342728, AW958460, BF342223, BE744311, |
| | | | | | BE728360, BE269184, BE389774, BE728264, |
| | | | | | AA639278, BE348724, BF685026, BE275174, |
| | | | | | BF237991, AI913307, BE729585, BG122285, |
| | | | | | AW021154, AA599241, BE729928, BE700883, |
| | | | | | BE772076, BF568665, BE700891, BE818932, |
| | | | | | BF374312, BF330082, BF330070, BE700860, |
| | | | | | BE700890, BF330075, AW249358, AI128858, |
| | | | | | BG112722, AA657534, BF330069, BE700887, |
| | | | | | AW408042, BE180234, AW068020, AA310538, |
| | | | | | BF568975, AW073205, BF330083, BF372989, |
| | | | | | BE700929, AW751261, BF363307, BF330096, |
| | | | | | BF372993, BF330072, BF372977, BG260565, |
| | | | | | BF330060, AA045741, BF372995, BE700916, |
| | | | | | AW248940, BF330092, AF074667, BE772071, |
| | | | | | AV762783, AI753898, BG012246, BF330095, |
| | | | | | AA352967, BF363296, BE818937, BE772069, |
| | | | | | AL037632, AV762145, BF372990, BE538259, |
| | | | | | BF330098, BE707514, BF330088, AV764490, |
| | | | | | BE909125, BE541237, BG032943, BF363289, |
| | | | | | BG164166, AL048969, BF363293, AV722075, |
| | | | | | BF330099, AU119532, BF330063, AV700545, |
| | | | | | BF372988, AU117926, AW068268, AL044340, |
| | | | | | BG034591, AW962296, AV714931, AV718718, |
| | | | | | BF330055, AI457389, AV719402, AV720570, |
| | | | | | AW963982, BF828714, BG028665, AA984258, |
| | | | | | BF826830, BF330078, AV759046, BF678427, |
| | | | | | BE818978, AW407562, BF330073, BE796439, |
| | | | | | BE396893, BF330057, AL135698, AA577824, |
| | | | | | AV719941, BF744954, AA284247, AA504646, |
| | | | | | AW965008, BF679792, BF346320, AA608588, |
| | | | | | BF330066, BF841650, AV700498, AA680243, |
| | | | | | AV699393, AW847118, BF673854, AA608612, |
| | | | | | BE541321, AV700663, AL135377, AW405593, |
| | | | | | AI732120, AL515875, AV760723, BF372992, |
| | | | | | AW188427, AI132963, AW962194, AV762693, |
| | | | | | AA526787, BF363288, AA487475, BF330089, |
| | | | | | BE004187, BF213459, BE154495, AA328000, |
| | | | | | AA362575, AA355142, AK027699.1, AK027850.1, |
| | | | | | AC008764.7, BC007731.1, AK024313.1, Z83840.7, |
| | | | | | AL137162.25, AC005839.1, AC004655.1, |
| | | | | | AL022322.1, AL050349.27, AC005781.1, AL023803.3, |
| | | | | | AL033519.42, AC004000.1, AC011737.10, |
| | | | | | AC006001.2, AP001726.1, AC007686.5, AC005522.2, |
| | | | | | AC008622.5, AC010311.8, AC000070.2, |
| | | | | | AC010203.13, AC013717.8, AC004797.1, AL031577.1, |
| | | | | | AC002544.1, AC068533.7, AL139317.5, |
| | | | | | AC019171.4, AC020558.4, AC006241.1, AL034423.21, |
| | | | | | AC019205.4, AC010378.6, AC011469.6, |
| | | | | | AC004253.1, AL035587.5, AL109952.15, AL020997.1, |
| | | | | | AC006511.5, AC007009.2, AC005225.2, |
| | | | | | AP003357.2, AC009144.5, AP001208.3, AL133545.10, |
| | | | | | AL021155.1, AC010618.7, AL049872.3, |
| | | | | | AL159168.15, AP000555.1, AL109752.13, AC068799.14, |
| | | | | | AC016776.6, AC008440.8, AL132838.4, |
| | | | | | AC006312.8, AC026172.3, AC002551.1, AC000353.27, |
| | | | | | AL096841.6, Z69917.1, AC006329.5, |
| | | | | | AL158040.13, AC079602.15, AL391827.18, Z93015.9, |
| | | | | | AC073539.3, AC002310.1, AL139809.16, |
| | | | | | AL136137.15, AC084865.2, AC011485.6, AC008745.6, |
| | | | | | AC004824.3, AC010458.5, AC004859.2, |
| | | | | | AC006468.9, AL357314.11, AC008626.5, AL445248.7, |
| | | | | | AC002115.1, AC006345.4, AJ277546.2, |
| | | | | | AC024078.4, AL354720.14, AC007546.5, AL109825.23, |
| | | | | | U91326.1, AC005231.2, AL049636.22, |
| | | | | | AC007421.12, AC005519.3, AP001748.1, Z93244.1, |
| | | | | | AC011495.6, AL024498.12, AC005041.2, |
| | | | | | AC007384.3, AC072052.6, AL109743.4, AL161626.20, |
| | | | | | AL136313.27, AP000359.1, AC011811.42, |
| | | | | | AP000689.1, AC011489.6, AC007564.9, Z85987.13, |
| | | | | | AC009123.6, AC009220.10, AL133353.6, |
| | | | | | AC004686.1, AC004491.1, AC020612.40, AL365232.24, |
| | | | | | AP002812.3, AJ300188.1, AC016697.8, |
| | | | | | AC002430.1, AC010742.4, AC008569.6, AC005899.1, |
| | | | | | AC005052.2, AL121905.23, AC018738.4, |
| | | | | | AC040171.3, AC073138.3, AC005666.1, AL080243.21, |
| | | | | | AL022165.1, AC008427.7, AL034548.25, |
| | | | | | AC016587.7, AL035659.22, AC026431.3, AC011005.7, |
| | | | | | AC002073.1, AL049795.20, AC005971.5, |
| | | | | | AC005562.1, AC021999.4, AL022721.1, AC011487.5, |
| | | | | | AC002301.1, AL135839.15, AC005089.2, |
| | | | | | AP000113.1, AP000045.1, AP001670.1, AL589723.7, |
| | | | | | AC002314.1, AC010677.4, AL034380.26, |
| | | | | | AC005722.1, AC011470.5, AC006435.7, AC020754.4, |
| | | | | | AC004873.3, AC005324.1, AL049776.3, |
| | | | | | AL132780.5, AL445237.16, AC004167.1, AC025165.27, |
| | | | | | AC007263.4, AL022320.23, AC002319.1, |
| | | | | | Z98051.6, AC073838.6, AC040160.4, AC018523.9, |
| | | | | | AL162272.10, AC005056.2, AC002996.1, |
| | | | | | AL353748.13, AC009131.6, AC005484.2, AC002302.1, |
| | | | | | AC007536.9, AL050307.13, AC010328.4, |
| | | | | | AC007707.13, AL160271.19, AF196969.1, AL138784.30, |
| | | | | | AL121928.13, AL161747.5, AC073073.2, |
| | | | | | AC012512.7, AC026672.44, AL138724.12, AC004151.1, |
| | | | | | AC012476.8, AC007374.6, AL121653.2, |
| | | | | | AL031005.1, AL355392.7, AC011895.4, AC008397.7, |
| | | | | | Z93017.6, AC011500.7, AL354932.26, |
| | | | | | AL035071.17, AP001619.1, AL132768.15, AC004019.20, |
| | | | | | AC007383.4, AC009247.12, AC010422.7, |
| | | | | | AL023881.24, Z95331.2, AL049694.9, AC008372.6, |
| | | | | | AP001725.1, AC005102.1, AL359091.10, |
| | | | | | AC011462.4, AC073657.5, AL354707.17, AL356481.16, |
| | | | | | AC008687.4, Z95116.1, AC008655.6, |
| | | | | | AP001711.1, AC018636.4, AL049643.12, AP001718.1, |
| | | | | | U62293.1, AC021016.4, AL121890.34, |
| | | | | | AL135924.11, AC004583.1, AL139396.17, AL049569.13, |
| | | | | | AL163268.2, AL356299.16, AC083884.6, |
| | | | | | AC003010.1, AC006023.2, AL117382.28, AC010326.6, |
| | | | | | AL499604.9, AC007688.15, AC004966.2, |
| | | | | | AC013429.12, AL356652.19, AC011491.5. |
| HHFFS40 | 96 | 824059 | 1-1802 | 15-1816 | BE877462, BF792909, BG260156, BG179110, |
| | | | | | BG112928, BF980559, BE544254, BG170563, |
| | | | | | BG107623, BF345994, AI763152, BE566242, |
| | | | | | BF346074, BF672687, AW299766, AI809063, |
| | | | | | AI658640, AW956747, BG256039, BG255904, |
| | | | | | AA630311, BE958056, BE873360, BE858485, |
| | | | | | AW072428, AW590087, AW996985, BE786419, |
| | | | | | AW963580, BF694200, BE565358, BF669441, |
| | | | | | AI521984, BF210963, BE564370, BG254405, |
| | | | | | AA554914, BE877693, BE872103, AI802337, |
| | | | | | BF242746, AA837003, BE674128, AA704063, |
| | | | | | AI697970, AI360303, AA676411, AI335019, |
| | | | | | BF940184, AA758569, AI341577, AI368085, |
| | | | | | AA976338, AA131990, BF594262, W52093, |
| | | | | | AI400190, AV655671, AA776953, AI720984, |
| | | | | | AI969963, BE538461, AI652576, AI924939, |
| | | | | | AI281274, AA610809, BF999637, BE540644, |
| | | | | | BF185031, BE564453, BF217183, AA599513, |
| | | | | | W60435, AI364496, AA622238, BE564859, |
| | | | | | AA173574, BE564942, AW181884, AA486013, |
| | | | | | AA452454, AI377701, H57481, AA775104, |
| | | | | | AA809861, BG110906, AI096469, R22549, AI948687, |
| | | | | | BG170098, AW467467, BF666042, AA136404, |
| | | | | | AI914432, AI952665, R72480, W19427, AI651051, |
| | | | | | R63250, BE768905, AA532466, BE564416, |
| | | | | | N92774, BE866100, AA487194, AA191014, |
| | | | | | AA436377, AA419582, N24149, AW072184, |
| | | | | | H99384, AW962785, AW731695, W52957, |
| | | | | | AA885982, AA136214, AI000422, AA885090, |
| | | | | | R73256, AA721779, W59973, AW273180, |
| | | | | | AI969516, AW996746, AA648637, AW572880, |
| | | | | | H26458, AA775095, R93450, AA721131, |
| | | | | | AI866701, BE929433, BF185491, AW129228, |
| | | | | | AW181995, R80927, AA629087, AV725677, |
| | | | | | AA486839, AA809868, R64668, R63022, |
| | | | | | BE247146, BF434557, AW381266, AW129216, D79097, |
| | | | | | BE925523, AA612598, R93403, AA370728, |
| | | | | | AA564131, AA330516, AA629088, R62968, |
| | | | | | AA564772, BE047336, R24143, BF808222, |
| | | | | | BF807139, AA876640, H58002, AA384569, |
| | | | | | AW261840, AW361037, AA099083, N40700, |
| | | | | | AI926874, N27938, AA513948, BF246298, |
| | | | | | AI499459, BF211955, AW857210, D60986, |
| | | | | | AA219670, AA247626, AA935365, H58409, |
| | | | | | AA829160, AA383046, BF960785, AA381919, |
| | | | | | R14311, BF748705, BE087099, N54068, BE769764, |
| | | | | | N56083, BE169239, AI583038, AI701882, |
| | | | | | AW193574, AI886791, AW080675, AA131685, |
| | | | | | BF954179, T10637, AI619990, AI866695, |
| | | | | | AI520974, AI446785, AA173533, AI953438, AA746406, |
| | | | | | BE540062, BF960843, BG014707, BE092961, |
| | | | | | AA604836, BE720113, AI358254, AI445976, |
| | | | | | AA190478, BG015664, BF760985, AI634805, |
| | | | | | AI254727, BF812938, BG110684, AI263312, |
| | | | | | BG165051, AI554218, BF871413, AI961589, |
| | | | | | AI915291, BG249582, BE047852, AW026882, |
| | | | | | BE965621, BF969126, AI637584, AW022699, |
| | | | | | AI566670, AI590423, AI274759, AW268067, |
| | | | | | AL514457, BE536058, AI568138, AI431909, |
| | | | | | BF811804, BF856017, AW104141, AL133078.1, |
| | | | | | AJ296152.1, AL133113.1, AL389939.1, AF090943.1, |
| | | | | | BC003682.1, AF262032.1, AK026741.1, |
| | | | | | AL137527.1, AL162083.1, AL122050.1, AB047904.1, |
| | | | | | AL512689.1, AL442082.1, AK024538.1, |
| | | | | | AL133557.1, AL136784.1, AF090900.1, AB060912.1, |
| | | | | | BC001967.1, AL442072.1, AK025339.1, |
| | | | | | AL080124.1, AL117585.1, AF146568.1, AL389982.1, |
| | | | | | AB055361.1, X53587.1, BC004529.1, |
| | | | | | X69819.1, BC004958.1, AK026542.1, BC008387.1, |
| | | | | | S61953.1, AF078844.1, S78214.1, BC008893.1, |
| | | | | | BC004533.1, AF090901.1, AL512718.1, AF090934.1, |
| | | | | | AK000432.1, AL122045.1, AF207829.1, |
| | | | | | AL136892.1, AK026045.1, AB055374.1, AB056420.1, |
| | | | | | AF090903.1, AK026504.1, AL136850.1, |
| | | | | | AK026526.1, AL050149.1, BC002733.1, AF106862.1, |
| | | | | | AF104032.1, AL137526.1, U58996.2, |
| | | | | | AB048954.1, AF125949.1, AL122110.1, AB055315.1, |
| | | | | | AK025967.1, BC002454.1, BC008417.1, |
| | | | | | AB055303.1, AB060887.1, AF125948.1, AF061573.2, |
| | | | | | AB048994.1, AB049900.1, AK026583.1, |
| | | | | | BC006164.1, AB060873.1, AL133665.1, AL512746.1, |
| | | | | | AL512719.1, AF057300.1, AF057299.1, |
| | | | | | AK026480.1, AL049382.1, BC006103.1, AL359596.1, |
| | | | | | AL080127.1, AL133016.1, AL353956.1, |
| | | | | | AL050393.1, AL133080.1, AK025391.1, AJ299431.1, |
| | | | | | AL096744.1, BC008280.1, AL136844.1, |
| | | | | | AB055352.1, AL136845.1, BC007021.1, AF230496.1, |
| | | | | | AB049892.1, BC008983.1, AL050116.1, |
| | | | | | AL359941.1, AB047887.1, AK025312.1, AL137705.1, |
| | | | | | AL162006.1, AL117460.1, AK025798.1, |
| | | | | | AB056809.1, AL110221.1, AL117394.1, BC003687.1, |
| | | | | | AK027213.1, AK026647.1, AL137538.1, |
| | | | | | AL080234.1, BC003683.1, AL136843.1, BC008899.1, |
| | | | | | AL136749.1, AL512684.1, AB063070.1, |
| | | | | | AL110196.1, AB048913.1, AL137459.1, AL137533.1, |
| | | | | | AL136789.1, AK026927.1, AB049758.1, |
| | | | | | AL050108.1, AL389935.1, AB049848.1, AL136799.1, |
| | | | | | BC007389.1, AK026959.1, AL117435.1, |
| | | | | | AL136928.1, AK026642.1, AB055366.1, AK027164.1, |
| | | | | | AK026630.1, AL122098.1, AK000391.1, |
| | | | | | AL133565.1, AK000614.1, BC007326.1, BC002798.1, |
| | | | | | AK025435.1, AK026506.1, BC006195.1, |
| | | | | | AK000718.1, BC008488.1, AF091084.1, AL137429.1, |
| | | | | | X82434.1, AK027096.1, AL137557.1, |
| | | | | | AL133558.1, AF217966.1, AL049314.1, AK026744.1, |
| | | | | | AB063046.1, AL137550.1, BC006472.1, |
| | | | | | AK025632.1, AK000753.1, AL359601.1, AL136768.1, |
| | | | | | BC006525.1, AL157431.1, AL512765.1, |
| | | | | | BC004556.1, AL080137.1, BC008365.1, AK024524.1, |
| | | | | | AL133067.1, AL390154.1, AF073483.1, |
| | | | | | AB062942.1, AB052191.1, AL049452.1, AL137560.1, |
| | | | | | AL133640.1, BC004362.1, AL359583.1, |
| | | | | | AK025084.1, AK025092.1, AK026551.1, AB048975.1, |
| | | | | | AL137548.1, BC002523.1, AL117457.1, |
| | | | | | AK026452.1, AL359618.1, AF352728.1, BC004368.1, |
| | | | | | AL136586.1, AF090896.1, AF162270.1, |
| | | | | | AK026600.1, AL122093.1, AL050138.1, AL110222.1, |
| | | | | | AL050015.1, AF097996.1, AL136615.1, |
| | | | | | BC005151.1, BC004530.1, AB060929.1, AB055368.1, |
| | | | | | Y14314.1, AK000323.1, AK025484.1, |
| | | | | | BC006133.1, AK027116.1, X72889.1, AF358829.1, |
| | | | | | AL133093.1, AB048953.1, AB047930.1, |
| | | | | | AL512754.1, AL137271.1, AL133075.1, AB048974.1, |
| | | | | | AL136864.1, AF321617.1, AY026527.1, |
| | | | | | AL137300.1, AL136787.1, AF061943.1, AK026865.1, |
| | | | | | AK026855.1, AK000618.1, AF218014.1, |
| | | | | | U39656.1, AB060863.1, AB060908.1, AJ242859.1, |
| | | | | | AB047801.1, AK025573.1, AB063077.1, |
| | | | | | AK000450.1, BC000348.1, AK026592.1, AL050146.1, |
| | | | | | AY034001.1, AF056191.1, U42766.1, |
| | | | | | AL133606.1. |
| HHGCS78 | 97 | 634605 | 1-561 | 15-575 | AA523300, AI962903, AA528118, BE858430, |
| | | | | | AW083553, BE858714; BE893836, AI190409, |
| | | | | | BE856210, AA769649, AI693556, AI366045, |
| | | | | | AI609800, AI337942, AW769813, AA613831, |
| | | | | | AI051792, BE874678, AI799232, AA682810, |
| | | | | | BE769324, AI810459, BF689177, BF593003, |
| | | | | | AA705587, BE896233, AI421592, AI421946, |
| | | | | | AI421527, BE731882, BE855826, AW817923, |
| | | | | | AI962361, R79580, AA581733, AI342639, |
| | | | | | AA649978, AI984920, AI624953, AA682704, |
| | | | | | AW802785, AL119863, BG163618, AL120853, |
| | | | | | BG029667, AW059828, BF814420, BF792961, |
| | | | | | AI358701, BF904265, BF338002, AL134259, |
| | | | | | AL042627, BF970658, AI815855, BG033723, |
| | | | | | BE393551, BG180996, BG026447, BG114104, |
| | | | | | AW827206, AV682264, AW411235, BG165051, |
| | | | | | BF970768, BF970652, BG030364, BF692486, |
| | | | | | AL038445, AW827103, AV708893, AV709314, |
| | | | | | AI334445, AV656478, AV684604, AV755884, |
| | | | | | AL041772, AL039086, BF752245, AV727029, |
| | | | | | AL043070, AI538764, BG181012, BG058150, |
| | | | | | BF854113, AV714274, BE876049, AV713662, |
| | | | | | AV756026, AV647773, AA100772, BG122481, |
| | | | | | BG105895, BF924882, BE895585, AV729189, |
| | | | | | AL048656, BF726207, BG113224, BG256880, |
| | | | | | AL041150, AI312428, BG112718, AV682791, |
| | | | | | BE966479, AI932794, BE966699, AW129271, |
| | | | | | AW827227, AW169653, AA508692, BF527014, |
| | | | | | BF971016, AA853213, AL046463, BG151388, |
| | | | | | BG105473, BE874133, BF969126, AL036980, |
| | | | | | AA853539, AL119791, AW301409, AV648263, |
| | | | | | BG260037, AI073952, BE785868, BE965067, |
| | | | | | AW238730, AW020095, BF343286, AL045266, |
| | | | | | AL513907, AI538342, AW827203, AI568114, |
| | | | | | BE885353, BF752836, AI309401, AL514627, |
| | | | | | AI784230, AW022682, BF970449, AI554343, |
| | | | | | BF032768, AI637584, BE885490, AW673679, |
| | | | | | AI284517, AI932915, BF921103, AI335426, |
| | | | | | AI348777, AW172723, AI791396, BF312128, |
| | | | | | AI922561, BE018711, AI344785, BE826053, |
| | | | | | AV681848, AA420758, BE964614, AI818574, |
| | | | | | AI671642, AW265004, AL037454, BG027082, |
| | | | | | AL038605, AW163823, BG029086, BG164558, |
| | | | | | BE172689, BF061283, AL036274, AV655645, |
| | | | | | AV647118, BG178689, AI340511, AV682466, |
| | | | | | AW161579, BE965724, BE779152, BE881005, |
| | | | | | BG112879, AA427700, AW079818, AI783504, |
| | | | | | AW827289, BE047852, BF339322, BG029053, |
| | | | | | BG168185, BE965330, AW238688, BF313411, |
| | | | | | BG260187, AV755484, BE047952, D50977, |
| | | | | | N99092, AL042400, AW410969, BG109140, |
| | | | | | BF672397, BE965192, AW834302, AI866573, |
| | | | | | AW806761, AL119836, BE837422, BE963838, |
| | | | | | AL037582, AL037602, BF798503, BF753013, |
| | | | | | R36271, AW268067, AL079963, AI335208, |
| | | | | | BG249582, BG179993, BF904193, AI491852, |
| | | | | | BF968027, AW302992, BE875407, BF038804, |
| | | | | | AI499986, AI630252, BE965481, AV715359, |
| | | | | | AW149092, AV743631, BE884296, AV733385, |
| | | | | | AV758087, BG107410, AI343059, AL079741, |
| | | | | | AL042628, BF910810, BF909758, AV703169, |
| | | | | | AW303089, BC005084.1, AF001552.1, AC006221.1, |
| | | | | | AC073042.7, AC015982.9, AC007458.13, AC083867.4, |
| | | | | | AP001711.1, AL139099.2, AL355382.6, |
| | | | | | AB019438.1, AL356800.3, AL389939.1, AL136893.1, |
| | | | | | AL137527.1, AK027114.1, AL138755.13, |
| | | | | | AL512761.1, AL162008.1, BC004951.1, AK024538.1, |
| | | | | | AL080137.1, AL050024.1, AK024588.1, |
| | | | | | AB060826.1, AK026506.1, AK025254.1, AL136586.1, |
| | | | | | AL080124.1, AL049430.1, AL359583.1, |
| | | | | | AF260566.1, AK000718.1, AK025391.1, BC006508.1, |
| | | | | | AK025375.1, AK026762.1, BC006201.1, |
| | | | | | AL136749.1, Y16645.1, AB055315.1, BC006440.1, |
| | | | | | AL050172.1, AK025092.1, U91329.1, |
| | | | | | AB060912.1, BC008417.1, AK026608.1, AK027113.1, |
| | | | | | AK000618.1, AL137526.1, AF090943.1, |
| | | | | | AL133640.1, AL359601.1, AF090900.1, AL133014.1, |
| | | | | | AL162083.1, AB052191.1, AK026583.1, |
| | | | | | AL136844.1, AK025491.1, AL136789.1, AL133565.1, |
| | | | | | BC005168.1, AK027200.1, AL133075.1, |
| | | | | | AF061943.1, AF162270.1, BC000090.1, AL136754.1, |
| | | | | | AL389935.1, BC007326.1, AL359596.1, |
| | | | | | AL117583.1, AL133557.1, AK025632.1, AB060852.1, |
| | | | | | BC008893.1, AF056191.1, BC008488.1, |
| | | | | | AL117578.1, AK027142.1, AL157482.1, AK026591.1, |
| | | | | | AL137476.1, AB048953.1, AK026526.1, |
| | | | | | AB060863.1, AK025414.1, S78214.1, AL136780.1, |
| | | | | | AK026600.1, BC006195.1. |
| HHGDT26 | 98 | 658692 | 1-1570 | 15-1584 | AA016083, H38909, H38821, T98933, |
| | | | | | T98978, AA644090, AA643784, AV700958, AI192440, |
| | | | | | AL046311, AW961848, AV699675, AV758870, |
| | | | | | AW408756, AA565911, AW189113, AI275982, |
| | | | | | AI281881, AW023111, AV761107, AL132986.4, |
| | | | | | AL020995.14, AC006537.1, U96629.1, Z85986.1, |
| | | | | | AL359272.9, AL121594.6, AC008450.5, AL139182.24, |
| | | | | | AF001549.1, AL049829.4, AC005940.3, |
| | | | | | AC015977.9, AL137000.6, AP000893.5, AC005180.2, |
| | | | | | AL137100.4, AC006120.1, AL049709.18, |
| | | | | | AL024498.12, AC008403.6, AC008610.6, AC084864.2, |
| | | | | | AL035419.12, AC007707.13, AC004990.1, |
| | | | | | AL096700.14, AL132712.4, AL355392.7, AC009144.5, |
| | | | | | AL357515.26, AL138720.19, AL121900.26, |
| | | | | | AC022087.8, AC011484.4, AC002319.1, AC005011.2, |
| | | | | | AL122021.3, AL138752.5, AC008622.5, |
| | | | | | AL050341.18, AL157791.4, AC022217.5, AL031311.1, |
| | | | | | Z98044.13, AC003684.1, AL136985.11, |
| | | | | | AC005049.2, AL121899.37, AC011469.6, AL356115.9, |
| | | | | | AL445465.10, AC009812.17, AL121949.13, |
| | | | | | AC007969.3, AP000501.1, AL049569.13, AC004840.3, |
| | | | | | AL049779.6, AL022067.1, AL390241.19, |
| | | | | | AC084865.2, AL133279.7, AL008726.3, AL162417.22, |
| | | | | | AL136304.10, AL445483.13, AL359792.3, |
| | | | | | AC007374.6, AC008812.7, AL121928.13, AL137230.3, |
| | | | | | AL031775.1, AC005088.2, AC004813.2, |
| | | | | | AC008946.6, Z85996.1, AP001469.1, AC020716.3, |
| | | | | | AC005756.1, AL096701.14, AC008556.5, |
| | | | | | AL357752.19, AC011455.6, AC025166.7, AC002316.1, |
| | | | | | AC005052.2, AC011449.6, AJ277662.1, |
| | | | | | AL050318.13, AC005077.5, AC010422.7, AC005844.7, |
| | | | | | AC009123.6, AC008738.6, AC005625.1, |
| | | | | | AF030453.1, AC005220.1, AL138920.11, AC010605.4, |
| | | | | | AL117694.5, AC004000.1, AL121582.19, |
| | | | | | AL031728.12, AC005082.3, AP000471.2, AC005514.1, |
| | | | | | AC026218.5, L78810.1, AC007055.3, |
| | | | | | AL162458.10, AC008044.4, AC008551.5, AC011443.6, |
| | | | | | AC004659.1, AC018644.6, AC020904.6, |
| | | | | | AP000925.5, AL035398.19, AL136961.19, Z93023.1, |
| | | | | | AC008040.7, AC073184.5, AB006463.1, |
| | | | | | AC004491.1, AC018816.5, AC005722.1, AC021016.4, |
| | | | | | AL132780.5, AC026464.6, AP001717.1, |
| | | | | | AL023553.5, AC020906.6, AL162424.20, AC004019.20, |
| | | | | | AC013414.7, AL109935.39, AL359983.7, |
| | | | | | AC007318.4, U15422.1, AL139415.10, AC008848.7, |
| | | | | | AF108083.1, AL354928.9, AL109825.23, |
| | | | | | AC018711.4, AC009364.8, AC009077.7, AC007425.16, |
| | | | | | AC004531.1, AC010358.5, AP001726.1, |
| | | | | | AL139022.4, AC010553.6, AL049759.10, AL031283.26, |
| | | | | | AC004099.1, AC005527.3, AC002351.1, |
| | | | | | AC011445.6, AF314058.1, AC003663.1, AC004222.1, |
| | | | | | Z95115.1, AL031680.20, AL031848.11, |
| | | | | | AC005031.1, AP000167.1, AC021036.5, AC010543.8, |
| | | | | | AC008134.3, AF260011.2, AC012318.7, |
| | | | | | AC090883.1, AC004033.3, AC004216.1, U95090.1, |
| | | | | | AC019066.6, AL358815.12, AC022201.4, |
| | | | | | AC008372.6, AC006449.19, AC002352.1, AC002390.1, |
| | | | | | AC010473.5, AP000689.1, U95742.1, |
| | | | | | AC008440.8, AC005486.2, AL354864.16, AC005225.2, |
| | | | | | AC004797.1, AP000113.1, ALP000045.1, |
| | | | | | AC005529.7, AC004675.1, AL030996.1, AL445687.5, |
| | | | | | AL157712.13, AC002302.1, AC004922.2, |
| | | | | | AC011895.4, AL138885.21, AC000025.2, AC011742.3, |
| | | | | | AP000345.1, AC005102.1, AF053356.1, |
| | | | | | AC018663.3, AP001748.1, AF134726.1, AC004605.1, |
| | | | | | AC090939.1, AL449223.7, AL109840.24, |
| | | | | | Z98742.5, AL031685.18, AC007298.17, AC005581.1, |
| | | | | | AC008733.7, AL589988.6, AF000744.4, |
| | | | | | AC037475.9, AL355336.15, AC005067.2, AJ246003.1, |
| | | | | | AC010319.7. |
| HHPFU28 | 99 | 824573 | 1-1824 | 15-1838 | BF035537, AW069711, BF672434, BE883242, |
| | | | | | AI656112, W31606, W07084, AI272643, |
| | | | | | AW170657, AA166968, N77917, AW513307, |
| | | | | | W15523, C75056, AA167046, AA228908, AA228890, |
| | | | | | AA856550, BE540895, AA856549, AA883954, |
| | | | | | AI636144, F16318, AW275622, F15813, AA629229, |
| | | | | | AW979328, BE825903, AA683173, AW954221, |
| | | | | | AV725561, AV703624, AW962970, AV646649, |
| | | | | | AB002332.1. |
| HHSBI06 | 100 | 639097 | 1-1035 | 15-1049 | BE676485, N59786, AI920783, AA088744, |
| | | | | | AA779158, BF438300, BE645431, AI915060, |
| | | | | | AF271897.1, AF285442.1, AF051651.1. |
| HHSBI65 | 101 | 801910 | 1-1430 | 15-1444 | BE796723, BE541989, BF057278, BF063128, |
| | | | | | AI990159, AW003665, AW300907, AI738928, |
| | | | | | AW246641, AW594304, AI521438, AI394059, |
| | | | | | AA994208, AI130030, AW083104, AA811418, |
| | | | | | AA974513, AA761013, AA765652, AI583684, |
| | | | | | AI748894, R67183, AA483531, AA836959, |
| | | | | | AW236517, H29649, BF115987, AA747573, |
| | | | | | AA434041, AW845318, T75095, H29565, BE742632, |
| | | | | | BE386466, AW196291, AI608701, F10461, |
| | | | | | BE385745, AI474368, BE502390, BF115569, |
| | | | | | BG236177, BG230771, AI825041, R54830, |
| | | | | | Aw117865, R38529, AA370939, R43648, AA215393, |
| | | | | | BE552433, AV749164, BF112242, F13491, |
| | | | | | BF058839, AI087969, AA215394, AI475583, |
| | | | | | AW450912, T25126, AA434109, AK026541.1, |
| | | | | | AF174592.1. |
| HHSDI53 | 102 | 862028 | 1-1263 | 15-1277 | AW994394, AW151201, AW865905, AW865900, |
| | | | | | AW865898, AW866014, AW865891, AI755214, |
| | | | | | AW500684, AI754567, AI754105, AW576251, |
| | | | | | AL042373, AW613805, AW069227, AI923052, |
| | | | | | AI733856, AW341978, AA847499, BE062476, |
| | | | | | BE062478, AW576191, AW023111, AA420546, |
| | | | | | BG059972, AA449997, AW576490, BF911056, |
| | | | | | BF526964, BF828714, AV763026, AV763058, |
| | | | | | AW327624, AV732057, AA579179, AA410788, |
| | | | | | AI358712, AI634187, AU147162, BF691714, |
| | | | | | AW979087, AU146620, BE062545, AW516255, |
| | | | | | BF771349, AW328202, AW500029, BG250044, |
| | | | | | BE676019, AI792529, AW131356, AV703785, |
| | | | | | AW963663, AV763550, AI249688, AW958962, |
| | | | | | T74524, AW502873, AV695478, AW474168, |
| | | | | | AV762430, AI457313, AA828834, AI080307, |
| | | | | | AI962030, AV759518, AW275432, AW819125, |
| | | | | | AW026305, BG110162, AV730440, AI421950, |
| | | | | | AA513851, AI419337, AV730986, AW851405, |
| | | | | | AU144540, AW964231, AV741914, AV760508, |
| | | | | | AI038304, BE968744, AL135377, AI636734, |
| | | | | | AI361090, AV732950, AV754716, AV762009, |
| | | | | | BG036665, AI345654, AA578621, AW970896, |
| | | | | | AW021886, AA515048, AI569100, AA557911, |
| | | | | | AA501461, AL109936.10, AC078815.22, AL079335.29, |
| | | | | | Z69917.1, AP001760.1, AL136172.16, |
| | | | | | AC021752.5, AC009470.4, AC009269.6, AL049856.1, |
| | | | | | AP001169.1, AC008946.6, AC025262.27, |
| | | | | | AL356805.5, Y18000.1, AL162426.20, AC010271.6, |
| | | | | | AL121808.4, AL035587.5, AC005694.3, |
| | | | | | AC011462.4, AL355343.18, AL122001.32, AD000685.1, |
| | | | | | AC004020.1, AL158198.14, AC036103.8, |
| | | | | | AB050050.1, AC009570.13, AC011489.6, AC018636.4, |
| | | | | | AL391280.15, U63721.1, AC025166.7, |
| | | | | | AC004815.2, AL137128.4, AL109984.14, AC004797.1, |
| | | | | | AL133349.7, AC034242.5, AC005004.3, |
| | | | | | AL024498.12, AC010469.7, AC005529.7, AL138824.19, |
| | | | | | AC004805.1, AL136418.4, AL139054.1, |
| | | | | | AC017078.8, AC011737.10, AC083871.2, Z97632.1, |
| | | | | | AL359400.4, AC010654.8, AC005216.1, |
| | | | | | AC005052.2, AC018690.5, AL031670.6, AC007226.3, |
| | | | | | AC005932.1, AP000114.1, AP000046.1, |
| | | | | | AL158207.15, AL121594.6, AC016995.4, AL034372.33, |
| | | | | | AF064861.1, AC008745.6, AP001717.1, |
| | | | | | AL136137.15, AF228703.1, AC068799.14, AC074121.16, |
| | | | | | AP000744.4, AC005086.2, AC007055.3, |
| | | | | | AL132653.22, AC011445.6, AC011450.4, AC004150.8, |
| | | | | | AC008760.6, AC012450.9, AF047825.1, |
| | | | | | AC006451.5, AC005103.3, AC004975.2, AL139316.5, |
| | | | | | AC005089.2, AL135927.14, AC007227.3, |
| | | | | | AL121972.17, AC034251.5, AC025593.5, AC011470.5, |
| | | | | | AP000356.1, AL034548.25, AC021876.5, |
| | | | | | AC008736.6, AC005725.1, AC010279.4, AC004647.1, |
| | | | | | AC087071.2, AC002115.1, AC006552.7, |
| | | | | | AF003626.1, AL137119.26, AC005338.1, AC020916.7, |
| | | | | | AL133240.3, AL161896.16, AL033378.12, |
| | | | | | AL359397.3, AF042090.1, AP001725.1, AL161727.15, |
| | | | | | AL391259.15, AC005200.1, AC009077.7, |
| | | | | | AC008962.8, AP001752.1, AC004867.5, AB053170.1, |
| | | | | | AL117381.32, AC010205.5, AC007722.9, |
| | | | | | AC008440.8, AL354707.17, AC074013.5, AC006449.19, |
| | | | | | AC007993.15, AC005029.1, AC005180.2, |
| | | | | | AC010605.4, AP002852.3, AP001727.1, AC004491.1, |
| | | | | | AL109614.28, AC009068.10, AC006348.3, |
| | | | | | AL096677.21, AC027319.5, AL445483.13, AC008649.6, |
| | | | | | AP000555.1, AF001549.1, AC011510.7, |
| | | | | | AC002316.1, AC006203.1, AC008403.6, AC004755.2, |
| | | | | | AL358815.12, AC006000.2, AC027644.9, |
| | | | | | AC005098.2, AL159159.21, U78027.1, AC073838.6, |
| | | | | | AC002126.1, AC004771.1, AL121653.2, |
| | | | | | AC016587.7, AC005880.3, U91323.1, AL121601.13, |
| | | | | | AC005924.2, AP001053.1, AL022312.7, |
| | | | | | AC007388.3, AC004967.3, AL096840.25, AC004166.12, |
| | | | | | AL354932.26, AP001718.1, AC011465.4, |
| | | | | | AL353679.18, AC010463.6, AL121992.24, AC020754.4, |
| | | | | | AL049610.9, AC006441.13, AC006483.3, |
| | | | | | AC005620.1, AL136039.4, AL031295.1, AC008280.4, |
| | | | | | AC008397.7, AL161907.17, AL035422.12, |
| | | | | | AC004821.3, AC009220.10, AC004895.2, AC009509.7, |
| | | | | | AL137818.3, AC004125.1, AF031078.1, |
| | | | | | AC002352.1, AL356020.3, AC008474.7, AC002546.1, |
| | | | | | AL159997.14, AC007565.1, AL117382.28, |
| | | | | | AP001631.1, AC000082.4, AC007011.1, AC004813.2, |
| | | | | | AC008392.6, AF030876.1, AL137005.6, |
| | | | | | AC013719.8, AC005779.1, AC002401.1, AC002090.1, |
| | | | | | U91321.1, AC025280.4, AL445222.9, |
| | | | | | AC008569.6, AP003475.2, AL031228.1, U95090.1, |
| | | | | | AC016742.10, AL359711.18, AC068533.7, |
| | | | | | AL138836.15, AC004922.2, AC004840.3, AL021579.1, |
| | | | | | AP000694.1, AC005522.2, AF111167.2, |
| | | | | | AL022320.23, AL136220.14, AL031311.1, AL138741.13, |
| | | | | | AL354889.14, AC007664.12, |
| | | | | | AL356747.18, AC000003.1, AC007324.55, AL033397.7, |
| | | | | | AL359552.16, Z83844.5, AC021868.17, |
| | | | | | AL136170.12, AC016894.7, AL136228.8, AC007283.3, |
| | | | | | Z83308.1, AC005236.4, AP002342.3. |
| HISAT67 | 103 | 843549 | 1-2140 | 15-2154 | AL519801, AL520029, AL521674, AL515614, |
| | | | | | AL519807, AL519808, AL526569, AL519802, |
| | | | | | AL520030, AL535434, AL521675, AL515615, |
| | | | | | BE798433, BE797403, AL528668, AU130192, |
| | | | | | BE745046, AL535433, AW177988, AW177985, |
| | | | | | BF526765, BE741361, BE546284, BE882894, |
| | | | | | BE745446, AI924136, AL524747, BE902340, |
| | | | | | BF796576, BF314225, BE622034, BF237909, |
| | | | | | BE257929, BF306879, BE617643, BE867904, |
| | | | | | AW374088, BE617000, BF688830, BF345850, |
| | | | | | BF688351, AW960985, AA252420, BF817742, |
| | | | | | BE622673, BE535410, AI183729, AW438568, |
| | | | | | AA769320, BF816143, BF541658, AI274790, |
| | | | | | AA058936, BF530326, BF345429, BE568171, |
| | | | | | BF315183, AA827859, AI150987, BG104230, |
| | | | | | AW192463, BE383533, AW769453, BF195400, |
| | | | | | BG253720, AA699494, AI298600, BE395450, |
| | | | | | AA411591, AA976201, BF246062, AA565575, |
| | | | | | AI811947, BE838606, AU155423, AA425979, |
| | | | | | AA548944, AI096361, AA151497, AW087834, |
| | | | | | AI361378, AI085749, AW027881, AA426271, |
| | | | | | AA613326, AA687138, N81134, AA411464, |
| | | | | | BG222316, N35214, AI299858, AA394068, |
| | | | | | AA088263, AI150914, AA889019, AA252504, H83961, |
| | | | | | AL045552, AI689551, BE819030, AI089337, |
| | | | | | BE565997, AI803858, AA151552, AU134447, |
| | | | | | BF347858, AW247185, R40419, AA351639, |
| | | | | | H58370, AI362586, AI631415, AU157064, AW406063, |
| | | | | | R69998, BF132861, AA292350, H06495, |
| | | | | | R13035, AI858744, AW392518, AW517903, AI539838, |
| | | | | | BG169732, AA564447, AI280222, AU137181, |
| | | | | | H58371, AA355297, H11618, R74275, AW606537, |
| | | | | | BF825915, AA478985, BF914457, BF247267, |
| | | | | | N90293, AA324676, BF913845, W04666, BF695749, |
| | | | | | R39793, AI932851, AA629936, AA300144, |
| | | | | | AW731758, AI886965, AA477921, AA580861, |
| | | | | | AA632377, AW957318, C02190, AW089325, |
| | | | | | AW402477, R37205, R31157, AI633079, R12741, |
| | | | | | T34011, BF527821, BE819060, BF761740, |
| | | | | | AW139230, AI369955, AI579955, BF244267, R74188, |
| | | | | | R27176, Z17827, BF874647, AA877093, |
| | | | | | BE819032, AA582577, BF435602, F32545, N75291, |
| | | | | | N99252, T25048, AA467840, AW392536, |
| | | | | | AA467896, AW968190, AI085046, AA151496, H83960, |
| | | | | | AA468217, AW607357, AW631248, AW051088, |
| | | | | | AI360195, BF792469, AI610402, AI249946, |
| | | | | | BF753056, BE069307, AA514684, BE909285, |
| | | | | | AL042544, AI921167, AI002285, AI815855, |
| | | | | | AW163834, AA888196, BG029053, BE047833, |
| | | | | | AI698391, BF927081, AI923989, AV756026, |
| | | | | | AW118508, AI887775, BE965481, BG121959, |
| | | | | | BF813196, AV756182, BG029667, AI582932, |
| | | | | | AW059828, AL037454, BF814761, AV681848, |
| | | | | | BF726183, AA830821, T99953, BE877142, |
| | | | | | AW009306, AW161098, AA420722, AI452857, |
| | | | | | BE245461, AI345745, BF969807, BF918076, |
| | | | | | BF921291, AV735098, BF529088, BE536263, |
| | | | | | AV708119, BF529870, AV727839, BE964614, |
| | | | | | AI500061, AI696626, AI633125, BF885000, |
| | | | | | AI915291, AF203687.1, BC002765.1, AF226684.1, |
| | | | | | AK023064.1, BC008658.1, AF227166.1, AK023405.1, |
| | | | | | AK001976.1, AF125949.1, AL133560.1, |
| | | | | | AL359618.1, AL110225.1, AF090901.1, BC008488.1, |
| | | | | | AB049892.1, AB047887.1, X86693.1, |
| | | | | | BC003548.1, AL133080.1, AL110221.1, AF091084.1, |
| | | | | | BC008387.1, AB051158.1, AK000323.1, |
| | | | | | BC004310.1, AF090903.1, BC006201.1, AL133606.1, |
| | | | | | BC004297.1, BC002975.1, AY033290.1, |
| | | | | | AL512689.1, AK025484.1, AK026462.1, AK026528.1, |
| | | | | | AB060863.1, AK026480.1, X72889.1, |
| | | | | | AK026542.1, AL512750.1, AB063070.1, AB056809.1, |
| | | | | | AK026504.1, AF097996.1, AL050024.1, |
| | | | | | AL122050.1, AK026583.1, AL049314.1, AK000083.1, |
| | | | | | AL137533.1, AL117394.1, AK024538.1, |
| | | | | | AL133640.1, AK027142.1, BC004556.1, AF106862.1, |
| | | | | | AL049464.1, AL137560.1, AK026744.1, |
| | | | | | AL137538.1, AB048975.1, AK000486.1, AL512733.1, |
| | | | | | Y16645.1, AK025967.1, AK027160.1, |
| | | | | | AL117435.1, AL137550.1, BC006807.1, BC004908.1, |
| | | | | | AL122110.1, AB060826.1, U39656.1, |
| | | | | | AL133081.1, AB055366.1, BC004958.1, AK026927.1, |
| | | | | | AL050146.1, AL137660.1, AF078844.1, |
| | | | | | AK027113.1, AK027096.1, AK025092.1, AF217982.1, |
| | | | | | AL136792.1, AK026434.1, AL137480.1, |
| | | | | | S78214.1, AK000445.1, BC001967.1, AB060832.1, |
| | | | | | BC001045.1, AL117585.1, AK026534.1, |
| | | | | | AK000614.1, AL137283.1, BC008899.1, AF069506.1, |
| | | | | | AK026959.1, AB060908.1, BC003682.1, |
| | | | | | S77771.1, AK000291.1, BC003684.1, AL096744.1, |
| | | | | | AL050393.1, U42766.1, AL133031.1, |
| | | | | | AL136805.1, AC068715.5, AK026647.1, AB055361.1, |
| | | | | | AK026353.1, AL050277.1, AL049430.1, |
| | | | | | AK026164.1, AB062938.1, AK027081.1, AF090886.1, |
| | | | | | AK025772.1, AL122093.1, AB052191.1, |
| | | | | | AL122121.1, AC025226.4, AL136799.1, AB019565.1, |
| | | | | | AL137429.1, X82434.1, AF090934.1, |
| | | | | | AF090943.1, AL137557.1, AB048953.1, AF277181.1, |
| | | | | | AL512684.1, BC008284.1, AL136786.1, |
| | | | | | AB047615.1, AK026642.1, AK025339.1, AL137271.1, |
| | | | | | BC005168.1, BC008844.1, AK025209.1, |
| | | | | | AB056420.1, AK026784.1, AK027200.1, BC006525.1, |
| | | | | | AL117457.1, BC009355.1, AF260566.1, |
| | | | | | AL157431.1, AL512765.1, AF146568.1, AL136845.1, |
| | | | | | AL133113.1, AL137527.1, AL133565.1, |
| | | | | | AL136784.1, AF232009.1, S61953.1, AL035458.35, |
| | | | | | BC007326.1, BC001774.1, AL136640.1, |
| | | | | | BC007548.1, AK025414.1, AK027204.1, AK025491.1, |
| | | | | | AL359601.1, AL133016.1, AK025708.1, |
| | | | | | BC004119.1, BC009113.1, AL442072.1, AL353940.1, |
| | | | | | AL353956.1, BC008004.1, AB055315.1, |
| | | | | | AL137555.1, AJ012755.1, X98834.1, AK026608.1, |
| | | | | | AL137300.1, AK000652.1, BC002978.1, |
| | | | | | AL162003.1, BC006164.1, AB048954.1, AB060916.1, |
| | | | | | AK025632.1, AL133077.1, AF111847.1, |
| | | | | | AJ010277.1, AL049466.1, AL137548.1, AK026526.1, |
| | | | | | AC019176.4, BC009010.1, AF225424.1, |
| | | | | | AK024588.1, AL512754.1, AB050534.1, AL353957.1, |
| | | | | | BC004951.1, AF177336.1, AL359596.1, |
| | | | | | AL136844.1, AB063046.1, AB048974.1, AJ242859.1, |
| | | | | | AB060857.1, AB060852.1, Y14314.1, |
| | | | | | AL050116.1, AL050108.1, AL136825.1, AL137521.1, |
| | | | | | AL122123.1, AF230496.1, AK026506.1, |
| | | | | | AK000212.1, AK025383.1, AC069298.8, AL136790.1, |
| | | | | | AL162002.1, AF026816.2, AK027114.1, |
| | | | | | AL389939.1, BC003687.1, BC002647.1, AK026741.1, |
| | | | | | AF218034.1, AL512746.1, AB060825.1, |
| | | | | | AL136843.1, BC008719.1, AB055303.1, AB060887.1, |
| | | | | | AF090900.1, AK026452.1, AB049758.1, |
| | | | | | AL442082.1, AL133047.1, AK026551.1, AF106934.1, |
| | | | | | BC004191.1, AL389982.1, AC005876.3. |
| HJBCU75 | 104 | 638329 | 1-995 | 15-1009 | AA789332, AI925535, AW469963, AI925543, |
| | | | | | AA312696, BF732842, BE670545, AI685010, |
| | | | | | AW962841, AI690167, AA570056, AA470465, |
| | | | | | AW969303, AW770920, AI634463, T95424, |
| | | | | | T95333, AW080646, AW003925, BE617765, |
| | | | | | AI468303, AA311608, AW268987, BE669814, |
| | | | | | AA356443, BF690832, AW753521, AA682679, |
| | | | | | BE962309. |
| HJMAA03 | 105 | 824062 | 1-651 | 15-665 | AW304711, BE677684, AW959142, AI290480, |
| | | | | | BF090788, AW571568, AI092037, N55492, |
| | | | | | BF090740, W05027, BE714108, N76979, |
| | | | | | AA361785, N70383, C02489, BF987194, BF087284, |
| | | | | | BF087325, AA732983, AI348883, AV682863, |
| | | | | | AW305097, AV691827, AL038473, AW265139, |
| | | | | | AL442128.7, L44140.1, AC004867.5, AC004166.12, |
| | | | | | AC009996.7, AL135905.6, AP000087.1, |
| | | | | | AL158158.14, AC018809.4, AF190464.1, AL391839.9, |
| | | | | | AL035684.25, AC007172.6, AP001694.1, |
| | | | | | AC009753.5, AC007383.4, AC026431.3, AP001623.1, |
| | | | | | AC002558.1, AC068533.7, AL133243.1, |
| | | | | | AL161670.4, U52112.1, AL135839.15, AC084864.2, |
| | | | | | AC005180.2, AL359265.8, AC020716.3, |
| | | | | | AF287262.1, AC024082.6, AC002551.1, AC010267.6, |
| | | | | | AL160471.5, AC004883.2, AC007225.2, |
| | | | | | AL359091.10, AC020663.1, AP001710.1, AL121972.17, |
| | | | | | AP001746.1, AC006111.3, AC079684.16, |
| | | | | | AL035086.12, AL031670.6, AL135744.4, AL391827.18, |
| | | | | | AP002515.3, AC005098.2, AC018639.8, |
| | | | | | AC087071.2, AC002565.1, AL354932.26, AL160269.14, |
| | | | | | AC087244.17, AC004491.1, AC018751.30, |
| | | | | | AC083884.6, AC007308.13, AC083868.2, AL031587.3, |
| | | | | | AL035458.35, AC004878.2, AC004832.3, |
| | | | | | AC002316.1, AC003950.1, AC006486.1. |
| HJMAV41 | 106 | 862029 | 1-1003 | 15-1017 | AL519996, N99345, AL528860, BF967736, |
| | | | | | AL528859, AL532599, AL538083, AL538011, |
| | | | | | BF527376, AL535063, BE967933, H21178, |
| | | | | | AA424063, BF529494, BF507682, AW297516, |
| | | | | | BF342788, AI422769, AI185878, AI124739, |
| | | | | | AI865987, H21121, AI816490, H18325, H21179, |
| | | | | | AI703250, AW592816, AI784327, T03789, |
| | | | | | AI369670, AA378946, H41697, H21831, H23884, |
| | | | | | BG056097, R59872, R87479, R90915, |
| | | | | | H21832, AI174201, H41664, H21166, AL519997, H41609, |
| | | | | | AL533018, AL533068, AL533347, H46526, |
| | | | | | H43588, R50960, H43587, AW162319, H18324, |
| | | | | | T23814, AA378559, AA378947, AW954445, |
| | | | | | D54991, BE504938, AA424113, R40163, Z38418, |
| | | | | | AL534514, AL537105, AL538012, AW156888, |
| | | | | | H46527, BF945915, AL534591, R38431, BF904209, |
| | | | | | R41229, BF983417, AL538084, BE967687, |
| | | | | | AF186264.1, AC003112.1. |
| HJMAY90 | 107 | 793678 | 1-2872 | | 15-2886 |
| HJPBE39 | 108 | 801960 | 1-1284 | 15-1298 | AL519852, AL527399, AL515498, AL527358, |
| | | | | | AL529347, BF792443, AL515497, BE730880, |
| | | | | | BE277609, BF000393, AI962602, AL525722, |
| | | | | | BE730832, BE384867, BF686529, BE795039, |
| | | | | | AW263053, BE888955, BF304919, BF315024, |
| | | | | | BG031037, BE389217, BE049408, BE390060, |
| | | | | | BF984396, BE388113, BE348265, BF973110, |
| | | | | | BE266542, AI671396, BE867694, AI393247, |
| | | | | | BE311766, BE207532, BE544851, BE397321, |
| | | | | | BF125789, AI688503, BE616765, AW084179, |
| | | | | | BF036778, AI215805, BE276965, BE274028, |
| | | | | | BE279716, BE220591, BE886536, AV721055, |
| | | | | | AA666401, BE730577, BE266808, BE787679, |
| | | | | | AI333898, BE391366, W16684, AW952000, |
| | | | | | AL529348, BE385658, AW448966, BF307353, |
| | | | | | BE302707, AL519851, BE265722, AA186873, |
| | | | | | AW769101, BE615964, AW246258, AW235139, |
| | | | | | BG025833, AI983116, BG119203, AI767753, |
| | | | | | BE384303, BE273943, AA312411, AI948835, |
| | | | | | AI312519, AA733032, AA838388, AW673726, |
| | | | | | AW672758, N79531, AI968691, AA055433, |
| | | | | | BE263201, AI370568, AW615793, AI745361, |
| | | | | | AW675422, BE328771, AW135640, AI691056, |
| | | | | | D11879, AI352285, AW272223, D11592, |
| | | | | | AW241457, AI568807, D11608, AA583830, |
| | | | | | BE263003, BF678146, W27625, AA877583, |
| | | | | | AA099966, BF349610, AW673090, T30363, |
| | | | | | AA759230, AW672670, BE925766, AA641441, |
| | | | | | BE937913, AA188528, BF240905, AI942377, |
| | | | | | BG025864, AA055004, AW999828, AA362916, |
| | | | | | BF790356, BF332109, BC004169.1, AP001486.4. |
| HJPCH08 | 109 | 840365 | 1-865 | 15-879 | AI655312, AW975835, AI653243, BF059498, |
| | | | | | AA731744, AW590208, AU154664, AI671173, |
| | | | | | AI669341, BF970492, AA704870, AI654412, |
| | | | | | AI889336, BE966747, AI739117, AI168283, |
| | | | | | AA781842, AI203090, AW383906, AW103151, |
| | | | | | AW589549, AW074368, AA600977, AI014854, |
| | | | | | AA179845, BE775064, BE090424, AA630744, |
| | | | | | AV714379, AW857113, AW075406, BF982048, |
| | | | | | AA736497, AA789069, AW770138, BE696241, |
| | | | | | BE622755, AW074752, BE928343, BF762364, |
| | | | | | AI904387, BE539952, AA471345, AF153329.1, |
| | | | | | AF070672.1, AK024804.1, AK025790.1, |
| | | | | | AC004826.3. |
| HKGBF25 | 110 | 738797 | 1-1993 | 15-2007 | AV763026, AV763058, AA410788, AU147162, |
| | | | | | AI133514, AA449997, AW805539, AA811741, |
| | | | | | AA713765, AW002831, AA488689, BF769368, |
| | | | | | AA721645, AI380617, BF528591, AU153296, |
| | | | | | AI342183, BE140949, AI056177, AU157093, |
| | | | | | BE178231, AW571963, H73550, AU150634, |
| | | | | | BE178064, AI590458, AU153624, AI278847, |
| | | | | | AU151428, BG250286, AA587516, AW075132, |
| | | | | | AA456924, AA228778, AV762633, AA922351, |
| | | | | | BF834843, W60612, AW805547, BE142845, |
| | | | | | AA176604, AI538491, AI434037, AA745383, |
| | | | | | AL042310, AU154011, AI690497, AA586866, |
| | | | | | AI590499, AV741914, T06598, AA808173, |
| | | | | | AA845659, AI054030, AV760918, AW978041, |
| | | | | | AL134418, AI355080, AW067788, AW504299, |
| | | | | | AW068008, AW068007, AV738383, M37468.1, |
| | | | | | AL138752.5, AC007298.17, AC040160.4, AC008812.7, |
| | | | | | AC008521.5, AP001712.1, AC008766.4, |
| | | | | | AL035587.5, AC009068.10, AC087071.2, AC011462.4, |
| | | | | | AC009247.12, AL160237.4, AL035634.7, |
| | | | | | AC007000.2, AC011445.6, AC008397.7, AC000118.1, |
| | | | | | AL161911.17, AL133260.12, AC006312.8, |
| | | | | | AL121899.37, AC005522.2, AC007842.1, AC007993.15, |
| | | | | | AC007956.5, AC011295.3, AC005015.2, |
| | | | | | AC011449.6, Z97196.1, AL121926.24, AC004253.1, |
| | | | | | AC005884.1, AF196972.1, AC022007.3, |
| | | | | | AC007676.19, AC003982.1, AC004686.1, AC011742.3, |
| | | | | | AL122035.6, AC018809.4, AL138743.5, |
| | | | | | AL359986.15, AC004217.1, AL353807.18, AC078818.19, |
| | | | | | AL161731.20, AJ400877.1, AC006483.3, |
| | | | | | AC022392.4, L78833.1, AC007052.4, AL096700.14, |
| | | | | | AL049569.13, AL031668.23, AC026391.6, |
| | | | | | AC091637.1, AL050317.16, AC007597.3, AC003043.1, |
| | | | | | AC006001.2, AC025588.1, AL161656.20, |
| | | | | | AC007679.4, AC005988.1, AC018682.4, AC005940.3, |
| | | | | | AC005399.19, Z98751.1, AC005004.3, |
| | | | | | AC005081.3, Z85986.1, AF053356.1, AL160166.10, |
| | | | | | AL583856.6, AC026770.6, AL031230.1, |
| | | | | | AD001527.1, AC004983.2, AL031584.1, AL138832.10, |
| | | | | | AL137797.9, AC024561.4, AL355886.4, |
| | | | | | AC018868.4, AL121658.2, AC074013.5, M63796.1, |
| | | | | | AL161893.24, AC004841.2, AC011736.4, |
| | | | | | AC006994.4, AL121972.17, AP000424.3, AL391280.15, |
| | | | | | AL034380.26, AL022316.2, AC006337.4, |
| | | | | | AL121656.2, Z83822.1, AL050349.27, AC010311.8, |
| | | | | | AC010616.5, Z97054.1, AC011484.4, |
| | | | | | Z99716.4, AL354696.11, AF243527.1, AC007225.2, |
| | | | | | AL050341.18, AC011450.4, AC006013.3, |
| | | | | | AP001717.1, AC005412.6, AC010077.1, AC068799.14, |
| | | | | | AC011247.10, AC018695.6, AC006006.2, |
| | | | | | AC002350.1, AL445222.9, AL049709.18, AL132777.4, |
| | | | | | AC007707.13, AP001725.1, AC004263.1, |
| | | | | | AL096701.14, AC067941.7, AL121936.17, AC011500.7, |
| | | | | | AC005624.1, AC005103.3, AC004408.1, |
| | | | | | AC010913.9, AL031597.7, AC009144.5, AL035407.15, |
| | | | | | AL031005.1, AL117381.32, AC005332.1, |
| | | | | | AC008481.7, AL035419.12, AC003950.1, AF168787.1, |
| | | | | | AL158040.13, AL354815.10, AP001718.1, |
| | | | | | Z85996.1, AF207550.1, AP000193.1, AP000131.1, |
| | | | | | AP000209.1, AC020552.4, AL133243.1, |
| | | | | | AC003958.1, AC009480.4, AL355137.23, AC005355.1, |
| | | | | | AC072052.6, AC004805.1, U91323.1, |
| | | | | | AC005480.3, AC011497.6, AL353706.6, AP001767.4, |
| | | | | | AC002316.1, AL357515.26, AL117337.25, |
| | | | | | AL162740.13, AC004890.2, AF047825.1, AC009570.13, |
| | | | | | AL031447.4, AL032822.1, AC007536.9, |
| | | | | | AC006597.2, AC007365.3, AL023876.2, AL008732.1, |
| | | | | | AL354932.26, AC005102.1, AC005080.2, |
| | | | | | AC002492.1, AF030453.1, AC008440.8, AL513008.14, |
| | | | | | AL162293.22, AC010724.6, AL031003.1, |
| | | | | | AL162430.15, AC005088.2, AL031657.5, AP000248.1, |
| | | | | | AP000117.1, AL096791.12, AC003665.1, |
| | | | | | AC010279.4, AC007382.3, U47924.1, AC024584.5, |
| | | | | | AP001714.1, AC008556.5, AL035249.6, |
| | | | | | AJ003147.1, AP001922.4, AJ251973.1, AL139396.17, |
| | | | | | AL136304.10, AL136179.15, AC006064.9, |
| | | | | | Z98752.16, AC003101.1, Z93015.9, AC006038.2, |
| | | | | | AC011299.3, AC018758.2, AC004840.3, |
| | | | | | AC016594.6, AL356732.10, AP001710.1, AC005856.1, |
| | | | | | AC011811.42, AL034429.1, AP003534.1, |
| | | | | | AL133453.3, AJ246003.1, AC020906.6, AC020716.3, |
| | | | | | AL121655.1, AC004895.2, AD000090.1, |
| | | | | | AF235097.1, AC021068.17. |
| HKIXC44 | 111 | 716213 | 1-774 | 15-788 | AL523457, AL528447, AL523456, AI829517, |
| | | | | | AW149466, AI583221, BF939526, AI421289, |
| | | | | | BF062158, BF939874, AI279154, AI418427, |
| | | | | | AI703444, AW131506, BF571573, AI936825, |
| | | | | | AI089933, AI361161, AW014685, AI536856, |
| | | | | | BF476644, BE047689, AI369406, AW021011, |
| | | | | | AI457455, AI302724, AI354478, R61374, |
| | | | | | AI079090, AA120924, AI362672, AW118437, |
| | | | | | AW178756, BF447506, H45647, H18233, |
| | | | | | AW023679, H18271, Z25058, AI361962, AA974813, |
| | | | | | AW079462, AW089212, H41457, AW970953, |
| | | | | | AW873883, BE939242, BE151736, AA664017, |
| | | | | | AA120923, H40869, BE762902, AF176422.1, |
| | | | | | BC001873.1, AF232239.1, AF151522.1. |
| HKTAB41 | 112 | 695732 | 1-783 | 15-797 | AW269751, BE046932, AI962247, AI652884, |
| | | | | | AI336991, BF592937, AI632408, BG260037, |
| | | | | | AI611738, AI784252, AI633419, AI863382, |
| | | | | | BF343172, AW163834, AI927755, AI500061, |
| | | | | | AI783997, BG256090, AI470651, AI571909, |
| | | | | | AI829327, BE535358, AW162189, BF342070, |
| | | | | | AL036980, BF828567, BE544111, AI886415, |
| | | | | | BE965031, BF792961, AI590120, AI918655, |
| | | | | | AI569583, AI288285, AI554821, AW059713, |
| | | | | | AW148716, AI648684, AL079963, BE047852, |
| | | | | | AW268122, BE048071, AI569309, AI698401, |
| | | | | | BE910373, AW148970, BE047737, AW089664, |
| | | | | | AI784230, BE538997, H89138, AW827289, |
| | | | | | AI916419, BE895585, AI468872, AI358701, |
| | | | | | AW105601, AA427700, AI886192, AL041150, |
| | | | | | AI269862, AL514129, AI345347, AL037582, |
| | | | | | AL037602, AW131308, AI863321, AW149227, |
| | | | | | BF727034, AI343059, AI251221, AI349933, |
| | | | | | BG035511, AI345608, N80094, BG166654, |
| | | | | | AI922901, AI345253, AW827227, BF527014, |
| | | | | | BG029053, AI500662, AI348854, AI345471, |
| | | | | | BG179993, BE965355, AI869377, BG115626, |
| | | | | | AI679179, AW827106, BF970768, AI590686, |
| | | | | | AI471361, AI873644, BG031539, AI174394, |
| | | | | | AI933589, AI635067, AI565128, AV702623, |
| | | | | | AL036403, AA908294, BG250190, BE620444, |
| | | | | | BE964812, AI921248, AV743962, AW169604, |
| | | | | | AL047675, AI282679, BF856017, AI886753, |
| | | | | | AL121286, BF794018, BE536058, AI801325, |
| | | | | | BF854113, BG109270, BG165979, AI431424, |
| | | | | | AI445992, AW029275, AI699011, AI874166, |
| | | | | | AL036638, AW088903, BG031664, BG120816, |
| | | | | | BG168696, AL514691, AW268302, BE907440, |
| | | | | | AW072719, AI589267, BF816037, AI611348, |
| | | | | | AW059828, BE965724, AW827103, AV710608, |
| | | | | | BF920893, BF814527, AW118496, AI499986, |
| | | | | | AW117919, AI826225, AI811785, BF816042, |
| | | | | | AI681985, AA225339, AW054931, AW196299, |
| | | | | | AI619502, AI680162, AI478123, AI677796, |
| | | | | | AI802542, AI352497, AI439717, AI288305, BF672397, |
| | | | | | AI284131, AW118518, AW023590, AI499285, |
| | | | | | AI863411, AW983829, AW050578, AW148356, |
| | | | | | BG249582, AI570807, AI306705, AI824576, |
| | | | | | AW169653, AW026882, AI470293, AI923370, |
| | | | | | BG058150, AI312428, AI159837, AI613436, |
| | | | | | BF812960, BF812938, AI950664, AI537960, |
| | | | | | BG164558, AI582932, AV727776, BF970652, |
| | | | | | AL042628, AI520809, AI637748, AV746964, |
| | | | | | BE789764, AI537303, BG027280, AI521560, |
| | | | | | AW089350, AI497733, AI433157, AI702073, |
| | | | | | BF089711, AI569975, BE047732, AW188554, |
| | | | | | AW183130, AI567582, BF812961, AI500523, |
| | | | | | AL037454, AI683492, BE874133, AV699198, |
| | | | | | AW117746, BG179633, AI683173, AI445165, |
| | | | | | AI963216, AI863082, AW102761, AI564749, |
| | | | | | AW051088, AI282326, BF814420, AW172723, |
| | | | | | AI868204, AI633125, AI888522, BF680133, |
| | | | | | AI887247, AI698391, BG122481, AI869367, |
| | | | | | AI612885, AI783504, AL036214, AC006451.5, |
| | | | | | AC007056.4, AC006013.3, AL445528.16, |
| | | | | | AP000344.1, AC004057.1, AF131216.1, AC007597.3, |
| | | | | | AC004837.1, AK026504.1, AC006501.5, |
| | | | | | AL050092.1, AP001731.1, AL389939.1, AL133075.1, |
| | | | | | Y16645.1, AK026533.1, AL583915.1, |
| | | | | | Z99495.1, AK026462.1, BC005890.1, AB063070.1, |
| | | | | | AL512750.1, AK024538.1, AL389982.1, |
| | | | | | AL122121.1, AL122123.1, AL121916.14, AL157431.1, |
| | | | | | AL390154.1, AF353396.1, AL137550.1, |
| | | | | | U39656.1, BC005168.1, AL136805.1, AF078844.1, |
| | | | | | AL080124.1, AK025209.1, AL110221.1, |
| | | | | | AL512765.1, AL117435.1, AK026408.1, AL122049.1, |
| | | | | | AB055374.1, AB047801.1, AK027868.1, |
| | | | | | AL080159.1, AB060916.1, AK027160.1, AF090903.1, |
| | | | | | AK027164.1, AK026464.1, AL049452.1, |
| | | | | | AK000432.1, BC001045.1, AK000486.1, AK025798.1, |
| | | | | | AB063079.1, AL136864.1, BC008387.1, |
| | | | | | AL162008.1, AK027096.1, BC002839.1, AK000137.1, |
| | | | | | AF162270.1, AB055303.1, AL359601.1, |
| | | | | | AB060887.1, Y14314.1, AL157482.1, AK026593.1, |
| | | | | | AF146568.1, BC008365.1, AL117432.1, |
| | | | | | AL137292.1, AL136749.1, AL137476.1, AL512718.1. |
| HLDBG17 | 113 | 855953 | 1-638 | 15-652 | BF002740, AW015349, AW172836, N51711, |
| | | | | | BE619681, AA620652, AA639043, AA447223, |
| | | | | | AA648349, AL048032, D62490, BE930019, |
| | | | | | AI973069, AI370576, AI889304, BF885813, |
| | | | | | AW975098, BF377527, BF885812, AI370615, |
| | | | | | Z41325, BF885814, R39086, AA658236, BE708124, |
| | | | | | AF131793.1. |
| HLDQU79 | 114 | 740755 | 1-1474 | 15-1488 | BG256275, BE867624, BE907396, BE855521, |
| | | | | | BF034422, BF530803, AW959247, BE782005, |
| | | | | | AI126689, AL121446, AA757065, AW630129, |
| | | | | | BF768037, BE746763, AA206154, AA460401, |
| | | | | | AI276320, BF998689, AA295243, BE242732, |
| | | | | | BG035901, AL040350, BE242810, T86168, |
| | | | | | BF983867, W05088, AA347337, BG252443, |
| | | | | | AI133502, AF064093.1. |
| HLDRT09 | 115 | 830544 | 1-707 | 15-721 | AI866557, AA889696, U66673, AI653711, |
| | | | | | AW130629, AL530677, BF526233, AW468114, |
| | | | | | BG150565, BE855729, BG255222, AI632354, |
| | | | | | AL529262, AI672056, AI193721, AI149691, |
| | | | | | AL048367, AI201831, AI767058, AI364991, |
| | | | | | AW450832, AW510340, AW275893, AI150164, |
| | | | | | R49046, AA972284, AI917762, T19369, |
| | | | | | AL048395, AA954036, BE799697, W45334, AI695488, |
| | | | | | AW005652, AI867905, AW593521, BE550530, |
| | | | | | C20962, AW975426, AW772241, BE550612, |
| | | | | | AA715469, AF202366, BF857142, AI207097, |
| | | | | | AW205829, AA665913, AW072705, AI275314, |
| | | | | | AI252147, AI053412, BE042038, AI611493, |
| | | | | | AW086306, AI225259, AI335447, AI306279, |
| | | | | | AI336733, AI313009, AW074912, AW075200, |
| | | | | | AI284547, AI223483, AI340903, AI371626, |
| | | | | | AI224247, AI249854, AI611505, AI344093, |
| | | | | | AI613371, AI252683, AI250011, BE049031, AI275343, |
| | | | | | BE139666, AI311703, AI223583, AW302308, |
| | | | | | AI307540, AI313289, AI254993, AW073479, |
| | | | | | AI344172, AI223547, AI306197, BE857864, |
| | | | | | AI250312, AI251146, AI580534, AW302714, |
| | | | | | AW302804, AI254415, AI266765, AI305703, |
| | | | | | AI224293, AI306267, AI613374, AI432751, |
| | | | | | AI344229, AI053844, AI371955, AI334864, |
| | | | | | AI053823, AI311600, AI310544, AI580639, BE042235, |
| | | | | | BE042295, AI311615, BE041253, BE042122, |
| | | | | | AI305591, AI310294, BE043287, AI224692, |
| | | | | | AI890550, BE043496, BE041798, AW302103, |
| | | | | | BE139398, BE139130, BE138588, AW072736, |
| | | | | | AW301907, AW470468, AI054318, BF718321, |
| | | | | | AI345502, AI432745, BF718329, AI305392, |
| | | | | | AA947610, BF055794, AI306075, AI311211, |
| | | | | | AW664349, AI624279, AL119863, BF904244, |
| | | | | | AI917252, AI829327, BF672397, BG121222, |
| | | | | | AI612885, AI280747, BE672647, BG113385, |
| | | | | | BG168549, AI554245, AA225339, BG163618, |
| | | | | | AI955866, AI784252, AL514457, AI800453, |
| | | | | | AI270183, BE785868, BE045182, AI537677, |
| | | | | | AI274508, BF814541, AL134999, BE018334, |
| | | | | | BF792961, AV753074, AI564749, AV706744, |
| | | | | | AI866457, AW020693, AI611738, AI282326, |
| | | | | | BG036479, BF970768, AW411310, AI270707, |
| | | | | | AI890507, BG109270, AW880037, AI335426, |
| | | | | | AI348777, AV682525, AI923989, BG113188, |
| | | | | | AI866131, AW302965, AA480074, AW673679, |
| | | | | | AI812015, AI439717, AI569583, AW169653, |
| | | | | | BG105895, AI934147, AI613436, AW022682, |
| | | | | | BF872670, AI801544, AI500077, AI610114, |
| | | | | | AW071417, AI862144, AV657079, AI699857, |
| | | | | | AW983829, BG030364, BF033296, AW268067, |
| | | | | | AI621209, AI800433, AL036638, BE879967, |
| | | | | | AW050850, AI471361, BG029829, AI312428, |
| | | | | | AV727776, AI869367, BE964614, AW148320, |
| | | | | | AI569579, AW075413, BE885241, AI308032, |
| | | | | | AW196105, AL121328, AI344785, F27788, |
| | | | | | AW073994, AI889953, AI886124, BF793370, |
| | | | | | AI567612, AI624120, BE905335, BF529088, |
| | | | | | BE886728, AV734185, AI950664, BF529870, |
| | | | | | AW020095, AV757362, AI251205, BF885081, |
| | | | | | AW149227, AI590134, AI497733, AI500659, |
| | | | | | AI619748, AI824576, BC000559.1, AF070598.1, |
| | | | | | AK026067.1, AF308472.1, AJ289233.2, AF076775.1, |
| | | | | | AB039371.1, AB039368.1, AB039369.1, |
| | | | | | AB063070.1, AB039367.1, AL049314.1, AL442082.1, |
| | | | | | BC008893.1, AK000323.1, BC004951.1, |
| | | | | | AK000432.1, AL136892.1, AL080127.1, AK026542.1, |
| | | | | | BC001967.1, AK024588.1, AK026630.1, |
| | | | | | AB060825.1, AB055303.1, AB060887.1, AL133016.1, |
| | | | | | AK024538.1, AL050172.1, AL122050.1, |
| | | | | | BC008899.1, AK026959.1, AL136844.1, AL133557.1, |
| | | | | | AL110221.1, AL117583.1, AK025798.1, |
| | | | | | AK026927.1, AF061943.1, AL512754.1, AL136787.1, |
| | | | | | AL512718.1, AL137550.1, BC006164.1, |
| | | | | | AB063046.1, AK025484.1, AB056768.1, AL133565.1, |
| | | | | | AB049892.1, AK027113.1, AF090943.1, |
| | | | | | AK026353.1, AL137271.1, AB060908.1, AK027204.1, |
| | | | | | AL133560.1, AL122093.1, U42766.1, |
| | | | | | AL122110.1, BC007326.1, AK026528.1, AF218014.1, |
| | | | | | AK000137.1, AK027200.1, BC007199.1, |
| | | | | | AK027868.1, AF219137.1, AL512750.1, AB052191.1, |
| | | | | | Y16645.1, AB050510.1, Z82022.1, |
| | | | | | AL117460.1, AL049452.1, BC004370.1, AK026744.1, |
| | | | | | BC001045.1, AF207829.1, BC008488.1, |
| | | | | | AF056191.1, AK000618.1, AK026629.1, AL137459.1, |
| | | | | | AK000647.1, AK025084.1, AK025209.1, |
| | | | | | AB056420.1, AB060916.1, AL136915.1, AL050277.1, |
| | | | | | AL512689.1, AL117457.1, AL136845.1, |
| | | | | | AL133606.1, AL137521.1, AL390154.1, AK026532.1, |
| | | | | | AL050108.1, AL110225.1, AK024524.1, |
| | | | | | AL110196.1, AJ242859.1, AL162006.1, AL359601.1, |
| | | | | | AF090900.1, BC008387.1, U80742.1, |
| | | | | | AL117394.1, AK026534.1, AL050138.1, AL136749.1, |
| | | | | | AF353396.1, AB055366.1, BC002733.1, |
| | | | | | BC007021.1, AL136768.1, AF125948.1, AF090896.1, |
| | | | | | AL080124.1, AK026647.1, BC003683.1, |
| | | | | | AK026480.1, AK026583.1, AL137560.1, AL359596.1, |
| | | | | | AB056421.1, AK026855.1, BC004958.1, |
| | | | | | AL122098.1, BC007198.1, AL117435.1, X72889.1, |
| | | | | | AB051158.1, AL136786.1, BC008280.1, |
| | | | | | AK000486.1, AL136789.1, BC003548.1, AF260566.1, |
| | | | | | AF078844.1, BC008780.1, AB048953.1, |
| | | | | | AL049430.1, BC003687.1, BC006807.1, AK025414.1, |
| | | | | | AL512746.1, AB063079.1, AL133014.1, |
| | | | | | BC008365.1, BC006412.1, AJ012755.1, BC006195.1, |
| | | | | | AB055315.1, BC008070.1, AK026526.1, |
| | | | | | AL162008.1, AK026642.1, AK027116.1, AB060863.1, |
| | | | | | AB055368.1, AK026462.1, AL359615.1, |
| | | | | | AL137463.1, AK026504.1, AL049300.1, AL137557.1, |
| | | | | | AB048964.1, AK025391.1, AL050024.1, |
| | | | | | AB047801.1, AF090903.1, AL050149.1, AL157431.1, |
| | | | | | AL080137.1, AL133113.1, AF271350.1, |
| | | | | | AL162002.1, AF230496.1, AB060826.1, AF162270.1, |
| | | | | | AL050116.1, AK025958.1, AL049464.1, |
| | | | | | AK025092.1, AB060852.1, AF111847.1, AL353940.1, |
| | | | | | AF146568.1, AL136586.1, AL050393.1, |
| | | | | | S61953.1, AB019565.1, AL080060.1, BC008382.1, |
| | | | | | AF097996.1, BC008417.1, AL133640.1, |
| | | | | | AK026651.1, AF217987.1, AK025254.1, AK026593.1, |
| | | | | | AL359620.1, BC005890.1, AK025906.1, |
| | | | | | AK025339.1, AB056427.1, AK026164.1, AL512733.1, |
| | | | | | AB048954.1, AK027164.1, AK000391.1, |
| | | | | | AB060214.1, AL110280.1, AF026816.2, X82434.1, |
| | | | | | AL122049.1, AL133093.1, BC002839.1, |
| | | | | | AL512684.1, AB047904.1, BC006440.1, AL359583.1, |
| | | | | | AL117585.1, AK026600.1, AK025383.1, |
| | | | | | AF125949.1, AL050146.1, BC004556.1, AL136799.1, |
| | | | | | AF061573.2, AL122121.1, AL136805.1, |
| | | | | | AF091084.1, AL049466.1, AL136928.1, AL162083.1, |
| | | | | | AF090934.1, AK027096.1, AK026086.1, |
| | | | | | AK025967.1, AK026597.1, BC002643.1. |
| HLHAP05 | 116 | 638476 | 1-1828 | 15-1842 | AW963016, AW979070, AA554869, AA828610, |
| | | | | | C14699, AA359181, C15123, AI380617, |
| | | | | | AW303196, AW301350, AW023111, AW974639, |
| | | | | | AI798545, AA359849, AV711430, BE252421, |
| | | | | | BG222813, BF974349, BG236628, BF804385, |
| | | | | | AI246796, BF918155, AV711465, BE180633, |
| | | | | | AW327868, BE301584, BF879045, BF965775, |
| | | | | | AA574442, AI253987, AW410784, C15415, |
| | | | | | BF761328, AI357823, BE676019, AV738383, |
| | | | | | AW270258, AW167330, AA610509, AI188390, |
| | | | | | BG029224, AV759972, AL117335.26, AL109976.23, |
| | | | | | AC009087.4, AL136081.10, AL021579.1, |
| | | | | | AF064861.1, AC079684.16, AL163279.2, AL136000.4, |
| | | | | | AC006014.2, AC005067.2, AL049839.3, |
| | | | | | AL035587.5, AC008569.6, AL513131.1, U89335.1, |
| | | | | | AC008771.4, AC005052.2, AC073136.6, |
| | | | | | AC003104.1, AL117336.22, AL031730.1, AC022515.5, |
| | | | | | AC009570.13, AC010328.4, AL049776.3, |
| | | | | | AL135749.3, Z85986.1, AC002369.1, AC007201.1, |
| | | | | | L44140.1, AL133545.10, AC011450.4, |
| | | | | | AC013726.7, AL034405.16, Z84469.1, AL139099.2, |
| | | | | | AL136305.14, AC020908.6, AC005291.1, |
| | | | | | AC008622.5, AC004647.1, AL158040.13, AC018636.4, |
| | | | | | AC008625.5, AC005488.2, AL050307.13, |
| | | | | | AC083863.2, AC007969.3, AC016602.6, AC002316.1, |
| | | | | | AC010126.3, AL359235.3, AC006480.3, |
| | | | | | AC004819.1, AP001748.1, AC006157.2, AL121969.12, |
| | | | | | AC003093.1, AC011236.8, AC009362.8, |
| | | | | | AC018648.5, AP000924.6, AC005261.1, AC004520.1, |
| | | | | | AP001705.1, AC008280.4, U47924.1, |
| | | | | | AC018695.6, AC004000.1, AL049646.19, AC002425.1, |
| | | | | | AC011005.7, AL359711.18, Z85987.13, |
| | | | | | AL132659.10, AC004953.1, AC006329.5, AC016594.6, |
| | | | | | AC011465.4, AC073321.4, AP000240.1, |
| | | | | | AC007308.13, U95742.1, Z97056.1, AL049761.11, |
| | | | | | AL391241.21, AP002852.3, AC025679.4, |
| | | | | | AP000424.3, AP000096.1, AL031311.1, AL034420.16, |
| | | | | | AC005098.2, AC009086.5, AC026464.6, |
| | | | | | AC002350.1, U91318.1, AC007664.12, AL020995.14, |
| | | | | | AL354813.31, AC083866.2, AC004797.1, |
| | | | | | AC004791.1, AC002504.1, AC005722.1, AC022211.5, |
| | | | | | AC009068.10, AC022405.5, AC005932.1, |
| | | | | | AC025457.5, AF318296.1, AC005077.5, AL161670.4, |
| | | | | | AC004815.2, AC027129.5, AC012170.6, |
| | | | | | AC011894.3, AL121586.31, AF287262.1, AC006530.4, |
| | | | | | AC022415.5, AL162293.22, AL117352.12, |
| | | | | | AL121891.22, AC007216.2, AL034451.26, AC009244.24, |
| | | | | | Z97985.16, AC006006.2, AC011247.10, |
| | | | | | AL132713.11, AL133246.2, AL135818.3, AJ400877.1, |
| | | | | | AC004098.1, AC004922.2, AP001670.1, |
| | | | | | AC010618.7, AC009137.6, AC011551.3, AC002470.17, |
| | | | | | AC011737.10, AL353668.18, AC079361.17, |
| | | | | | AC007421.12, AC005520.2, AC005082.3, AC005099.1, |
| | | | | | AL035659.22, AL445928.8, AL136300.22, |
| | | | | | AF243527.1, AC005940.3, AC019205.4, AC024561.4, |
| | | | | | AC004655.1, AC005562.1, AC004656.1, |
| | | | | | AC072061.8, AC016995.4, AC015853.8, AC004222.1, |
| | | | | | AC005531.1, AL354816.5, AL157372.18, |
| | | | | | AC006483.3, AF168787.1, AC012151.13, AL109935.39, |
| | | | | | AC006211.1, AC004128.1, AL035088.1, |
| | | | | | AC005952.1, AC011453.4, AC004648.1, AL133228.18, |
| | | | | | AC010913.9, AC007371.16, AC007030.3, |
| | | | | | AL121972.17, Z95152.1, AC000134.14, AC034198.6, |
| | | | | | AC007690.11, AL117382.28, AP001630.1, |
| | | | | | AL162430.15, AC006452.4, AL589723.7, AL009181.1, |
| | | | | | AL121992.24, AL132768.15, AL445490.6, |
| | | | | | AC008072.3, AC007220.4, AL132640.4, AP000210.1, |
| | | | | | AP000132.1, AC068724.7, AC004702.1, |
| | | | | | AL359792.3, AC004216.1, AC006509.15, AL049636.22, |
| | | | | | AC011816.17, AC008397.7, AC020916.7, |
| | | | | | AC010326.6, AL162464.5, AC005378.2, AC069262.24, |
| | | | | | AL031905.7, AF288742.1. |
| HLHCS23 | 117 | 560663 | 1-1413 | 15-1427 | AL512506.8. |
| HLIBO72 | 118 | 88343 | 1-1754 | 15-1768 | AW364017, AV726728, BF035681, AA169752, |
| | | | | | AW364018, AW473802, AI983855, AI925556, |
| | | | | | AW069100, BE677197, BF382750, BF590308, |
| | | | | | AW970436, AW069481, AI341115, AA622018, |
| | | | | | AI167674, AI335907, AI377478, BE677196, |
| | | | | | AI352114, AA373289, AA826793, AA443946, |
| | | | | | AA431454, AA768408, AI274003, BF727025, |
| | | | | | AA630606, AW364013, AA132208, AW574586, |
| | | | | | AA621404, N54466, AA593091, BG166649, |
| | | | | | BF883778, BF882969, AA127838, AI695553, |
| | | | | | BF371992, BF793125, AA807643, BF965857, |
| | | | | | BF739818, BE074542, H02646, BE395704, |
| | | | | | BG249993, AV764523, BG249406, BF832747, |
| | | | | | AW964084, AW673241, AW969921, AW276827, |
| | | | | | AW969698, AW969694, BF698559, BF337291, |
| | | | | | BE350475, AI570261, AV759382, AW972871, |
| | | | | | AW731867, AI289067, AV764398, F36273, |
| | | | | | AI061334, AL046409, AI679782, AI619997, |
| | | | | | AA177061, AW088202, AW975425, AW419262, |
| | | | | | AI085719, W79504, AW472872, AW029038, |
| | | | | | AI653636, AI471481, BE047069, AI688846, |
| | | | | | AI053672, AW301350, AI904894, AI341664, |
| | | | | | AI284640, AW303196, AW193432, AW406162, |
| | | | | | AI471543, AA843450, AI801600, AL042420, |
| | | | | | AW502975, AV762395, BF680805, BF851403, |
| | | | | | BF854876, AI375710, AI431240, AW406447, |
| | | | | | AV763988, AI537955, AI963720, BF939954, |
| | | | | | AV713741, AI298710, AV735370, AI379719, |
| | | | | | AW162049, AW276817, AI653886, AI929531, |
| | | | | | BE540527, AI962050, AW517377, AI365988, |
| | | | | | AI344844, AI357288, AW274349, AW008317, |
| | | | | | AW769399, AL120502, AI368745, AW261871, |
| | | | | | AI339850, AW339568, AI017415, AW630298, |
| | | | | | BE872393, AV740801, AI434695, BF668217, |
| | | | | | AA649642, AV763540, AW338086, BG169853, |
| | | | | | AA127353, BG249643, AI053790, AV710066, |
| | | | | | AW511743, AA581903, AA577906, BG118285, |
| | | | | | AI431303, AI471534, AV760937, AI143242, |
| | | | | | BF794230, AV763633, AW193265, AI281697, |
| | | | | | AA350859, BF698579, AA610491, AV764530, |
| | | | | | AI446601, AI282832, BF210720, AI951863, |
| | | | | | AI590689, AI590958, AI951889, AU158383, |
| | | | | | AV760624, BF840326, AW833862, AA522942, |
| | | | | | AI281881, AI732186, AL038785, AI801591, |
| | | | | | AW501386, BG036665, AW576391, BE677379, |
| | | | | | AW970865, AA446657, AI334443, BC007829.1, |
| | | | | | AB014733.1, AC008383.8, AF140225.1, AL449363.12, |
| | | | | | AP000348.1, AC004263.1, Z86061.1, |
| | | | | | AC007151.2, AC087239.18, Z82244.1, AC011475.6, |
| | | | | | AC009996.7, AC018828.3, AC022383.3, |
| | | | | | U02532.1, AF015160.1, AP000901.5, AC005280.3, |
| | | | | | AC079753.7, AC006277.1, AC008764.7, |
| | | | | | AL022322.1, AL354932.26, S75201.1, AC012442.7, |
| | | | | | AL049776.3, AL121891.22, AF015158.1, |
| | | | | | AC087071.2, AF015156.1, AC004672.1, AC009086.5, |
| | | | | | AC004898.3, AC005104.1, U12582.1, |
| | | | | | AC024561.4, AC004824.3, AC005520.2, AL031320.6, |
| | | | | | AC007676.19, AF015151.1, AC073273.9, |
| | | | | | U12584.1, AC002984.1, AF015167.1, D83989.1, |
| | | | | | AC011485.6, AL031672.13, AC006211.1, |
| | | | | | AC005234.1, U47924.1, AC011480.3, AC073517.5, |
| | | | | | AL122035.6, AC007782.20, AL121897.32, |
| | | | | | U57005.1, AC006329.5, AC004596.1, AC005484.2, |
| | | | | | AL161756.6, U63721.1, AF077058.1, |
| | | | | | AP001666.1, AF015162.1, AF015148.1, AL162891.4, |
| | | | | | AP002851.2, U57007.1, AC004797.1, |
| | | | | | S56967.1, Z68284.1, U12580.1, AC020658.6, |
| | | | | | AB053170.1, AC007686.5, AL031985.10, |
| | | | | | AC011443.6, AF207550.1, AL008629.9, AC006479.2, |
| | | | | | AL365364.19, X55931.1, AL031005.1, |
| | | | | | AL109935.39, AP001729.1, U18391.1, U18394.1, |
| | | | | | AP000719.4, AC010679.6, AL035658.7, |
| | | | | | AC005282.4, AL354935.23, AC035150.1, AC027319.5, |
| | | | | | AC021382.6, AC018636.4, AC021019.5, |
| | | | | | Z99716.4, X54180.1, AF251315.1, AC011742.3, |
| | | | | | AL139327.18, AL022302.10, AL355499.15, |
| | | | | | AL136418.4, AL139054.1, AL445217.3, AF015155.1, |
| | | | | | AL035659.22, AC009796.6, M87916.1, |
| | | | | | AC004840.3, AF042090.1, AC005231.2, M37551.1, |
| | | | | | AC005664.2, AL139251.13, AL136110.17, |
| | | | | | AL121581.41, AP000311.1, AC004589.1, AC068533.7, |
| | | | | | AC016898.6, AC002985.1, AF015157.1, |
| | | | | | X55925.1, X54177.1, AL353580.7, AC005755.1, |
| | | | | | AC005778.1, AL122004.17, AC002491.1, |
| | | | | | U18393.1, AC069255.18, AL590762.1, AC000358.1, |
| | | | | | AF015165.1, AC034200.6, AL590964.8, |
| | | | | | AC005911.6, U18387.1, AC010404.5, AP001685.1, |
| | | | | | AC005632.2, AC007899.3, AC009131.6, |
| | | | | | AB045361.1, AC012087.10, M87919.1, AC073258.9, |
| | | | | | AC007316.4, AC084882.2, AC007731.14, |
| | | | | | Z97054.1, AC008744.6, AL133402.10, AC007240.2, |
| | | | | | X55926.1, AL356481.16, Z93023.1, |
| | | | | | AC005500.2, AC022493.12, AC006157.2, X53550.1, |
| | | | | | AC008622.5, AC020906.6, AC021752.5, |
| | | | | | AL031729.16, AB037745.1, AC017079.5, AC008155.9, |
| | | | | | AP001718.1, AC006483.3, BC001368.1, |
| | | | | | AL163282.2, AC008795.6, AL136365.9, AF283320.1, |
| | | | | | U12581.1, AL157373.23, AC003007.1, |
| | | | | | AL031685.18, AC004002.1, AL133480.9, AC005409.1, |
| | | | | | AL021878.1, U57008.1, AC006476.3, |
| | | | | | AF095855.1, X54176.1, AL022476.2, AC005531.1, |
| | | | | | AC083863.2, AL031123.14, U18398.1, |
| | | | | | AC016772.8, U62317.2, X75335.1, AL110115.38, |
| | | | | | AC010000.5, AC011472.7, AC007363.3, |
| | | | | | AC008079.23, AL035587.5, AC006433.18, U18395.1, |
| | | | | | AL133370.4, AC016939.8, AC023114.5, |
| | | | | | AC074338.1, AC005324.1, AC018751.30, AC010422.7, |
| | | | | | AC006213.1, AC011455.6, AL133232.15, |
| | | | | | AC010319.7, AP001172.1, AC022392.4, AF015170.1, |
| | | | | | AC013604.9, AC010677.4, AL031276.1, |
| | | | | | AL121845.20, AP000555.1, AL035668.15, AP000161.1, |
| | | | | | AC008033.8, AC009122.8, AC020915.6, |
| | | | | | U67827.1, AL135924.11, AF176815.1, AC004773.1, |
| | | | | | AC009161.12, AL121944.14, X54175.1, |
| | | | | | X54181.1, U57009.1, AD000092.1, AC083871.2, |
| | | | | | AC005497.9, AL139039.17, AC004224.1, N76577, |
| | | | | | AA535949, D20477. |
| HLICE88 | 119 | 840321 | 1-826 | 15-840 | AL532043, AI201573, AL531300, AL531634, |
| | | | | | AI989422, AL531496, AL531955, AI984220, |
| | | | | | AL531518, AI954841, AL531321, AF074698, |
| | | | | | AW339929, AL531471, AV651041, AA779747, |
| | | | | | AV651093, AV699907, AV650840, W72217, |
| | | | | | AI064748, AV654559, AV682392, AW269523, |
| | | | | | AV651109, AL531705, AV694886, AL531173, |
| | | | | | AL531868, AV654713, AV682656, AI174843, |
| | | | | | AV718993, AV690790, AV647604, AW665993, |
| | | | | | AI065032, AV700518, AI568934, AA936960, |
| | | | | | AV718549, AI092886, AI189826, AI187086, |
| | | | | | AV718380, AI911879, BE825390, BF126685, |
| | | | | | AV719205, AV650157, AI313492, AI917303, |
| | | | | | AV699400, T64315, AV682007, AV683969, |
| | | | | | AI186901, AW950039, AV662312, AA906009, |
| | | | | | AV658467, AI283155, AI580756, AI207724, |
| | | | | | AV700035, AL532119, AV682707, AI989903, |
| | | | | | AV682339, AI825233, AV718528, AV692690, |
| | | | | | AV661899, AV687963, AV649290, AV695138, |
| | | | | | R00044, AW074348, AV662232, AV662173, |
| | | | | | W68580, W77961, AV661196, W78129, |
| | | | | | W94563, AA312959, AV719960, C20909, AV655180, |
| | | | | | AA313014, AV647336, N79517, T53800, |
| | | | | | AV697776, W92647, AI140948, AV661818, AV653519, |
| | | | | | AV682459, T69024, T64703, R85625, |
| | | | | | AV659219, AV654902, AV654163, AV656147, AA343530, |
| | | | | | T62908, AV662293, AV646927, AV660491, |
| | | | | | AV661947, T27841, D12274, AV649738, AV719990, |
| | | | | | AL531635, W78014, T50716, AA344654, |
| | | | | | AV690645, AA343475, AV655633, AV694901, |
| | | | | | AV661905, AV653213, AV656799, T64666, |
| | | | | | BE250740, AV646035, BF884848, H89646, BF907679, |
| | | | | | AV684695, AV697617, T74885, AI266531, |
| | | | | | AV693375, BF700475, AV649852, AA312904, |
| | | | | | BF884387, T72273, AA360373, AA345098, |
| | | | | | T46873, AV649783, T40932, T64651, BF223298, |
| | | | | | BE971381, T73291, AA345478, T68149, |
| | | | | | AA344540, AV652797, T69397, BE786550, AA127901, |
| | | | | | T70574, H49804, T67493, AA313214, |
| | | | | | AV659816, W79416, AV648902, AA345122, AI808530, |
| | | | | | AV655148, BF059586, AV718825, T52365, |
| | | | | | T23996, T74611, AA313496, T69582, T68003, |
| | | | | | AV648713, T64115, AA345475, BF695457, |
| | | | | | AV682967, R09360, T69277, AA345347, AV662313, |
| | | | | | AA328409, AA780302, AA344998, T50690, |
| | | | | | T68193, T58776, AA313189, T50709, T74553, |
| | | | | | AA345561, AA345467, AV653080, T94279, |
| | | | | | BE693289, T69653, AI065018, BF126654, BE693283, |
| | | | | | T69258, T41064, AV688374, AV655766, |
| | | | | | BF814637, AA313124, AA331360, AA345116, |
| | | | | | AA360365, T73437, T67507, AA313165, |
| | | | | | AA345423, AV684262, AA382681, AA344388, T82069, |
| | | | | | AA345257, AV661807, AA313286, AA345507, |
| | | | | | T41037, AA313498, BF696362, AV692145, |
| | | | | | AA345440, T55851, AA345466, AA337510, |
| | | | | | AV681621, T83205, T55856, T72290, AW805833, |
| | | | | | AV655197, BE971173, AV659822, T58721, |
| | | | | | AL531497, AA344638, AA331364, AV656556, |
| | | | | | AL532136, BC007044.1, AF350254.1, M10014.1, |
| | | | | | K02569.1, X14174.1, X51473.1, X00086.1, |
| | | | | | T58742, T58809, T61213, T61761, |
| | | | | | T41027, T72141, T73555, T90758, R09244, R01860, R06531, |
| | | | | | H89500, W68581. |
| HLICO10 | 120 | 658740 | 1-889 | 15-903 | AL529328, BG112680, BG167989, AA085584, |
| | | | | | BE262006, AL529327, BG260293, BG249757, |
| | | | | | N22761, N26007, BF196867, AA280102, |
| | | | | | BF514824, BE891591, AA767358, BF939520, AI279818, |
| | | | | | BE739831, AL120055, BF963163, AI925373, |
| | | | | | AA131093, AW085504, AW162139, AL535957, |
| | | | | | AW474103, AA420445, N28638, BF956276, |
| | | | | | BF593788, AI744571, AA742528, AI435277, |
| | | | | | AI829565, AW160528, AI139035, AI493778, |
| | | | | | AI245988, AW069411, AW516063, BE910223, |
| | | | | | W15257, AI151012, BG054902, AI301040, |
| | | | | | AA722819, W76144, AI889181, AI204062, AI149031, |
| | | | | | AI347045, AI499416, AI673290, AI355297, |
| | | | | | AI129621, AA543069, AI751089, AA994980, |
| | | | | | AI362786, AI318410, AW149494, AI125569, |
| | | | | | AI079416, AW404941, AA770442, AA648851, |
| | | | | | AA629008, BE328665, AI247813, AA160319, |
| | | | | | BE440081, N22512, AA443882, AA778886, |
| | | | | | AI660433, BE931050, AA649181, AI745515, |
| | | | | | N62872, AA493744, BG056104, AI623946, |
| | | | | | AI285125, AI215715, BE222502, BE676429, |
| | | | | | AA504825, AI581011, AA620693, AI078347, D52655, |
| | | | | | AW303949, AA687345, AI393677, BF940962, |
| | | | | | BG171314, AA749011, AV726238, AA417346, |
| | | | | | AW170474, Z33441, AI183796, AA808431, |
| | | | | | BF108904, AW874002, R68900, N36639, BF081563, |
| | | | | | BF874460, AA460912, AI801687, AA844317, |
| | | | | | AI033533, AA862981, AA164234, BF106233, |
| | | | | | AI123102, AI630222, AA132268, H97951, |
| | | | | | F09973, AA700603, BF095564, AA987560, AA310754, |
| | | | | | AI204674, AA917323, AA055734, AW303928, |
| | | | | | AA887061, AA280035, AA349683, H05230, |
| | | | | | AA099981, BF090414, AA364664, AI291170, |
| | | | | | AI468099, R68798, BF346271, N48905, D79245, |
| | | | | | AA417342, AA411885, AA722919, AA420446, |
| | | | | | AA948485, AA399258, T72608, AI432975, |
| | | | | | AA362128, AW058332, W92665, R83367, |
| | | | | | AA494154, W39243, AA846034, H95607, T34609, |
| | | | | | AA215954, H23218, AW050688, H24734, |
| | | | | | AW514476, AA923801, H66432, W72918, AI079606, |
| | | | | | R98151, H66431, AA244417, BE698764, |
| | | | | | AA804423, AA622872, T31355, AA702502, R43440, |
| | | | | | AA707618, H24733, R87113, T27438, |
| | | | | | AA558993, T59606, AA935666, D82741, D82748, R96845, |
| | | | | | AI370727, BF593775, AV701728, AA857267, |
| | | | | | T93033, AL535958, AA834104, AI758519, R38967, |
| | | | | | BF037544, BE931079, AA026767, R99802, |
| | | | | | AA781666, R83802, BE855553, BF086577, AV749936, |
| | | | | | BF130854, AA837976, BE084146, BF369140, |
| | | | | | BE719714, BF959504, AW008916, AA244402, |
| | | | | | BF749521, AA411884, BF355502, AV705377, |
| | | | | | N49651, BF036781, AA307437, BF959508, |
| | | | | | AA132267, BF355476, AF131742.1, AL031685.18, |
| | | | | | AF090934.1. |
| HLJBS28 | 121 | 658742 | 1-962 | 15-976 | BE567776, AV700524, BF196916, AI672424, |
| | | | | | AW444907, AW675742, N22350, BF130300, |
| | | | | | AI493074, AI128167, AA813377, AA581365, |
| | | | | | AA806553, AA251305, AI077946, BE939272, |
| | | | | | AW302629, AA708974, AA280790, AA868066, |
| | | | | | W57951, AA732853, N48892, AA602429, |
| | | | | | AA281438, AA451619, AI280014, N75214, |
| | | | | | AA281368, AI434509, AI287995, AI807299, AI907315, |
| | | | | | BF223560, AW236045, AW630367, AW935099, |
| | | | | | AA280750, C00449, AI494205, AI832681, |
| | | | | | AA419487, AI907335, AI907325, AI907322, |
| | | | | | AI907316, H43026, AI907338, AA251633, AI907336, |
| | | | | | AI907339, AI907421, AI907320, AA450216, |
| | | | | | AI907328, BF885933, AI907317, AI907330, |
| | | | | | AW627341, AA419544, AI907332, BE172973, |
| | | | | | AW820280, AI907326, AI907323, AI864966, |
| | | | | | W58084, AW820475, BE163982, AI907333, |
| | | | | | AI907318, AI907331, AI907337, AI907334, AI907327, |
| | | | | | AI907319, AC008482.5. |
| HLMJB64 | 122 | 658699 | 1-790 | 15-804 | AA009680, AA009679, AW001223, AA010946, |
| | | | | | AW029359, BF957577, AI905884, AA777011, |
| | | | | | AL122043.1, AL034550.31. |
| HLWAV47 | 123 | 897769 | 1-2048 | 15-2062 | AU134635, BF970923, AW299310, AW172863, |
| | | | | | AI480424, AU155551, AW771898, AI913412, |
| | | | | | N22470, AI564411, R96113, AA018040, |
| | | | | | AW953032, H03718, R63626, H02827, H04026, R63612, |
| | | | | | C03429, R63627, H03345, AA343143, |
| | | | | | AA001617, R63613, R96075, AI820094, AI742556, |
| | | | | | BE926861, AI289791, AA814782, AA504514, |
| | | | | | AI499986, BF107423, AI491710, AI696340, |
| | | | | | AI609478, AI648699, AI334445, AW301409, |
| | | | | | AW583111, AW084896, AI521799, BE047852, |
| | | | | | AV682326, BE883591, AW834302, AW029457, |
| | | | | | AI471429, AL040011, BF726255, AI915049, |
| | | | | | AA808175, AW087879, BE439844, BF337541, |
| | | | | | BE886790, AW087217, AL036150, AW020381, |
| | | | | | BE904911, AI539028, AI886355, AI955945, |
| | | | | | AI476694, R65859, AI439664, AV734654, BF925370, |
| | | | | | AI926593, AW151451, BF343238, AI688854, |
| | | | | | AI539260, AW089275, BF338027, AI289436, |
| | | | | | AI433611, AI446457, AW151132, AW088899, |
| | | | | | AW021717, AI432040, AW189563, AI803935, |
| | | | | | R80916, AI859644, AW022636, AI538885, |
| | | | | | BE790023, BG105099, AV710208, AI680418, |
| | | | | | AI587567, AW088605, BE393784, AA488166, |
| | | | | | AI923989, AV757158, AW088560, AI689096, |
| | | | | | AA745069, AA587120, AW087886, AI305157, |
| | | | | | AI537516, AW082623, AI440238, AA928539, |
| | | | | | BF812963, AI623535, AI925510, BF811802, |
| | | | | | AI560227, BF686161, BF337602, AA853033, |
| | | | | | BG026746, AI474646, AV706624, AI680504, |
| | | | | | BF971669, AI683979, BE964302, AI225000, R10067, |
| | | | | | AI401697, AI623396, AI367203, BG113299, |
| | | | | | BF793187, BE621256, AW118448, AI472487, |
| | | | | | AI249389, AI560545, AA731711, AI280584, |
| | | | | | AW959827, BE906419, AI658566, AI571000, |
| | | | | | AL513961, AW301861, AW263569, AI371872, |
| | | | | | AI538637, AW409775, AW051088, AW020397, |
| | | | | | AW168485, BE542554, AI339746, AI696434, |
| | | | | | BE541445, AI499104, AI500523, AW088183, |
| | | | | | AI445620, AI554516, AW059568, BG110517, |
| | | | | | AI874261, AI699823, AI364220, AI309306, |
| | | | | | BE875750, AI422688, AI624021, AI612723, |
| | | | | | AW166742, BE962830, BE439708, AW168200, |
| | | | | | AV713079, AI498288, BF699580, AW025279, |
| | | | | | AI355779, BE875959, AI590043, BF679724, |
| | | | | | BF814215, AI524654, AI499325, AV728997, |
| | | | | | BE540209, AA904121, AI801325, AI279925, |
| | | | | | AI419650, AI096481, AA767924, AI926182, |
| | | | | | AW169598, BF814357, AA804747, AI696714, |
| | | | | | AI873998, AW410868, AI699020, AW087933, |
| | | | | | AI628850, BF213155, BG027010, BF924855, |
| | | | | | N49165, AI418234, AI669640, AI096771, |
| | | | | | BF840081, AI569440, AW151850, AW104141, |
| | | | | | AI473536, AI469516, AI242248, AI224373, |
| | | | | | BE965355, AI301046, AI608676, AI355147, |
| | | | | | AW198133, BF872365, BF345028, AI267379, |
| | | | | | H89138, BG111199, AI475377, BG026354, |
| | | | | | BG178423, AI241741, AA765198, AW055252, |
| | | | | | BG252799, AI538764, AV681638, AV659322, |
| | | | | | BG029709, AL048323, BE884130, AI590755, |
| | | | | | AI598132, AB020639.1, AK001811.1, AF058291.1, |
| | | | | | AL445650.9, AL035587.5, AF217987.1, AL355834.4, |
| | | | | | X99226.1, BC007034.1, AL136565.1, |
| | | | | | AK026630.1, AL136784.1, BC002495.1, AL161802.15, |
| | | | | | AK025632.1, AL121828.17, AF260566.1, |
| | | | | | BC000051.1, AL389935.1, BC004923.1, AK026642.1, |
| | | | | | BC003410.1, AC009233.3, AB060876.1, |
| | | | | | AB060869.1, AC066585.5, AC004837.1, AL360294.11, |
| | | | | | AL442643.2, AL157433.1, AC069247.5, |
| | | | | | AL136644.1, AL137267.1, BC004960.1, AF217989.1, |
| | | | | | AK024747.1, AK025258.1, AL137627.1, |
| | | | | | AL035407.15, BC007304.1, U38847.1, AF218033.1, |
| | | | | | AL512689.1, AL353940.1, AF146568.1, |
| | | | | | AL122104.1, AK024974.1, AK000502.1, M64936.1, |
| | | | | | Y13350.1, AK024992.1, AP001699.1, |
| | | | | | AF038847.1, AB060893.1, AL137711.1, AF274348.1, |
| | | | | | AF274347.1, BC008893.1, Y00093.1, |
| | | | | | AK026600.1, AL354828.12, AL136984.20, AC026888.6, |
| | | | | | AB060877.1, AK000247.1, AL161804.4, |
| | | | | | AK026506.1, BC006807.1, AL355143.17, AF225424.1, |
| | | | | | AL137258.1, BC002409.1, AK025375.1, |
| | | | | | AF110640.1, BC006525.1, S76508.1, BC001369.1, |
| | | | | | M19658.1, AL050024.1, BC006103.1, |
| | | | | | AC008897.7, AK025407.1, AB055368.1, AL356015.3, |
| | | | | | AY026527.1, AK025772.1, BC008649.1, |
| | | | | | AK026057.1, BC000253.1, AL512754.1, BC003101.1, |
| | | | | | AK025958.1, AB049880.1, AL359601.1, |
| | | | | | AL136765.1, AK000618.1, BC008781.1, BC002809.1, |
| | | | | | BC008718.1, AL096727.1, AF013249.1, |
| | | | | | AL117416.1, AK025092.1, AB048975.1, AK027200.1, |
| | | | | | AB056372.1, AL117457.1, AK027188.1, |
| | | | | | AK000391.1, AL137480.1, AK026556.1, X61970.1, |
| | | | | | BC002958.1, AF078844.1, AB047609.1, |
| | | | | | AL136928.1, AK026590.1, BC001763.1, AL356473.11, |
| | | | | | X66975.1, AC006357.5, AK000718.1, |
| | | | | | AC013407.7, X00474.1, AL110222.1, AF217982.1, |
| | | | | | AB063009.1, AB050534.1, AK026762.1, |
| | | | | | BC007767.1, AB050431.1, BC001217.1, AK025484.1, |
| | | | | | AL136864.1, AL050393.1, BC002574.1, |
| | | | | | AF126372.1, AL355795.13, AF229831.1, S61953.1, |
| | | | | | AB048910.1, BC002695.1, BC004530.1, |
| | | | | | BC001967.1, AF177336.1, AB055352.1, AB046642.1, |
| | | | | | AL080139.1, AL122100.1, AL133075.1, |
| | | | | | AL096744.1, BC001790.1, AK000414.1, AL137548.1, |
| | | | | | AF201468.1, AK027868.1, AF112208.1, |
| | | | | | BC002733.1, BC003637.1, AF007142.1, AL137429.1, |
| | | | | | AJ406939.1, AC009953.4, AL354776.15, |
| | | | | | AK027129.1, BC003614.1, BC004925.1, AB056427.1, |
| | | | | | AK026626.1, BC003056.1, AL135796.6, |
| | | | | | BC001349.1, BC003682.1, AL133047.1, BC001969.1, |
| | | | | | AL136882.1, AP001605.1, BC000632.1, |
| | | | | | AL117644.1, AL136615.1, AL110196.1, BC003108.1, |
| | | | | | BC004951.1, AL050172.1, AL512733.1, |
| | | | | | BC006345.1, AL137574.1, BC007522.1, AK026570.1, |
| | | | | | AK026615.1, U77594.1, BC000007.1, |
| | | | | | AF111112.1, U96074.1, AL121722.9, AF074604.1, |
| | | | | | BC008364.1, BC002700.1, BC002390.1, |
| | | | | | AK025209.1, AB048921.1, AF339775.1, BC004244.1, |
| | | | | | AF002672.1, AL136749.1, AL133665.1, |
| | | | | | AL353092.6, AL133560.1, BC003687.1, AB048953.1, |
| | | | | | BC002519.1, BC001059.1, AF202636.1, |
| | | | | | AK025259.1, AK000421.1, BC007898.1, AL133344.28, |
| | | | | | AL137656.1, BC004324.1, AL122118.1, |
| | | | | | AF369701.1, AL157479.1, AF230496.1, AK026462.1, |
| | | | | | AK026356.1. |
| HLYDF73 | 124 | 566869 | 1-612 | 15-626 | AC009753.5. |
| HLYGE16 | 125 | 651339 | 1-738 | 15-752 | AW469203, BF820842, BE218294, AW196671, |
| | | | | | BF447223, AI696980, AW236972, AI027666, |
| | | | | | BF798334, BF807954, BE217850, T59291, |
| | | | | | AI267964, R44968, AW444500, AW295686, |
| | | | | | AW291949, AI928514, AI823933, AU153630, |
| | | | | | AI139764, BE005097, AI948643, BF108749, |
| | | | | | AI126466, AW242784, R49472, AU160792, |
| | | | | | AW273139, AI273589, AW589378, AI274894, |
| | | | | | BF448101, AW510475, AI302181, AI400517, |
| | | | | | BE550344, AI365030, H18516, AI206723, F09161, |
| | | | | | F09171, AI696176, AI992327, F09169, |
| | | | | | AW051573, AA847131, R86756, AU148421, AU154040, |
| | | | | | AI421825, AU159186, AI146780, AI910733, |
| | | | | | AA868280, AA722823, BE504675, AI739531, |
| | | | | | AU152829, AA868452, AI911876, BE552250, |
| | | | | | AI168680, AI954643, AI913116, AW237207, |
| | | | | | BE502531, AI142459, D80575, AW002567, |
| | | | | | BF939794, D80957, AA702863, BF591908, AA455456, |
| | | | | | AI015316, AA922953, AV645338, AA514480, |
| | | | | | AI420243, R86981, AI420270, T59250, BF508779, |
| | | | | | R60233, R51570, AI580357, W86599, |
| | | | | | AA417873, AA085431, AA227559, AA852691, H57046, |
| | | | | | BF845379, AA192359, AI580716, AA455455, |
| | | | | | AA776815, AI140464, AA075296, BE300079, |
| | | | | | R27183, AA814809, AW105331, AA024748, |
| | | | | | D81100, BE620885, BF845381, R27182, BF912382, |
| | | | | | BE904044, BE904041, BE881261, BE965135, |
| | | | | | AI631590, BE551572, AI656791, AA282050, |
| | | | | | BG055430, AA937231, AC025594.5, BC009221.1, |
| | | | | | AK022910.1. |
| HLYGY91 | 126 | 658703 | 1-626 | 15-640 | AW294783, BE502344, BE222441, AI082255, |
| | | | | | AI031661, AI701563, BF431032, AW340159, |
| | | | | | AI250886, AA164268, AA113365, AW195764, |
| | | | | | AA813476, AI382168, AW044458, AI802164, |
| | | | | | AI149406, BF196258, AU155794, AA479123, |
| | | | | | AI167291, AI436306, AI224847, AI417116, |
| | | | | | AI709346, AI669258, AW772002, AA844518, |
| | | | | | AI282711, AI279738, AW195230, AW959069, |
| | | | | | BF002627, AI560087, AI286319, AI474555, |
| | | | | | AI092394, AA479124, AA243709, AI468637, |
| | | | | | AW991244, AA508073, AA243826, AI468739, |
| | | | | | T62160, AW975954, T61934, BE707630, |
| | | | | | BE169617, BF747189, BE832694, AA746981, |
| | | | | | AA328991, AK023448.1. |
| HMCFH60 | 127 | 654853 | 1-429 | 15-443 | BG029413, AW410249, AL120205, AL527305, |
| | | | | | AI754933, AW410004, AW411240, BE207947, |
| | | | | | AI348361, BG254821, AV717836, AI282565, |
| | | | | | AW015954, AI860745, BF970512, AI279557, |
| | | | | | BG250088, AI301063, AI887607, AW675703, |
| | | | | | AI277972, AI751711, AI610303, AW168266, |
| | | | | | AI954092, AW732241, AI199700, AI310726, |
| | | | | | AA533655, AI219656, BE047165, AI828679, |
| | | | | | AI829142, AI874208, AI741030, AI445423, |
| | | | | | AW339140, AW872712, AW872550, AI310725, |
| | | | | | BE675720, AW276596, BE049270, AA526998, |
| | | | | | AI300518, AI805844, AI814591, AA832328, |
| | | | | | AI927014, AA461097, AW337251, BE393698, |
| | | | | | AI453250, AW009901, AA522451, AI970703, |
| | | | | | AI147456, AI799656, AI866733, AI092937, |
| | | | | | AA526185, AI721118, AI017038, AI613235, AI339100, |
| | | | | | AW148657, AI538694, AW008035, AW269978, |
| | | | | | AI818220, AW130721, AI369774, AW778916, |
| | | | | | AA508660, AI285115, AW118526, AA280728, |
| | | | | | AI803837, AI078009, AI249388, AW274402, |
| | | | | | AA449775, AI741564, AI983830, AI953077, |
| | | | | | AI283484, W94943, AI186921, AA573897, AI078388, |
| | | | | | AA670351, AI423558, AW273429, AA745775, |
| | | | | | BE727124, AI591031, BF732731, AA903469, |
| | | | | | H98073, BF973696, AA628743, AW270071, |
| | | | | | AA987523, N91829, AI144428, AI081865, BG057107, |
| | | | | | BE797291, BE798645, AW899935, N34882, |
| | | | | | BG057959, AA065282, BE910046, W68425, |
| | | | | | AA132945, H26397, AA130713, AI535963, |
| | | | | | AA526103, BF436402, BF924840, AW189969, |
| | | | | | AA813305, F25776, R59097, BF793976, |
| | | | | | AW071554, AA102712, AL527475, W90665, AL533663, |
| | | | | | AL523124, AI246999, AW194200, AA677814, |
| | | | | | AW150820, AA004278, AL533350, AI983597, |
| | | | | | H25535, AI282522, BF941561, BE617576, |
| | | | | | BE613255, BF689583, AL521962, BF568937, R56834, |
| | | | | | AL524248, AI299507, AA805472, H46569, |
| | | | | | AW004802, BF828652, AA580297, AI364662, |
| | | | | | AA703237, AL521083, R56835, AA628330, |
| | | | | | HF570271, BE877417, AI365012, H56058, AA229754, |
| | | | | | AA229480, AA302484, AI918967, AI553849, |
| | | | | | AA373811, BF688841, AA853526, AI560300, |
| | | | | | AW470964, AA682774, BE858486, BF914567, |
| | | | | | AA496495, AI950742, R56673, AA526614, |
| | | | | | AA496620, R96820, AI972733, AA868647, |
| | | | | | AA644220, AA447147, AA228723, BG015338, |
| | | | | | AA887190, AA229233, AI690364, T51235, |
| | | | | | AW075387, AA953331, BG112305, AA713800, |
| | | | | | AI094450, H61569, BF375945, AA449063, |
| | | | | | AI026692, AA159983, BF914242, T73441, AI720505, |
| | | | | | BF336367, F31462, AI827198, AW772776, |
| | | | | | AA614196, AI300639, F18178, R10734, BF336341, |
| | | | | | BE548560, AA858412, BF912964, AA229962, |
| | | | | | AA872093, AI015741, AI051521, AI203695, |
| | | | | | AA978132, AA988865, AA365973, BF948395, |
| | | | | | AI690503, W68523, AA229458, Z38471, |
| | | | | | AW262508, AA736839, BF690492, BE181244, |
| | | | | | AA007293, BE122672, AW182880, BF947488, |
| | | | | | AW771037, AI350873, AA557419, BG016041, |
| | | | | | AW515865, AV697048, R56672, T24559, |
| | | | | | BF183570, AA923506, AF189289.1, BC000702.1, |
| | | | | | AF176006.3, AF192559.3, AF151822.1, |
| | | | | | AK022783.1, AF090943.1, AL512733.1, BC005402.1, |
| | | | | | BC006091.1, AL359583.1, AK027129.1, |
| | | | | | AK025414.1, BC007462.1, BC001967.1, AB060832.1, |
| | | | | | BC008842.1, AK025435.1, AK025113.1, |
| | | | | | M85165.1, AK027103.1, AL353940.1, BC004951.1, |
| | | | | | AL050172.1, AL389947.1, AF056191.1, |
| | | | | | AK027082.1, BC003651.1, AK027136.1, AL389935.1, |
| | | | | | BC009398.1, AL137530.1, BC002370.1, |
| | | | | | Z37987.1, AK000653.1, AK027102.1, AF245044.1, |
| | | | | | AL080146.1, BC008836.1, BC004290.1, |
| | | | | | AL137459.1, AB056372.1, AL137548.1, AL080162.1, |
| | | | | | AL137533.1, AL137657.1, AF232009.1, |
| | | | | | AB063100.1, AL355713.1, AB047878.1, AK026542.1, |
| | | | | | BC008780.1, AK024594.1, BC009395.1, |
| | | | | | BC004925.1, BC006196.1, AF261134.1, AF100781.1, |
| | | | | | BC001778.1, BC004945.1, AL137271.1, |
| | | | | | AB056421.1, AK024974.1, AL080234.1, BC007567.1, |
| | | | | | BC004264.1, BC004156.1, AK026885.1, |
| | | | | | AF352728.1, AL050155.1, BC004899.1, BC002471.1, |
| | | | | | AK026494.1, AF090900.1, BC002476.1, |
| | | | | | AB052191.1, AL049447.1, AB060229.1, BC003587.1, |
| | | | | | BC007926.1, X59812.1, BC000054.1, |
| | | | | | AL136586.1, AL137550.1, AL110159.1, AF026816.2, |
| | | | | | Y14040.1, AK026528.1, AK026480.1, |
| | | | | | BC008591.1, AL049382.1, BC002357.1, AL049314.1, |
| | | | | | BC004362.1, AF177336.1, AL157464.1, |
| | | | | | M85164.1, AL117460.1, AB046642.1, AL137281.1, |
| | | | | | AL137529.1, AF252872.1, AF260566.1, |
| | | | | | U73682.1, AL110280.1, BC002733.1, AL133084.1, |
| | | | | | BC008899.1, AK026959.1, AK027173.1, |
| | | | | | BC001964.1, AJ010277.1, AL136805.1, S76508.1, |
| | | | | | BC001470.1, AK026649.1, AL117587.1, |
| | | | | | BC003591.1, AK025099.1, AB060897.1, AK025092.1, |
| | | | | | AL512718.1, BC003548.1, AK026608.1, |
| | | | | | BC003052.1, AK026626.1, AL136844.1, AK027144.1, |
| | | | | | AB063046.1, AL353952.1, AL117435.1, |
| | | | | | AL133623.1, AL162002.1, BC002399.1, AL049464.1, |
| | | | | | AL359622.1, BC001166.1, BC002752.1, |
| | | | | | BC007280.1, BC008364.1, BC001236.1, AL122050.1, |
| | | | | | AB060837.1, BC006159.1, M86826.1, |
| | | | | | AB051158.1, AB044547.1, AL137711.1, AB060888.1, |
| | | | | | AL110158.1, AF061795.1, AF151685.1, |
| | | | | | AF274348.1, AF274347.1, AK025484.1, AF044323.1, |
| | | | | | AB062978.1, AL137479.1, BC005070.1, |
| | | | | | BC000077.1, AL122110.1, BC003658.1, BC003410.1, |
| | | | | | BC003637.1, BC004923.1, X82434.1, |
| | | | | | AF353396.1, BC007206.1, BC002816.1, BC008649.1, |
| | | | | | AK026583.1, AB060873.1, AL110296.1, |
| | | | | | AB063074.1, AL117416.1, AF217987.1, AK026784.1, |
| | | | | | AL390184.1, AF271781.1, AL137554.1, |
| | | | | | AK025798.1, AK025239.1, AB056809.1, AL136893.1, |
| | | | | | AL133016.1, BC008840.1, AL136748.1, |
| | | | | | U42766.1, AL136787.1, S77771.1, X53587.1, |
| | | | | | BC007499.1, AF090923.1, AL122104.1, AK027193.1, |
| | | | | | AK027213.1, AK025254.1, AL122118.1, BC001082.1, |
| | | | | | AL080060.1, BC005825.1, AB050407.1, |
| | | | | | BC008195.1, BC007255.1, AB060863.1, BC007456.1, |
| | | | | | AB050421.1, BC001045.1, BC006458.1, |
| | | | | | AB060825.1, BC004310.1, BC003602.1, AK026534.1, |
| | | | | | AL049996.1, AL359624.1, U70981.1, |
| | | | | | AK000418.1, AK024533.1, AL117438.1, BC004196.1, |
| | | | | | BC008686.1, AB050510.1, BC008387.1, |
| | | | | | AB055374.1, AB060916.1, U55017.1, BC002631.1, |
| | | | | | BC000090.1, X67688.1, BC005165.1, |
| | | | | | AK000257.1, AL110221.1, BC000570.1, AJ296345.1, |
| | | | | | AL050393.1, AK026631.1, U88966.1, |
| | | | | | AK026506.1, AK026593.1, BC004960.1, BC000778.1, |
| | | | | | AL117648.1, AK000614.1, AL137429.1, |
| | | | | | AL133637.1, BC006147.1, Y16645.1, BC002539.1. |
| HMDAB29 | 128 | 584789 | 1-1176 | 15-1190 | AV756491, AA714011, T74524, AW970571, |
| | | | | | AI284543, AA847499, H07953, BE139139, AI250552, |
| | | | | | BE676912, AI251284, AI251034, AI251203, |
| | | | | | AL042373, AI254770, BG169404, AW504485, |
| | | | | | AI223626, BE062159, AI755214, AW303098, |
| | | | | | AW500684, AI754567, AI053398, AI792575, |
| | | | | | AI754105, AI278972, AW576251, BE138594, |
| | | | | | BE138387, AW023111, BE315483, AI923052, |
| | | | | | AA449997, AW973992, AV762354, AW969667, |
| | | | | | AA829036, AA937809, BF725844, BE150796, |
| | | | | | BF832074, AW973757, BE968744, AI254779, |
| | | | | | AA773463, AI085242, AL119247, AI962030, |
| | | | | | AV763550, AW467607, BE674881, AV649707, |
| | | | | | AI674840, AA630854, AW167330, AV710482, |
| | | | | | AW265342, AV762975, AV649853, BE256101, |
| | | | | | AA315361, AW850517, AA828834, AW958962, |
| | | | | | AA828054, AI687343, AW963463, BG012020, |
| | | | | | BF854170, T11828, AW270771, AA621865, |
| | | | | | AI963720, AW502237, AV733437, AV723671, |
| | | | | | AA127426, AI732151, AL042667, AL042670, |
| | | | | | AI745151, AI249853, BE160727, AV762633, |
| | | | | | AW965008, AL119921, AI620992, AW969831, |
| | | | | | AA809546, BG110480, AA680243, AA618316, |
| | | | | | BG152386, BG115297, AW471332, BF950533, |
| | | | | | AI627614, AA524616, AA828637, AI524193, |
| | | | | | AW500161, AV763540, AV738383, AI613389, |
| | | | | | AI890971, AI279417, BG105498, BF724372, |
| | | | | | AL524675, AW970064, AA683069, AW265688, |
| | | | | | BF868994, AI049676, BG026977, AI457389, |
| | | | | | AW193265, AA503019, AI334248, AI440117, |
| | | | | | AA651639, AK025218.1, AC007308.13, AC002470.17, |
| | | | | | AC004824.3, AC010271.6, AL031283.26, |
| | | | | | AC009412.6, AC005399.19, AL136305.14, AC010913.9, |
| | | | | | AL135927.14, AC007227.3, AC011455.6, |
| | | | | | AC008670.4, AC016602.6, AC006337.4, AP001718.1, |
| | | | | | AL049839.3, AL033524.11, AC006038.2, |
| | | | | | AF200465.1, AC005200.1, AC005233.2, AL109804.41, |
| | | | | | AF051976.2, AC010319.7, AF243527.1, |
| | | | | | AF207550.1, AL121601.13, AC005077.5, AL133367.4, |
| | | | | | AC005740.1, AL117333.26, AC005324.1, |
| | | | | | AC004821.3, AC011895.4, AC007956.5, AL137849.13, |
| | | | | | AC006433.18, AC007991.7, AL139415.10, |
| | | | | | AC022211.5, AL024498.12, AL159997.14, AC011740.7, |
| | | | | | AL161731.20, AC016995.4, AC005529.7, |
| | | | | | AC004953.1, AC007722.9, AC006330.5, AC026464.6, |
| | | | | | AL359986.15, AL121895.26, AL031228.1, |
| | | | | | AL031276.1, AC006965.3, AC004134.1, AL050350.14, |
| | | | | | AC022148.5, AC004408.1, AC008755.6, |
| | | | | | AL050349.27, AL109806.22, AL133240.3, AP000963.2, |
| | | | | | AL034379.8, AL109843.25, AP001709.1, |
| | | | | | AJ277546.2, AL121972.17, AL031670.6, AP002852.3, |
| | | | | | AB038653.1, AF045555.1, AL031311.1, |
| | | | | | AC003080.1, AL020997.1, AL121808.4, AP000117.1, |
| | | | | | AC004796.2, AL354707.17, AC020552.4, |
| | | | | | AL122020.5, AC009131.6, AC008752.6, AL158817.11, |
| | | | | | AC009488.5, Z98884.11, Z83826.12, |
| | | | | | U63721.1, AL049776.3, U62292.1, AP000298.1, |
| | | | | | AC005484.2, AL132768.15, AL161747.5, |
| | | | | | AC018636.4, AL158207.15, AL137119.26, AC005409.1, |
| | | | | | AC012372.4, AL449209.2, AC008440.8, |
| | | | | | AC074013.5, AE006464.1, AC004813.2, AC009032.7, |
| | | | | | AC007676.19, AC018462.4, Z98304.1, |
| | | | | | AC011495.6, AL359092.14, AC008753.8, AC005527.3, |
| | | | | | AL034417.14, AL121753.30, AL033527.26, |
| | | | | | AL109921.21, AL132640.4, AC009068.10, Z85996.1, |
| | | | | | AL035684.25, AF317635.1, AP000424.3, |
| | | | | | AC000025.2, AC008521.5, AL158040.13, AC019171.4, |
| | | | | | AC006952.6, AC004024.2, AL031847.17, |
| | | | | | AJ011930.1, AC011479.6, AL163300.2, AL109976.23, |
| | | | | | AC004707.1, AC006121.1, AF053356.1, |
| | | | | | AL022316.2, AL121594.6, AL160165.17, AP000429.3, |
| | | | | | Z98946.15, AC005236.4, AC006064.9, |
| | | | | | AC010608.6, AL035411.27, AL365444.11, AL031428.9, |
| | | | | | AC010422.7, AC003682.1, AC005921.3, |
| | | | | | AL109801.13, AL354668.13, AL137139.9, AC005971.5, |
| | | | | | Z93017.6, AP002453.3, Z82215.1, |
| | | | | | AC008050.6, AL049694.9, AL022312.7, AC005071.2, |
| | | | | | AF196970.1, AL133163.2, AL451075.15, |
| | | | | | AC005086.2, AL035071.17, AC004156.1, AL136295.3, |
| | | | | | AF196779.1, AC022382.3, AL391280.15, |
| | | | | | AC020898.5, AC006057.5, AC004659.1, AC012614.6, |
| | | | | | AL121712.27, AL136137.15, AC005058.1, |
| | | | | | AP001711.1, AC005995.3, Z82206.1, AL139343.9, |
| | | | | | AP000925.5, AP000044.1, AP000112.1, |
| | | | | | D84401.1, AL096791.12, AP001781.4, AC004826.3, |
| | | | | | AL158052.10, AC005225.2, AC004975.2, |
| | | | | | AC004797.1, AC007546.5, AC083884.6, AL355517.12, |
| | | | | | AC011465.4, AL109935.39, AL132712.4, |
| | | | | | AL021808.1, AP000193.1, AC023798.16, AC005914.1, |
| | | | | | AC005229.1, AL158830.17, AC004253.1, |
| | | | | | AC005056.2, AL391259.15, AC008745.6, AC008760.6, |
| | | | | | AC072052.6, AC019195.10, AC005620.1, |
| | | | | | AP001670.1, AP001748.1, AC034200.6, AC004494.1, |
| | | | | | AC004883.2, AL121936.17, AC009086.5, |
| | | | | | AC004084.1, AC005907.1, AC003043.1, AL109936.10, |
| | | | | | AL357519.19, AC004832.3, AC007435.12, |
| | | | | | AP000501.1, U96629.1, AL137229.4, Z84469.1, |
| | | | | | AL132777.4, AC008895.7, Z83840.7, AC005274.1, |
| | | | | | AC005412.6, AC025262.27, AC008649.6, AL391833.10, |
| | | | | | AC009269.6, AC015651.18, AC011494.2, |
| | | | | | AL161665.5, AC005332.1, AC011737.10, AP000796.4, |
| | | | | | AC008687.4. |
| HMDAD44 | 129 | 566854 | 1-1190 | 15-1204 | BF574085, R12644. |
| HMEDI90 | 130 | 840077 | 1-2262 | 15-2276 | BF951698, AW956936, H29379, T66089, |
| | | | | | AA057405, AW134660, AA057093, AA917450, |
| | | | | | AL133995, AI299437, AI002692, H18042, |
| | | | | | R19493, T09261, F11783, F11794, T65008, T09262, |
| | | | | | R43839, N78357, H29290, AL035633.18, |
| | | | | | AF263308.1, AF263309.1, AF263310.1, AF263307.1, |
| | | | | | AF263306.1, AF263305.1. |
| HMICI80 | 133 | 827318 | 1-1758 | 15-1772 | AW206437, AI681626, AW590679, AW964447, |
| | | | | | BG153402, AI457162, AA773037, R53264, |
| | | | | | R56435, N51755, BF445824, R52470, |
| | | | | | BF223487, R13042, R40426, R52471, R15858, AI277346, |
| | | | | | T90387, R35946, T10284, AA194178, |
| | | | | | R53265, AI267524, T31140, R18993, AA318910, T83131, |
| | | | | | H05600, T10285, AA194177, R44879, |
| | | | | | R56436, Z45173, Z41270, Z45583, T31222, H12961, |
| | | | | | AA679784, AC008790.6, AC008852.5. |
| HMTAB77 | 135 | 847411 | 1-3825 | 15-3839 | AU133217, AL515424, AU117140, AU142384, |
| | | | | | BG033833, BE876803, AU139465, BG259851, |
| | | | | | BE743306, BG167796, AW473531, AU135959, |
| | | | | | BE875637, BG260336, BG107108, AW580231, |
| | | | | | BG179511, BE888606, BE887292, BG027450, |
| | | | | | BF671771, AU119885, AW238825, AI689392, |
| | | | | | BF575632, BF794737, BF791887, AU117158, |
| | | | | | AI969513, AU136366, AV752386, AA577695, |
| | | | | | BF347777, AU127278, AL046713, BG036892, |
| | | | | | BE539387, BE888461, BF035474, AU135160, |
| | | | | | BG107285, BG025131, AL039354, BF061987, |
| | | | | | BF812543, BG031453, BF212314, BE734936, |
| | | | | | BF981318, BG259074, AW957785, AW851018, |
| | | | | | BE552121, BF819996, AW379372, BE835355, |
| | | | | | AL039548, BG032762, BF693254, BE893099, |
| | | | | | BE439886, BF209896, BF207817, BE466166, |
| | | | | | AW965646, AU138546, AW814786, AU144064, |
| | | | | | BE888383, BE889498, BF688672, AI338724, |
| | | | | | BF514065, BF528934, AL040257, BE568710, |
| | | | | | BF790899, BF790348, BE969916, AU151881, |
| | | | | | BF381749, AI753682, BE537675, BF103706, |
| | | | | | BF038173, AA927334, BF240276, BF242051, |
| | | | | | BE835432, AI742904, N20178, AW966689, |
| | | | | | AW963156, BF382259, BE567450, AW369137, |
| | | | | | BF920929, BF750387, AA313265, AA196578, |
| | | | | | BF693176, BF744444, BE961188, BE280960, |
| | | | | | BF814166, AL048800, BF669614, BF695646, |
| | | | | | BF573281, AA584433, BF747979, AW205552, |
| | | | | | BF930968, BF210307, BE967604, AV758139, |
| | | | | | AW075512, BF229128, AL041181, BF931659, |
| | | | | | BG014272, BG032249, BF696371, BF242624, |
| | | | | | BE841199, BF904837, AW297463, BE537740, |
| | | | | | R70619, AW957862, BF789995, BE889296, |
| | | | | | AW293263, BF934769, AW814722, BF247682, |
| | | | | | AW517759, AA076256, AI580344, AW369831, |
| | | | | | BF965679, AI917185, AI348555, BE089815, |
| | | | | | BF742017, AA579344, BF930639, AA578603, |
| | | | | | N29079, BF750787, AA747403, AA649704, |
| | | | | | BF102774, R80337, BF674705, BF688897, |
| | | | | | AV747890, BF210080, AI281795, AA326479, |
| | | | | | BF028979, H11175, D82206, AA642754, |
| | | | | | AA355742, D82173, AA326164, BF229913, AL515423, |
| | | | | | AA363512, BF238375, BE818113, BF672447, |
| | | | | | BF977594, AW075837, BE893554, BE818095, |
| | | | | | BE736387, BF742025, AW576881, BF692010, |
| | | | | | BF820629, AA344537, BE001659, R60858, |
| | | | | | AV738050, AA650232, AA808866, BF375716, |
| | | | | | BE972715, BE818049, BE172915, R22704, |
| | | | | | AA133820, R13289, BG255786, AA301326, |
| | | | | | N57164, BE818060, BF212867, AA083989, AL046786, |
| | | | | | BF348022, AA092609, H06323, BE167529, |
| | | | | | H87922, AA654758, BF215056, W26917, BE895957, |
| | | | | | AA167156, AW821022, BF901255, T05303, |
| | | | | | BE088453, BE813024, BE818048, AA363584, H93588, |
| | | | | | AI928366, H05331, D58857, BF245942, |
| | | | | | BG235926, BF692607, AU077250, R66345, AA360920, |
| | | | | | F07286, BE172376, D82200, BF693404, |
| | | | | | BE081882, R81874, BE896503, BE936475, AW607901, |
| | | | | | AA454112, AW999261, BE936455, AW383272, |
| | | | | | BE818043, C16797, BG110805, BF031668, |
| | | | | | N88563, AW074610, AA384710, D53920, |
| | | | | | AB018266.1, AK001388.1, AF117236.1, M63483.1, |
| | | | | | AY007157.1, AL159986.21, AJ224169.1, AJ224166.1, |
| | | | | | AC024094.28, AL117541.1. |
| HMUAE26 | 136 | 747403 | 1-1986 | 15-2000 | AL523203, AL515749, BE614404, AL515748, |
| | | | | | BF688628, BE613791, BF976568, BF570015, |
| | | | | | BE909508, BE907377, BF038761, BG177795, |
| | | | | | AW405815, AL528809, AA622413, AI362259, |
| | | | | | AW083964, BF061057, AW813200, AL524973, |
| | | | | | AI636779, AI097057, AI091346, AA350763, |
| | | | | | AW003428, AI422009, AI272936, AA102665, |
| | | | | | AI248453, AA101283, BG178886, AI435624, |
| | | | | | AW601020, AW813261, BG056509, AW117686, |
| | | | | | R72555, AW813202, AL528808, AI811322, |
| | | | | | R73352, AA622414, BE247259, BE703295, |
| | | | | | AI400034, AA484496, AI356550, AA258572, |
| | | | | | AA989154, BF797135, R72878, AA350762, |
| | | | | | T16127, AI699249, AI433994, AI206909, AI968946, |
| | | | | | AW449847, AW403875, AA884151, AW087452, |
| | | | | | AA188566, BF350716, AW272969, AW797619, |
| | | | | | AA188728, BE246100, AW797628, AI432030, |
| | | | | | AW188539, AI452405, AW813203, AW150511, |
| | | | | | BF726894, BE621810, BG168441, BG025417, |
| | | | | | AI432644, BE910738, BG123011, AW968355, |
| | | | | | AI432653, AW827175, AI623302, BG107986, |
| | | | | | AI432666, BG168645, AI431307, AI431316, |
| | | | | | BG115242, AL045327, BE621893; AL047163, BF984267, |
| | | | | | AW081103, BG117025, BG258222, |
| | | | | | BG167818, BF984992, BE621811, BG253641, |
| | | | | | AW858522, AV702117, AL042898, BE614378, |
| | | | | | AW961253, AI431238, AW772685, AI890907, |
| | | | | | AL134524, AI859991, AV756413, AV661704, |
| | | | | | AV705341, AV702833, AI872423, AW957058, |
| | | | | | AV704955, BF726868, BF726234, AW968356, |
| | | | | | AV756256, AV701560, AV655280, AV704182, |
| | | | | | AV708704, BF569517, AV758603, AV755589, |
| | | | | | AV727807, AW972093, AV655425, BF970652, |
| | | | | | AV682503, AW968729, AL042787, AI431323, |
| | | | | | BG168646, AV656478, AV689111, AV708834, |
| | | | | | AV757189, AV682038, AV701620, AV654896, |
| | | | | | AI432654, AV728806, AV707024, AV693523, |
| | | | | | AV733869, AV725920, AV659322, AV692691, |
| | | | | | AV701914, AV712476, BF345060, AV733387, |
| | | | | | AV707753, AV704934, AV706721, AV755335, |
| | | | | | AV696106, AV697196, AL042729, AV699197, |
| | | | | | AI431321, AV728733, AL045328, AI538850, |
| | | | | | BG259587, AW971740, AV726738, AW956474, |
| | | | | | AV685966, BG113493, AV757292, AV701707, |
| | | | | | AL047675, AV727029, AI866469, AV708438, |
| | | | | | AV702516, AV728518, AL515195, AV728576, |
| | | | | | AV724741, AV728157, AV709604, AV709314, |
| | | | | | AI432650, AV708381, AV655096, BG113712, |
| | | | | | AV723132, AL046356, AV733917, AI860003, |
| | | | | | AV703168, BF796402, AV703970, AV726259, |
| | | | | | AV707792, AV659536, BF795712, BG257535, |
| | | | | | AL119319, BG110517, BG029667, AV709580, |
| | | | | | AV728670, AV695545, AI633125, BG252929, |
| | | | | | AV702427, AV682776, AV726624, AW955613, |
| | | | | | BE897632, AV729451, AI431230, AV651955, |
| | | | | | AV704269, AV727799, AL040207, AV760695, |
| | | | | | BF811793, AV709660, AV705384, AV729220, |
| | | | | | BF726322, AV708893, BG116926, AV733299, |
| | | | | | AV682138, AV654908, AV684604, BE672759, |
| | | | | | AV703169, AV711327, AV705159, BE885490, |
| | | | | | AV705693, AV757448, AV701881, AV709935, |
| | | | | | AV703495, AV693527, AI866786, AB037108.1, |
| | | | | | AL133049.1, AF090903.1, BC003684.1, AL162083.1, |
| | | | | | AL122049.1, AJ299431.1, AF183393.1, |
| | | | | | AL050149.1, AK026506.1, X82434.1, Z82022.1, |
| | | | | | AL137529.1, Y14314.1, AL137533.1, AF026816.2, |
| | | | | | AK025857.1, AK026744.1, AL137480.1, AF106862.1, |
| | | | | | AK000418.1, BC008719.1, BC004925.1, |
| | | | | | L19437.2, AL512705.1, AL512746.1, AB062938.1, |
| | | | | | BC005678.1, AB056809.1, AL136784.1, |
| | | | | | AK026462.1, AL137271.1, BC009033.1, AK027096.1, |
| | | | | | AL512684.1, BC008485.1, BC003122.1, |
| | | | | | AL080159.1, AB048954.1, AL136825.1, BC004556.1, |
| | | | | | AL080057.1, AL359941.1, BC009026.1, |
| | | | | | BC004349.1, AF218014.1, AF225424.1, AL049430.1, |
| | | | | | AL137550.1, AL353940.1, BC006195.1, |
| | | | | | AL133568.1, AL162062.1, AL389939.1, AL117463.1, |
| | | | | | BC005168.1, Z37987.1, AL137488.1, |
| | | | | | AL080148.1, AF104032.1, AF271350.1, AK026408.1, |
| | | | | | AK025391.1, AL117460.1, AL136763.1, |
| | | | | | AF090901.1, AB049892.1, AL512750.1, AL137478.1, |
| | | | | | AF090934.1, AK025339.1, BC002343.1, |
| | | | | | BC006494.1, AK027204.1, AK000250.1, AB047904.1, |
| | | | | | AF260566.1, AK000323.1, U38847.1, |
| | | | | | D83032.1, BC000725.1, AL050277.1, AL137283.1, |
| | | | | | AB048953.1, AL162003.1, AL390154.1, |
| | | | | | AK026642.1, AB060873.1, BC006103.1, AL353957.1, |
| | | | | | AK000212.1, AK024538.1, AL136892.1, |
| | | | | | AL117435.1, AL122110.1, AL136615.1, AK026528.1, |
| | | | | | BC008899.1, AL133640.1, AK026959.1, |
| | | | | | AL049452.1, AL133053.1, AB056420.1, AK026534.1, |
| | | | | | AY033593.1, AL080074.1, AK026855.1, |
| | | | | | AF217966.1, AF217987.1, AL110221.1, AL133075.1, |
| | | | | | AF262032.1, AK026927.1, X99717.1, |
| | | | | | AL136845.1, AL133072.1, AL389982.1, AF061573.2, |
| | | | | | AJ012755.1, AL133560.1, AK000614.1, |
| | | | | | BC002425.1, AB060826.1, AL049938.1, AK026480.1, |
| | | | | | AL133080.1, AB055315.1, AK025414.1, |
| | | | | | AL512733.1, AK027213.1, AB048975.1, AL133077.1, |
| | | | | | AL050146.1, U80742.1, AL137292.1, |
| | | | | | AL110280.1, AL050366.1, AK026593.1, AF348209.1, |
| | | | | | AB055361.1, AK026464.1, AK024588.1, |
| | | | | | BC004951.1, AF210052.1, AB060863.1, AB063088.1, |
| | | | | | AK000083.1, AK025632.1, AL359601.1, |
| | | | | | BC008417.1, AL157482.1, AL110225.1, AL117394.1, |
| | | | | | AL136882.1, AL136805.1, AF081195.1, |
| | | | | | AK026630.1, BC008488.1, AL122050.1, AF162270.1, |
| | | | | | AL137560.1, AL136844.1, BC001964.1, |
| | | | | | AL137538.1, AK027164.1, AB060852.1, AB055303.1, |
| | | | | | AB055368.1, AB060887.1, AL117457.1, |
| | | | | | AL389935.1, AK026542.1, AK025889.1, AB060912.1, |
| | | | | | AL049283.1, AK026164.1, AF143723.1, |
| | | | | | AK027146.1, AL122100.1, AL136893.1, AL023657.1, |
| | | | | | AK026434.1, AL050138.1, AL050393.1, |
| | | | | | S78214.1, BC002733.1, X98834.1, AF227198.1, |
| | | | | | AF230496.1, AF285167.1, AL080124.1, |
| | | | | | AL162002.1, AL133067.1, AL512719.1, AK000432.1, |
| | | | | | AB050410.1, AB048919.1, AB056421.1, |
| | | | | | AB052191.1, AK025084.1, AK026762.1, AL137521.1, |
| | | | | | AL133665.1, AL359618.1, AK027868.1, |
| | | | | | AF111112.1, AK027114.1, AL137526.1, AK024992.1, |
| | | | | | Y16645.1, AL050024.1, AB063070.1, |
| | | | | | AL359583.1, AL117583.1, AK025209.1, AK026741.1, |
| | | | | | AK026571.1, AB060916.1, AK026784.1, |
| | | | | | AK025092.1, AL117585.1, AK027160.1, AK026950.1, |
| | | | | | AL512689.1, BC006525.1, AK025524.1, |
| | | | | | AF125948.1, AK025708.1, AL512765.1, AL442082.1, |
| | | | | | AL122118.1, AL133113.1, BC006807.1, |
| | | | | | AF057300.1, AF057299.1, AL136749.1, X72889.1, |
| | | | | | AF097996.1, BC006164.1, AL049382.1, |
| | | | | | AL137523.1, BC004265.1, AL133081.1, L30117.1, |
| | | | | | AL136915.1, BC003682.1, AB046642.1, |
| | | | | | AK027200.1, AB063071.1, AL050108.1. |
| HMUAN45 | 137 | 833072 | 1-2695 | 15-2709 | BF975230, BG177292, BF683936, BF972280, |
| | | | | | AW452044, AW450817, AW571669, AW276243, |
| | | | | | AI223336, BF507478, AW953367, AI937821, |
| | | | | | AA354094, H45305, AI699989, AI624920, |
| | | | | | AA251791, D19672, AA922638, AI655588, |
| | | | | | AA928313, R74251, AA339800, H45245, BG056723, |
| | | | | | AI433894, AW080419, AI023763, AI040104, |
| | | | | | AI523987, AV681951, AI611728, AA769327, |
| | | | | | AI564716, N22276, AV761484, BG108350, |
| | | | | | BE672647, AW268067, AL513781, AI924035, |
| | | | | | AI925463, AI811192, AI613144, AL037558, |
| | | | | | AV688427, AW083111, AI963101, AA825509, |
| | | | | | AV734888, AW955613, AL135022, AW020693, |
| | | | | | AA437293, AW197174, AI910902, AI954468, |
| | | | | | AA584251, AA420722, AW963250, AI318569, |
| | | | | | C21335, AA292158, AI742728, AV692108, |
| | | | | | AI311892, BE906230, AK027899.1, BC001812.1, |
| | | | | | AB046039.1, U42766.1, AL133016.1, |
| | | | | | AF069506.1, BC007548.1, AK025761.1, BC002643.1, |
| | | | | | AB049892.1, BC008893.1, BC002697.1, |
| | | | | | BC007199.1, AL133568.1, AK026603.1, AF218004.1, |
| | | | | | BC002736.1, AF227198.1, Z48796.1, |
| | | | | | AK000205.1, BC004383.1, AL133557.1, X79204.1, |
| | | | | | BC004529.1, BC001817.1, BC008285.1, |
| | | | | | AF090900.1, AL035067.2, BC006487.1, AL353957.1, |
| | | | | | AL137281.1, AK024978.1, BC008796.1, |
| | | | | | AL136321.5, AB009690.1, AK025860.1, BC007674.1, |
| | | | | | U31501.1, BC002839.1, AB060842.1, |
| | | | | | AF094480.1, AL136781.1, S71381.1, AB060229.1, |
| | | | | | AB060927.1, AF218014.1, BC000749.1, |
| | | | | | BC001829.1, AK025798.1, AL133113.1, AJ238617.1, |
| | | | | | AF044221.1, AK026494.1. |
| HMVBC31 | 138 | 825598 | 1-2542 | 15-2556 | AL513958, AL532289, AL513957, AU141081, |
| | | | | | BE740204, BG166399, BE904675, BE891108, |
| | | | | | BG256305, BE744952, BE905626, BE742828, |
| | | | | | BE899088, BE745625, AV653746, BE866918, |
| | | | | | BF982216, AW957312, AV723081, AI819405, |
| | | | | | BE281510, BB514995, BE856665, AI818085, |
| | | | | | AW612700, AW963890, BF038873, AW005883, |
| | | | | | BF111236, N31954, AI570554, AI814284, |
| | | | | | AI743921, AI373828, AW963892, BF001263, |
| | | | | | AI073849, AW978642, AA705064, BE858940, |
| | | | | | AI078328, AI831014, AW963886, AW081533, |
| | | | | | AW953584, AA150396, BE906561, W78108, |
| | | | | | AA934651, W79933, D53129, N92092, |
| | | | | | AI669184, W03272, AA594574, AA719546, AA688147, |
| | | | | | AI042436, H47299, AI304898, BG012798, |
| | | | | | R35487, AA724939, W46177, BG012794, AA661822, |
| | | | | | W46540, AA158922, AI968456, R44002, |
| | | | | | AW277188, AA352968, T75515, AW365085, BE278604, |
| | | | | | AI754560, BE817848, R94999, H60086, |
| | | | | | H59434, AI868335, N69447, F19605, AA156578, D54824, |
| | | | | | AA903411, AA449263, Z24956, AW857481, |
| | | | | | BE073224, BE466451, AW857479, AI468314, |
| | | | | | T33942, H47300, Z46090, T30256, |
| | | | | | R41822, F03578, Z40826, N36752, BG149926, R94915, |
| | | | | | AA993003, R32790, AA577458, AW594657, |
| | | | | | Z44501, AI383141, AA449397, D80727, AA365266, |
| | | | | | BF757856, AA040902, AA768178, AA768128, |
| | | | | | AI391494, AA814775, BE140388, BG035024, |
| | | | | | AI814155, AI940059, BF435821, BF435237, |
| | | | | | R34285, AW300688, AA984028, BE140425, N34605, |
| | | | | | BF448850, AW169682, AW805217, BF855415, |
| | | | | | AW751033, BE934304, AA627953, AW834022, |
| | | | | | R32791, N55681, BE172132, AW751067, |
| | | | | | AA143108, BE019916, BF759114, T19783, AW835471, |
| | | | | | AL031847.17, AF064084.1, AL117548.1. |
| HMWBL03 | 139 | 822861 | 1-2582 | 15-2596 | AL532317, AW976696, BG258766, BE784103, |
| | | | | | BE781381, BG115099, BF215477, BG163228, |
| | | | | | BE868152, BG119548, BG118210, AW978736, |
| | | | | | BE547477, AI992158, BF103579, AW394038, |
| | | | | | BE537694, AW835469, BG256663, AW070824, |
| | | | | | BE614387, BF031478, AW157294, AI743202, |
| | | | | | AI193598, BF029929, BE538143, AW303817, |
| | | | | | BE464933, AA939106, AW835466, BE869327, |
| | | | | | AW835470, BE966420, AW394036, AI831483, |
| | | | | | AW163057, AI979181, AA306435, BE613678, |
| | | | | | AA749314, AI094155, AW157089, AW362974, |
| | | | | | BF240145, BF217794, AW731659, AI878985, |
| | | | | | AW362965, BF795374, AW956998, BF217096, |
| | | | | | AA146858, BE568486, AW162479, AA648921, |
| | | | | | AW753912, AW362949, AA311937, AA908739, |
| | | | | | AI922877, AI879487, N51950, AA406456, |
| | | | | | AW362962, BE350612, AI346620, AA306611, |
| | | | | | BG055455, AA651863, AA775633, AA768709, |
| | | | | | AW614887, AA774684, AA284818, AA813993, |
| | | | | | AW362967, AW769884, AA581615, AA146857, |
| | | | | | AI378205, AW362950, AI382916, AW362951, |
| | | | | | AW403413, AA586521, AW407973, AI674283, |
| | | | | | H59390, AW362956, BF913578, BF914518, |
| | | | | | AW169393, BF914514, AI473650, BF914275, |
| | | | | | AA406348, BF916334, BF913574, AA379531, |
| | | | | | BF108888, AW610254, AI225213, AA377822, |
| | | | | | BF095168, H60046, AA372701, AA465473, |
| | | | | | BF210038, AA310305, AA360185, BE914123, |
| | | | | | AA332342, AA120901, D81998, W21240, |
| | | | | | AA331393, AI382409, R18124, BE697930, AA736861, |
| | | | | | AI351496, AW752542, AA312498, AA971457, |
| | | | | | AI223218, AA377328, AW964009, AA096093, |
| | | | | | AW673672, AA300637, BF915447, T24898, |
| | | | | | AW163350, AA248513, AW389592, N95719, N53714, |
| | | | | | AW854099, AW366952, AI690275, AA492352, |
| | | | | | AA745999, AW975618, AW960465, AV718692, |
| | | | | | AW973445, AW966534, AV718931, AW973541, |
| | | | | | C14331, AW966330, D50979, AV718489, |
| | | | | | AW964468, AW966059, D51423, AV720533, |
| | | | | | AW949645, AV699866, AW959136, AW973474, |
| | | | | | AV720791, AV719324, AW965175, AV720731, |
| | | | | | AW966398, AW973307, AV718707, AW966386, |
| | | | | | AV719557, AV720616, AW966331, AW978661, |
| | | | | | AW949654, AV724520, AW959202, D80248, |
| | | | | | D80166, AW978634, AW966369, AW973490, |
| | | | | | AW966389, AW960473, AW959799, D80188, |
| | | | | | C14389, D59859, AW975613, D59619, |
| | | | | | D80210, D51799, AV720151, AW960553, D80240, |
| | | | | | AW958992, D80253, AV719822, AV718938, |
| | | | | | AV718633, AW975605, AW966378, AA305409, |
| | | | | | AW966053, AW973488, AV720211, AV720878, |
| | | | | | AW966368, AW966029, AV699447, AW966397, |
| | | | | | AW958993, AV722801, AV723927, AW949656, |
| | | | | | AW949642, AW966399, AW966531, D81030, |
| | | | | | AW966075, AW966065, D58283, AV744690, |
| | | | | | AW973334, AW966333, AV720203, AW973447, |
| | | | | | D80212, D80366, AW966022, AV718440, |
| | | | | | AV720028, D51060, AV699550, AW965185, |
| | | | | | AW965197, AV718770, AW966013, AW973482, |
| | | | | | D80022, D80219, AW956397, AW956434, |
| | | | | | AW966041, D80043, AK027642.1, AY029179.1, |
| | | | | | AK027628.1, AL021808.1, AB028859.1, |
| | | | | | AF058696.1, AB002449.1, AF271371.1, X67155.2, |
| | | | | | D34614.1, D88547.1, D50010.1, AB038216.1. |
| HMWCG28 | 140 | 847413 | 1-879 | 15-893 | AW197242, AA115972, AA283140, AI768512, |
| | | | | | AI262126, AW299591, BE501477, AI492452, |
| | | | | | AI470922, AI925912, AI479591, H99611, |
| | | | | | AW392956, N53011, H58193, BF930214, H89604, |
| | | | | | AW361279, N34132, AW865961, BF933761, |
| | | | | | BE252200, BE083984, N35841, AF061944.1, |
| | | | | | AJ296290.1, AC004765.2. |
| HNECW49 | 141 | 639117 | 1-475 | 15-489 | AL162497.20. |
| HNFCY57 | 142 | 877653 | 1-2833 | 15-2847 | AV741792, R94860, AW468866, AW176538, |
| | | | | | R94861, C01539, AW793380, AI954796, AI819545, |
| | | | | | AI583966, AI590630, AI147877, AI812091, |
| | | | | | AI274484, AA814517, AI783997, AI950729, AI637584, |
| | | | | | AI376425, AI866458, AW198090, AI696714, |
| | | | | | AL514455, BG001315, AL514469, AI473536, |
| | | | | | AL514015, AI364167, AI469262, BG254286, |
| | | | | | AW152621, AI885664, AI972497, BF724894, |
| | | | | | BF724284, AL513977, AI126920, AI421222, |
| | | | | | BF868489, BF752870, AI633125, AI469425, |
| | | | | | AW152182, AI279925, BF970652, BF669151, |
| | | | | | AI864102, AI701097, AI915291, AI432644, |
| | | | | | AI538564, BG179993, AI633317, BF811804, |
| | | | | | BF753014, AW088717, BF752997, AI828239, |
| | | | | | BG122005, AW105296, AI499570, AI174799, |
| | | | | | AI266643, AK027194.1, AL080163.1, AB047878.1, |
| | | | | | AF090934.1, AL389935.1, AK027173.1, AL117587.1, |
| | | | | | AL110223.1, Y14314.1, AL080139.1, |
| | | | | | BC006463.1, AK025435.1, BC008037.1, AL389947.1, |
| | | | | | AK026593.1, BC004945.1, AL122116.1, |
| | | | | | AB055331.1, Y13350.1, AK027172.1, AF124728.1, |
| | | | | | AJ299431.1, AL137533.1, BC004264.1, |
| | | | | | AK000414.1. |
| HNFGR08 | 143 | 825417 | 1-1422 | 15-1436 | AC006369.3. |
| HNGAK51 | 144 | 603910 | 1-901 | 15-915 | AV731286, AW085751, BE156019, BF826830, |
| | | | | | BE067011, AI732911, BG260565, AV763498, |
| | | | | | BF747038, AV759172, BF816106, AA493475, |
| | | | | | AW405593, BE300645, AI457389, AV691908, |
| | | | | | AV696428, AV684596, AV695357, AV760383, |
| | | | | | F08248, AV730391, BF673743, BE063437, |
| | | | | | AI832009, AA583394, AW150209, AA515728, |
| | | | | | AA984258, AW575171, AV738383, H07953, |
| | | | | | BE150580, AV762783, BF681619, AA176972, |
| | | | | | BE748332, AW303196, AL035703.20, AL133445.4, |
| | | | | | AC024561.4, AC012039.10, AC010583.5, AC005844.7, |
| | | | | | AC026400.3, AC006477.3, AC022493.12, |
| | | | | | AC007000.2, AC005803.1, AC007207.22, AL138849.12, |
| | | | | | AC007097.4, AC068130.3, AL049650.8, |
| | | | | | AC006059.3, AC006334.3, AC008012.8, AC001231.2, |
| | | | | | AC009955.4, AL133409.14, AL133244.1, |
| | | | | | AC010585.6, AL121989.12, AL110502.1, AL133463.16, |
| | | | | | AC011740.7, AL513008.14, AL022147.3, |
| | | | | | AC011900.6, AC012150.16, AL109759.4, AC090527.3, |
| | | | | | AC090947.1, AC027126.4, AC004386.1, |
| | | | | | AC004814.2, AP001667.1, AL121578.1, AL157791.4, |
| | | | | | AL132639.4, AL031274.1, AL139109.14, |
| | | | | | AL499582.13, AC078841.4, AC073964.3, AC005939.1, |
| | | | | | AC022073.13, AC012170.6, AP001660.1, |
| | | | | | AC090946.1, AC002288.1, AL035604.15, Z83843.1, |
| | | | | | AB000882.1, AL049870.3, AF238375.2, |
| | | | | | AC005274.1, AL139322.13, AC008280.4, AC026172.3, |
| | | | | | AL078646.29, AC004887.2, AC019212.4, |
| | | | | | AC000029.17, AL359644.10, AL451103.7, L11910.1, |
| | | | | | AL009051.1, AP001666.1, AC002418.1, |
| | | | | | AC022443.4, AL139382.12, AL354760.11, AL158832.13, |
| | | | | | AC009194.8, AC009102.9, AL008710.1, |
| | | | | | AC005901.1, AC004859.2, AL157886.11, AC019205.4, |
| | | | | | AF205588.1, AL353764.9, AL391415.12, |
| | | | | | AC019097.5, AC004600.2, AL162551.3, AC025097.41, |
| | | | | | AF198097.1, AC016776.6, AP000122.1, |
| | | | | | AF265340.1, AL139193.4, AC010205.5, AC008784.6, |
| | | | | | AL136303.15, AC012312.8, AL360270.18, |
| | | | | | AC021752.5, AL136980.5, AP000751.4, AC012450.9, |
| | | | | | AC005409.1, AC008733.7, AC084782.2, |
| | | | | | AL096791.12, AC079127.28, AC007345.5, AC007671.7, |
| | | | | | AC009455.8, AL392048.9, AC024247.4, |
| | | | | | AC016770.10, AP000506.1, AC026310.24, AC010223.5, |
| | | | | | AL022165.1, AC021851.4, AC016748.3, |
| | | | | | AC003029.2, AC020898.5, AC007374.6, AL358612.8, |
| | | | | | AL133383.10, AC008066.4, AL359636.17, |
| | | | | | AC007637.9, AP000054.1, AC034145.5, AC004701.1, |
| | | | | | AF224669.1, AC073366.3, AP001680.1, |
| | | | | | AC004067.1, AL353692.14, AP001716.1, AC015592.6, |
| | | | | | AL359397.3, AL132774.20, AL160281.17, |
| | | | | | AC009996.7, AL157713.10, AC000113.1, AL031432.1, |
| | | | | | AL391827.18, AC025962.5, AL117337.25, |
| | | | | | AL136231.12, AP001677.1, AC004934.1, AL049589.15, |
| | | | | | AL136123.19, AC069282.6, AC009961.11, |
| | | | | | AL512307.12, AC005076.2, AC004458.1, AC016948.4, |
| | | | | | AP001727.1, AL163213.2, Z68870.1, |
| | | | | | AP001720.1, AC000120.1, AL389889.11, AC010369.6, |
| | | | | | AC010679.6, AC002128.1, AC007543.4, |
| | | | | | AL391139.19, AC090710.16, AL049830.3, AL137191.5, |
| | | | | | AL035530.11, AC011242.8, AL389888.8, |
| | | | | | AC007558.3, AL021397.1, AP003697.1, AL161415.2, |
| | | | | | AC004998.2, AC004741.1, AC007963.7, |
| | | | | | AC087857.2, AC019100.4, AL354937.12, AC068724.7, |
| | | | | | AP001671.1, AL035587.5, AL109804.41, |
| | | | | | AC073332.13, AP000350.1, AL358372.11, AP001329.3, |
| | | | | | AP001717.1, AC019206.4, AL356244.12, |
| | | | | | Z84480.1, Z93020.1, AL157955.5, AL096793.20, |
| | | | | | AC005725.1, AC025159.28, AL357507.9, |
| | | | | | AC005926.1, AC008462.6, AC022201.4, AC004478.1, |
| | | | | | AC022459.6, AL450342.14, AL590762.1, |
| | | | | | AL354861.11, AL138783.6, AC017006.4, AP002008.5, |
| | | | | | AL031963.40, AC084373.24, AC006160.9, |
| | | | | | AL031123.14, AL137787.11, AC090017.18, AP000053.1, |
| | | | | | AP000168.1, AP000121.1, AC004216.1, |
| | | | | | AL357150.7. |
| HNGAM58 | 145 | 688114 | 1-1142 | 15-1156 | AW023672, AI284640, AL138265, AW500125, |
| | | | | | AW269488, AV763540, BF677892, AW472872, |
| | | | | | AW303196, AV763558, AW301350, AI307608, |
| | | | | | BF942454, AV760133, AA630362, AW088846, |
| | | | | | BF668217, AI568678, BE047069, AA469451, |
| | | | | | AV761188, AL046409, AV761608, AI708009, |
| | | | | | AV757425, AW731867, AV761403, AW502975, |
| | | | | | AW419262, AW274349, AV740801, AW327868, |
| | | | | | AV761317, AI963720, AI821271, AV760106, |
| | | | | | AW407578, AW238278, AW193265, H71429, |
| | | | | | AV760207, AI334443, AV758994, AA491814, |
| | | | | | AV763633, BF130107, AI613280, AI350211, |
| | | | | | AA493708, AI281881, AA661948, AV759580, |
| | | | | | AV713396, AI744188, BF592311, AI151261, |
| | | | | | AI431303, AV760937, AW438643, AV762139, |
| | | | | | AW576391, AW872676, AV761498, AV759329, |
| | | | | | F36273, AW473163, AW975425, BG058664, |
| | | | | | BG222131, BG171096, AV763354, AW276817, |
| | | | | | BG231262, AW088202, BG179731, AW270270, |
| | | | | | BF813686, BE672637, AA665330, AI754336, |
| | | | | | AU118745, AV757607, AI357551, AV728928, |
| | | | | | AL138455, BG249643, AV762015, BF942059, |
| | | | | | BF942223, AI345654, AI061334, BE154617, |
| | | | | | AL119691, AV759204, C06339, AL048925, |
| | | | | | AW276827, AW029038, AI254316, BE139146, |
| | | | | | AA579063, AI079389, AL047427, AW662543, |
| | | | | | AW406162, BF592200, AA623002, BE677379, |
| | | | | | AA074130, BG059568, BF337291, AI085719, |
| | | | | | AW575165, AI610159, AU147193, AI635818, |
| | | | | | AI814735, AI471481, AL040130, AW103758, |
| | | | | | BF965007, AI718446, AF330238, AV760614, |
| | | | | | AV762050, AV728425, BE350475, AA601876, |
| | | | | | BE018774, AW615709, BF841869, AI537506, |
| | | | | | AV725627, AV763255, BF475381, BF793766, |
| | | | | | AV760817, BG104686, AW021583, AW960468, |
| | | | | | AW576503, AI580652, AW265009, AV759239, |
| | | | | | AV658688, AU147800, AA581903, BE677158, |
| | | | | | AI289067, AV764307, AV760395, AW872575, |
| | | | | | AW339568, AV761631, AV764398, BG236735, |
| | | | | | AW969698, AA468131, AW969694, AW406755, |
| | | | | | AI828463, AV764530, AV763971, BG056088, |
| | | | | | AV759382, AV761786, AW474299, AV762959, |
| | | | | | BF851403, AI148277, AI791150, BF942311, |
| | | | | | AI565581, AI283911, AW574794, AF074677, |
| | | | | | AI340453, AI376100, AI570261, BG177715, |
| | | | | | AW410400, AV728410, AV761294, AV709707, |
| | | | | | AI446601, AV760774, AI471543, AI921649, |
| | | | | | BF680805, AI358571, AV764035, BE072475, |
| | | | | | AV710066, AI679782, AI281697, AI537955, |
| | | | | | AI270117, AW972879, AV762098, AI696962, |
| | | | | | AL041690, BF030810, AI355206, BE208673, |
| | | | | | AW833862, AI654588, AU145314, AW162049, |
| | | | | | AI341664, BF840676, AI929531, AV749274, |
| | | | | | F28204, AV731764, BG032943, AW504669, |
| | | | | | AA604362, AV725423, AI754658, AI076766, |
| | | | | | AI796627, AI375710, AV761941, AA610491, |
| | | | | | AV764659, AI921061, BE349302, AI873916, |
| | | | | | AI571512, AI358812, AL049757.14, AC005288.1, |
| | | | | | AL354872.9, AF109907.1, AL162272.10, AC000003.1, |
| | | | | | AP001753.1, AC005318.1, AC015540.9, |
| | | | | | AC087071.2, AC008736.6, AC068799.14, AL022316.2, |
| | | | | | U18391.1, AF348209.1, AC007537.3, |
| | | | | | AL138837.12, AC009470.4, AC004452.1, AF181896.1, |
| | | | | | AL034405.16, AC004787.1, AL161655.8, |
| | | | | | U57006.1, AC006337.4, AL353625.5, U18392.1, |
| | | | | | AL139346.6, U18396.1, AP001699.1, |
| | | | | | AC002470.17, AL445528.16, AL445123.11, AL031279.1, |
| | | | | | M37551.1, AL133419.15, AF077058.1, |
| | | | | | Z69917.1, Z82198.2, U67221.1, U67211.1, |
| | | | | | AC005730.1, AL117329.8, AL121891.22, AL445222.9, |
| | | | | | X54176.1, Z98048.1, AC004922.2, AP001594.1, |
| | | | | | AC008812.7, AL358334.3, AP001717.1, |
| | | | | | AC003101.1, X74558.1, AP000009.2, D83989.1, |
| | | | | | AP000228.1, AC004695.1, X75335.1, |
| | | | | | AL359091.10, AB012286.1, U18390.1, AC005180.2, |
| | | | | | AP000140.1, Z93241.11, AC055740.17, |
| | | | | | AF015148.1, AC009137.6, AL121934.17, AF015160.1, |
| | | | | | AP001695.1, AF121897.2, AL163218.2, |
| | | | | | AJ009611.6, AC009267.15, AL137011.9, AP000088.1, |
| | | | | | AC007308.13, AL133376.6, AC010320.9, |
| | | | | | AC010596.7, AC020754.4, AC010332.7, AB060228.1, |
| | | | | | AL096701.14, AC018639.8, AL355497.14, |
| | | | | | AC016642.5, AC025463.5, AC002545.1, AC007225.2, |
| | | | | | U38673.1, AC007878.2, AP003352.2, |
| | | | | | AL353596.13, U57004.1, AL121785.48, AC008755.6, |
| | | | | | X53550.1, AC004622.1, AF015156.1, |
| | | | | | AC006157.2, AL445686.14, AC022211.5, AC006132.1, |
| | | | | | AL355358.9, AL355580.13, AC007038.3, |
| | | | | | AC004477.1, Z83001.1, AL031311.1, AF015151.1, |
| | | | | | AP001694.1, AC004652.1, AC000360.35, |
| | | | | | AL139022.4, AC008447.7, U57009.1, Z84482.1, |
| | | | | | AF317635.1, Z82245.1, AC007298.17, |
| | | | | | AC083875.1, AL354774.17, AC020915.6, AC020750.3, |
| | | | | | AL353628.7, AC007014.1, AP001132.4, |
| | | | | | X55932.1, AC026733.4, AP001838.4, U18395.1, |
| | | | | | AC006509.15, AL138878.10, AL031655.8, |
| | | | | | AJ010598.1, AC009196.13, AC005522.2, D87675.1, |
| | | | | | AL022721.1, AE006463.1, U57007.1, |
| | | | | | AL391137.11, AL139317.5, AL049761.11, AC008169.2, |
| | | | | | AL390785.15, AB056411.1, AL137077.31, |
| | | | | | AC002115.1, AL023881.24, AC005161.1, AC022392.4, |
| | | | | | AL049539.21, AL353734.12, AC005077.5, |
| | | | | | AP002906.2, AC090514.1, X55924.1, X55925.1, |
| | | | | | AF131215.1, AC005019.1, AC010601.5, |
| | | | | | AF235093.1, AC009247.12, U18394.1, U57005.1, |
| | | | | | AL132825.35, U38672.1, AC080011.21, |
| | | | | | AL133328.13, AC008440.8, AC002542.1, AC016903.3, |
| | | | | | AC010654.8, AP001672.1, AL158830.17, |
| | | | | | AC003051.1, AF015153.1, AL138958.18, AC008039.1, |
| | | | | | AC008403.6, AL352984.4, X55926.1, |
| | | | | | AC010642.5, AL160163.24, AC010650.8, AP000141.1, |
| | | | | | AP000049.1, U18393.1, AL133396.2, |
| | | | | | AC005324.1, Z83826.12, AL157369.7, AL139101.13, |
| | | | | | AC011448.3, Z83841.1, AC009227.3, |
| | | | | | AL136231.12, AL132875.22, U18398.1, AL365509.8, |
| | | | | | AC011548.4, AC004890.2, AC026787.4, |
| | | | | | AC005553.1, AL353594.13, AC068713.8, AC008775.6, |
| | | | | | Z68332.1, AL162385.16, AC009303.3, |
| | | | | | AJ277546.2, AL354857.13, AE006639.1, AL353759.8, |
| | | | | | AL109925.11, AL136311.7, AP000851.4, |
| | | | | | AL391839.9, AC005821.1, AL162503.12, AL031176.8, |
| | | | | | U18399.1, X54180.1, AL590426.6, |
| | | | | | AC003682.1, AC004919.1, AL590240.5, AC005370.1, |
| | | | | | AC005018.2, AL135797.10, AC040160.4, |
| | | | | | AC005670.1, U57008.1, AC005527.3, AC009626.8, |
| | | | | | AL590763.1, AL163032.3, AL031735.9, |
| | | | | | AC006948.4, AL513527.9, AC008536.6, X76070.1, |
| | | | | | AL136365.9, X55930.1, AC019183.3, |
| | | | | | AL035458.35. |
| HNGFR54 | 148 | 695748 | 1-481 | 15-495 | AC007316.4. |
| HNGGA68 | 149 | 638116 | 1-571 | 15-585 | AB052201.1, AJ236595.1. |
| HNGHZ69 | 150 | 899289 | 1-1181 | 15-1195 | AC011239.5. |
| HNGKT41 | 151 | 836061 | 1-1034 | 15-1048 | AW862214, AW859811, AW862215. |
| HNGNO53 | 153 | 836063 | 1-811 | 15-825 | R37935. |
| HNHFE71 | 155 | 834487 | 1-889 | 15-903 | AV718844, AV720464, AV700229, AV743601, |
| | | | | | AV722801, AV701043, AV701431, AV719000, |
| | | | | | AV701017, AV737584, AV701248, AV701012, |
| | | | | | AV745724, AV745723, AV740535, AV701332, |
| | | | | | AV742667, AV718681, AV699447, AV745080, |
| | | | | | AV701118, AV741012, AV743654, AV701166, |
| | | | | | AV742720, AV718858, AV723927, AV744934, |
| | | | | | AV701163, AV701261, AV720731, AV742001, |
| | | | | | AV743008, AV738934, AV701154, AV720607, |
| | | | | | AV719568, AV745488, D51250, AV746385, |
| | | | | | AV699927, AV745392, AV724520, AV744773, |
| | | | | | D80043, AV744771, AV701121, D80253, |
| | | | | | AV745831, AV720220, D59787, AV746335, |
| | | | | | AV701335, AV701125, D80219, AV746162, |
| | | | | | AV745369, AV701149, AV701443, D80227, |
| | | | | | AV721784, D59275, AV701428, AV700622, |
| | | | | | AW973447, AL038531, AL037726, AL039629, |
| | | | | | AL039625, AL039648, AL038837, AL039074, |
| | | | | | AL039678, AL039108, AL039538, AL039564, |
| | | | | | AL039156, AV700889, AL039109, AL039659, |
| | | | | | AL039566, AL039509, AV744768, AV719783, |
| | | | | | AV720034, AL045794, AL040992, AV746102, |
| | | | | | T24119, AV718016, AL039924, AV699479, |
| | | | | | AV758878, T24112, AL039128, AL044407, AL036973, |
| | | | | | AL045337, AL037051, AL045353, AL039386, |
| | | | | | AL039423, AL038821, BF294063, AV718692, |
| | | | | | AL045341, AL042909, AL039410, D80240, |
| | | | | | AL043422, AV718002, AL038025, AV717989, |
| | | | | | AV717980, AV701782, AV718018, AV717988, |
| | | | | | AV731085, AL036725, AL044530, AV745917, |
| | | | | | AL039150, AL043445, AV717983, AV744770, |
| | | | | | AV745366, AV741888, AV717984, D80210, |
| | | | | | AV718489, AV735727, AL043441, D51423, |
| | | | | | H00069, D80045, AV717959, AV745350, AW064110, |
| | | | | | AW013814, D80134, AV717972, AI535983, |
| | | | | | AV717956, AV717963, AV717962, D59619, |
| | | | | | AV717990, BE439760, D80391, BF508972, |
| | | | | | AV717966, AV718023, D80193, AW976625, |
| | | | | | AV717960, AV717970, T23947, AV717941, |
| | | | | | AW949642, AV718010, AL043423, D80196, |
| | | | | | AV720812, D80168, AJ293456, AV717965, |
| | | | | | AV718020, C14227, AL037639, AV701357, D80949, |
| | | | | | AW975312, AL039085, AW969383, AV717958, |
| | | | | | AL036196, AV717949, AW969322, R47228, |
| | | | | | AW451070, D59927, T02921, AV717955, |
| | | | | | AV745490, AV717948, AV699669, AV717971, |
| | | | | | AL037615, AV718001, AV717946, AV718021, |
| | | | | | AV717978, AV701227, AV745583, AV718006, |
| | | | | | D80366, AV718008, AW965158, AV717968, |
| | | | | | AV718017, AV717964, AV720203, AW949643, |
| | | | | | AL037526, AV718013, AV717952, AV718014, |
| | | | | | AW452756, AV701055, AV701004, AV717967, |
| | | | | | AV717976, AV742995, AL036767, T11051, |
| | | | | | AI535783, AV717961, AV701145, AV745920, |
| | | | | | AV717943, D81026, AV717942, AL036117, |
| | | | | | D50995, AW063533, AV718707, AV723097, |
| | | | | | AV719822, C14014, AV717985, AV717993, |
| | | | | | C75259, AV745621, AV717974, AW949645, |
| | | | | | AL036238, AW975203, AV719913, AL037601, |
| | | | | | AV717973, AC074089.8, AF271371.1, D34614.1, |
| | | | | | X73004.1, AJ244004.1, AJ244003.1, Z96142.1, |
| | | | | | AJ244005.1, Y11923.1, Y11926.1, L27636.1, |
| | | | | | AC007269.2, AC066580.3, AC024910.4, AL023553.5, |
| | | | | | AL157373.23, AP001827.4, AL356115.9, |
| | | | | | AL080239.11, AC012614.6, AL008627.1, AL049641.10, |
| | | | | | AC010608.6, AC005225.2, AC010127.12, |
| | | | | | AP002768.3, AC004919.1, AC005332.1, AL031123.14, |
| | | | | | AC002451.1, AL136226.9, AL021451.1, |
| | | | | | AL022396.1, Y18000.1, AL133377.10, AL390739.8, |
| | | | | | AC017091.8, AC027288.26, AC005079.6, |
| | | | | | AC005694.3, AC005527.3, AC006007.1, AC005529.7, |
| | | | | | AL049792.11, AC019106.3, AC022428.6, |
| | | | | | AC016591.6, AC078962.30, AC004534.1, AC007198.6, |
| | | | | | AC006320.4, AP000227.1, AL136975.6, |
| | | | | | AC004595.1, AC034198.6, AP000087.1, AC006975.2, |
| | | | | | AP001694.1, D42052.1, AC073348.8. |
| HNHGK22 | 156 | 597451 | 1-895 | 15-909 | AC073193.10, AC008269.4. |
| HNHKS19 | 157 | 778392 | 1-776 | 15-790 | AW237081, BF222713, AI954694, BF057788, |
| | | | | | AW590509, AW136373, AA833546, AW139260, |
| | | | | | D80045, AW949645, AW964468, AV718844, |
| | | | | | AW949642, D80212, AW966389, AW949656, |
| | | | | | AW949631, AW949643, AW949618, AV720211, |
| | | | | | AV744012, AW966531, AW975618, D81030, |
| | | | | | AW973334, AW966013, AV742048, D59619, |
| | | | | | D80210, D80240, AV744690, D80022, AW964488, |
| | | | | | AW966053, D59502, D80166, D80219, |
| | | | | | D58283, D59927, AW975621, C14331, AW949655, |
| | | | | | AW966029, D80043, AV723927, AV718440, |
| | | | | | AV720028, AW959628, AW965177, AW965163, |
| | | | | | AW978634, AW966534, AW973541, AV699550, |
| | | | | | AW960553, D80195, AW966041, D80391, |
| | | | | | AV719822, AW966054, AV718692, AW966050, |
| | | | | | AW958992, AV738340, AV719324, AV719783, |
| | | | | | D51423, AW949653, AV718800, AW978661, |
| | | | | | D51799, AW966065, D80253, AV720464, |
| | | | | | AV718770, AV718489, AV720203, AV719188, |
| | | | | | AW973307, D80227, AW966062, AV724520, |
| | | | | | AW959597, AW959570, AW973485, AV719557, |
| | | | | | AV720731, AV720791, AW964756, AV699447, |
| | | | | | D80193, AV722801, AV718633, AW949641, |
| | | | | | AW960465, AW975605, AV699927, AW965184, |
| | | | | | AW959202, AW960564, D80269, D80196, |
| | | | | | D59859, AW966022, D80188, AV699746, AW959799, |
| | | | | | AW962245, C14389, D80164, AW964737, |
| | | | | | AW973482, AW978648, D59787, AW962082, |
| | | | | | AW949632, AW965197, D59275, C15076, |
| | | | | | AV700229, C14429, AV718938, AW949654, AV718707, |
| | | | | | D57483, AV718931, D80038, AW958993, |
| | | | | | AV723097, AW959136, AW959062, AW964477, |
| | | | | | AW956434, AA305409, D59889, AV742732, |
| | | | | | AV719468, AV699669, D80366, AW949646, |
| | | | | | AW949658, AW973474, AV719049, AW966075, |
| | | | | | AW965158, AW949629, D59467, AW949633, |
| | | | | | AW965185, AW949657, AW366296, D59610, |
| | | | | | AW965196, AW973447, AW966043, D50979, |
| | | | | | D50995, AV720812, AV721386, AW973488, |
| | | | | | AW956397, AW960473, AW965175, D80378, |
| | | | | | D80024, AW973330, AW959582, AI905856, |
| | | | | | AW959469, AV700889, AV720878, AW975613, |
| | | | | | D80241, AV718530, AV741220, AW973465, |
| | | | | | C14014, AW960504, AW753053, T03269, |
| | | | | | AW960454, AW178893, AW966023, AW960532, |
| | | | | | AW966059, AW949630, AW966030, AW975623, |
| | | | | | C75259, AV720654, AW960474, AW960570, |
| | | | | | AW752082, D51060, AV701004, AW966397, |
| | | | | | AV742001, AV742667, AV701125, AV701335, |
| | | | | | AV701166, AV701043, AV701332, AV701017, |
| | | | | | AV701248, AV701431, AV742430, AW965176, |
| | | | | | AW375405, AV719913, D80248, AV701149, |
| | | | | | AW179328, AW178775, AW966032, AV701419, |
| | | | | | AV701415, AV701154, AV719628, D80268, |
| | | | | | AV700159, AV720150, D51022, AW966332, |
| | | | | | AV701443, AV702035, AV699479, AW964766, |
| | | | | | AV701422, AW966560, AV699866, AV701130, |
| | | | | | AW951169, AW964532, AV719727, D81026, |
| | | | | | D80949, AW966368, AV720533, AW177440, |
| | | | | | D51250, D80168, D80134, AL136170.12, X67155.2, |
| | | | | | AF271371.1, D34614.1, AF058696.1, AB028859.1, |
| | | | | | D88547.1, AB002449.1, D50010.1, AB038216.1. |
| HNHKV56 | 158 | 800877 | 1-1639 | 15-1653 | H86448, AC009396.5. |
| HOACG07 | 159 | 792928 | 1-1284 | 15-1298 | AL529455, AL527447, AL519665, AL530298, |
| | | | | | AL526667, AL520518, BF312602, AL527270, |
| | | | | | AL523402, AL525526, AL525575, AL532418, |
| | | | | | BE795641, BF689773, BF690313, AL532417, |
| | | | | | BE793892, AL523401, BE798089, AW961032, |
| | | | | | BF978883, BE794106, BG117486, AL517000, |
| | | | | | AW375519, AW375527, AI761506, BF836264, |
| | | | | | BF237461, AA738047, AU123303, AI744657, |
| | | | | | AI573291, AA058761, BE259536, AI765107, |
| | | | | | BE502073, BF087384, BE888732, BE779165, |
| | | | | | BE394031, AW246799, AA700013, AW631125, |
| | | | | | BE786533, AA759011, BF315852, BE515115, |
| | | | | | H38495, BE889852, AI375009, BE702984, |
| | | | | | AI587531, AI148268, AL516999, AI809308, |
| | | | | | AW250662, T15960, AI890594, AI298775, |
| | | | | | BF102631, AA838498, AW137267, AI798469, |
| | | | | | AA838214, AI825338, AI200417, AU149319, |
| | | | | | R00301, AI085034, AI436070, AA036978, AI040364, |
| | | | | | AI537302, AA587887, AI341279, T99954, |
| | | | | | AA588536, AI368583, BG171023, AA366003, |
| | | | | | BE536848, AA573353, AI357177, AI474992, |
| | | | | | BG178921, AW872754, AI248063, AW337164, |
| | | | | | AW082916, AW663937, AW589264, AA830722, |
| | | | | | AA719102, T85297, AA683570, AW473394, |
| | | | | | AW630338, AI927184, AI500302, H78131, |
| | | | | | AI991231, BE644792, BF055078, AI766544, AI365563, |
| | | | | | T32118, AI344370, AI469218, AI370730, |
| | | | | | AI668957, AA036979, BF591154, AW973504, T85508, |
| | | | | | AW404558, AA365119, AI739608, AI263592, |
| | | | | | T98466, BG231108, AW663122, AA338808, |
| | | | | | AW167738, T98407, BE788568, F31030, |
| | | | | | H27770, AA434441, AW103958, AI364615, AI347419, |
| | | | | | AV756067, BF436680, BF436679, AK000557.1, |
| | | | | | AK022713.1, AK024220.1, AL109804.41. |
| HODBB70 | 160 | 520196 | 1-590 | 15-604 | AW079904, AW207285, H18498, R37566, |
| | | | | | BF852425, BF102683, AC006322.2. |
| HOEBK60 | 161 | 789396 | 1-2204 | 15-2218 | AL515934, AL520231, BE618778, BE618245, |
| | | | | | BE782129, BF056891, BG121474, BG250670, |
| | | | | | BG168174, BE905489, AI633878, BE042542, |
| | | | | | AL518067, AW515316, AW088411, BE536123, |
| | | | | | BE218306, BE644805, AW207435, BF087512, |
| | | | | | BF570490, AI818209, AI752319, AW962355, |
| | | | | | AL536159, AI669659, AA902264, AW105148, |
| | | | | | AW410334, AW083012, BF515266, BE465947, |
| | | | | | AL518068, AI927938, BG260989, AI420205, |
| | | | | | BE465917, AA043792, AI743602, AI283114, D81907, |
| | | | | | AL515935, BE546476, AA186486, AI417561, |
| | | | | | AU131122, N66098, AA573278, AA431514, |
| | | | | | AI752320, H14424, R59054, AI819645, |
| | | | | | AI631297, W00707, AI434568, BE221654, BF104164, |
| | | | | | AA973972, R59803, AA350599, H11851, |
| | | | | | AA724174, R17805, BF924661, H19130, AI638738, |
| | | | | | AI440413, N98699, AI702887, AA431188, |
| | | | | | AA280575, BF838288, R61472, AA653570, R77568, |
| | | | | | AI753861, C00128, BF998349, H29435, |
| | | | | | BF377857, AA348799, R18745, AI962149, AA809488, |
| | | | | | D78858, AA305344, AA360504, BF837084, |
| | | | | | BF352331, AI440138, AL135399, AA300827, |
| | | | | | AA329088, H83314, AW089455, D62361, |
| | | | | | AW811797, BE889780, BE561984, AI925346, |
| | | | | | BF374906, D78824, AW796219, AW811796, |
| | | | | | BG027920, N55732, BG036911, AW796258, |
| | | | | | AW410333, N90043, Z25249, R61473, |
| | | | | | BE899608, AA043666, AA174177, AA350598, BF089446, |
| | | | | | AW514435, AA095955, BF089445, BE736007, |
| | | | | | AA092014, AA096434, AW275782, AW275777, |
| | | | | | AA427677, AI624981, AI749472, AA704575, |
| | | | | | BE171096, AL044986, AW089135, W19853, |
| | | | | | BE940131, BF514239, BE163882, BE163878, |
| | | | | | BF243117, AK023143.1, BC004183.1, BC007219.1, |
| | | | | | BC000935.2, AK001928.1. |
| HOFNB74 | 162 | 762821 | 1-1022 | 15-1036 | AL528391, AV705461, BE742621, AW957840, |
| | | | | | AW957916, AA313780, AA469996, BF699406, |
| | | | | | BE897665, AA206557, N31702, AA459482, |
| | | | | | BE790325, BE899574, AW971024, AA460494, |
| | | | | | AI052029, AI761638, H55824, AA628498, |
| | | | | | AA412069, AI027538, AW514954, AI884599, |
| | | | | | AI419408, AW469200, AI992152, AA024623, |
| | | | | | AA581877, R62921, AI142045, AI275439, |
| | | | | | AI066572, AI939991, AA328484, AW002064, |
| | | | | | AA025955, W73635, W52125, AA492218, |
| | | | | | AL513597, AL514791, AL514935, AV723772, |
| | | | | | AV682289, AA954252, AW080838, AW166645, |
| | | | | | AV681668, AI906328, AI149592, AV682266, |
| | | | | | AL514087, AI907070, AI815383, AI220734, |
| | | | | | AV723204, BG108147, AL515047, AL514473, |
| | | | | | AL119049, AI624859, AV758217, AV756703, |
| | | | | | AV681857, AL515373, AV758592, AV758738, |
| | | | | | AL514627, AV682441, BE619513, AV723062, |
| | | | | | AV693157, AV733397, AL514543, AV705644, |
| | | | | | BF724691, AV682351, AV710479, AL513803, |
| | | | | | AV706777, AV661310, AV708119, AA328485, |
| | | | | | AV682479, AV730922, AV755581, AV681630, |
| | | | | | AV682252, AV682772, AI345860, BF673434, |
| | | | | | AI590482, BE777769, AV682051, AV758110, |
| | | | | | AV757205, AV682330, AL523243, AV682099, |
| | | | | | AA022458, BG058208, AL536633, AV682335, |
| | | | | | AI682106, AW132121, AV756477, AI907061, |
| | | | | | AL516344, AV729334, AL514359, AL524807, |
| | | | | | AV682466, AV711509, AV682385, AI525064, |
| | | | | | AV682521, BG108324, AL514075, AV682496, |
| | | | | | AV734638, AI349772, BG105099, AV734425, |
| | | | | | AV681586, AV681951, BF732407, AV733470, |
| | | | | | BF037607, BG109857, AV729701, BG259801, |
| | | | | | AV711355, AL513985, AL513907, BF940608, |
| | | | | | AV682249, BF725868, AL513763, AI345111, |
| | | | | | AI344182, AV661309, BE881155, BF795712, |
| | | | | | AV682809, AV681858, AV733824, AL513817, |
| | | | | | BF054789, AV711924, AV681872, AV682645, |
| | | | | | AV757096, AW168591, BF982085, AV755207, |
| | | | | | BE966443, BF107577, BE208710, BF348329, |
| | | | | | AL047042, AI569870, AV681949, BF726322, |
| | | | | | AV682222, AW071349, AW467961, AV734318, |
| | | | | | AI524991, BF791874, AV723953, AL514803, |
| | | | | | AW827203, AL513631, AV682476, AV758806, |
| | | | | | BE891101, AL519188, BG109125, AV704350, |
| | | | | | BF968041, AL513719, AL514657, AL514085, |
| | | | | | BF916588, AV734180, AV729890, AV655645, |
| | | | | | AV695052, AI207510, BF036115, AL514691, |
| | | | | | BE613622, BF337043, AL515041, BG120135, |
| | | | | | BE048026, BF339420, AI868831, AL514823, |
| | | | | | BG257535, AI349645, BG259943, AV724569, |
| | | | | | AA528822, BG179633, BF981774, BG109969, |
| | | | | | BE047863, BE966577, AV693410, AV732941, |
| | | | | | BE878186, AV704928, AI909662, AL513693, |
| | | | | | BF340104, BG033403, AV755614, AL121270, |
| | | | | | BG179993, BG254754, AI340582, AL512733.1, |
| | | | | | S78214.1, AL133640.1, AF090934.1, AL442072.1, |
| | | | | | BC008387.1, AL389978.1, AL050393.1, |
| | | | | | AB048953.1, AL049938.1, AF090900.1, BC007021.1, |
| | | | | | AB056809.1, AF078844.1, AB055303.1, |
| | | | | | AF090943.1, AL136586.1, AF125949.1, AL050146.1, |
| | | | | | AL157431.1, AL117457.1, AL133016.1, |
| | | | | | BC008417.1, AL442082.1, AL110196.1, BC008365.1, |
| | | | | | AL122050.1, AL137527.1, AL353594.13, |
| | | | | | AL117460.1, AL136787.1, AB056420.1, AL133606.1, |
| | | | | | AF090903.1, AF090901.1, AB050510.1, |
| | | | | | AF104032.1, AJ242859.1, AL133258.16, AK026608.1, |
| | | | | | AF218014.1, AK000212.1, BC008488.1, |
| | | | | | AB049758.1, AL080060.1, AL390167.1, AL359596.1, |
| | | | | | AL359601.1, AL049452.1, BC003687.1, |
| | | | | | AL110221.1, AL136749.1, AF106862.1, AC006336.4, |
| | | | | | AB063046.1, AL136789.1, AF111847.1, |
| | | | | | BC003683.1, AB047615.1, AL096744.1, AK027868.1, |
| | | | | | AL162006.1, AB060887.1, AF090896.1, |
| | | | | | AK026865.1, AB048964.1, AL050149.1, AL136892.1, |
| | | | | | Y16645.1, AB063070.1, U42766.1, |
| | | | | | AK026741.1, AB019565.1, AL050116.1, AB055361.1, |
| | | | | | AL122093.1, AB060916.1, AC005940.3, |
| | | | | | AK025339.1, AK025084.1, AL050108.1, AL499604.9, |
| | | | | | AL121952.18, AB060908.1, AC010879.2, |
| | | | | | AL445236.22, AB056768.1, AB063008.1, AL049430.1, |
| | | | | | AF091512.1, AL162083.1, BC001967.1, |
| | | | | | AL133075.1, AC005225.2, AK026045.1, AK025958.1, |
| | | | | | AL049314.1, AC026787.4, AC007375.6, |
| | | | | | AL049776.3, AL133344.28, AB048974.1, AB047801.1, |
| | | | | | AL049466.1, AL034374.2, AC026464.6, |
| | | | | | AL035067.2, AL136799.1, AC006357.5, AC007172.6, |
| | | | | | AF219137.1, AL353802.14, AL050277.1, |
| | | | | | AC007298.17, BC006807.1, AC006435.7, AL133557.1, |
| | | | | | AL080137.1, AC026307.16, AC004686.1, |
| | | | | | AC005886.2, AF097996.1, AL360294.11, AC010077.1, |
| | | | | | AC020558.4, AL080124.1, AC007043.3, |
| | | | | | AL137283.1, AC000111.1, AK026855.1, AK027096.1, |
| | | | | | AC002464.1, U95739.1, AC009145.4, |
| | | | | | AL389982.1, AC006039.2, AC024247.4, AK026744.1, |
| | | | | | AL122123.1, AL133093.1, AL133080.1, |
| | | | | | AL136844.1, AC005000.2, AL133565.1, AC004690.1, |
| | | | | | AL137459.1, AL035587.5, AL136768.1, |
| | | | | | AC006371.2, AL512746.1, AC021325.5, AP001699.1, |
| | | | | | AC020921.5, AK000618.1, AC005291.1, |
| | | | | | AL122121.1, BC002733.1. |
| HOSDO75 | 163 | 862049 | 1-888 | 15-902 | AI375670, AI990134, AA732220, AI494146, |
| | | | | | AA172039, BE777959, AA258154, AI394315, |
| | | | | | BF086933, AA172291, BE093382, AA456756, |
| | | | | | N57268, BF086946, AU138426, AU139896, |
| | | | | | BE093384, AA113041, AA258916, AK002100.1. |
| HOSEI81 | 164 | 562778 | 1-883 | 15-897 | AA418350, AA418237. |
| HOUDE92 | 165 | 580866 | 1-1270 | 15-1284 | BE736091, BF237553, BE781264, BF686547, |
| | | | | | BE313480, BE872070, BF313936, AI138711, |
| | | | | | AI348027, BE502126, BE258631, AA524244, |
| | | | | | AW873570, AI982983, AI367855, AI052179, |
| | | | | | N90758, AA325647, AW419076, AW873111, |
| | | | | | AW008195, AI304671, AI367495, AW964887, |
| | | | | | AI609692, AA019213, AI279349, AI581275, |
| | | | | | AI224904, AI141287, H14110, H41440, AI017367, |
| | | | | | H29060, H29163, AA482386, AI471043, |
| | | | | | AI742262, AI262559, H52568, AA872715, R60248, |
| | | | | | H06091, AI041676, BE856821, H86160, |
| | | | | | H86771, AI241156, AA872384, R60761, AW131262, |
| | | | | | T31006, H56455, H95225, AA535480, |
| | | | | | AA678522, AA953998, R93546, R47352, BF968234, |
| | | | | | C04826, N39943, AA779062, T31180, |
| | | | | | H69216, AA017105, AA738315, AA019233, C04344, |
| | | | | | C05015, H17526, R99865, H84704, |
| | | | | | AW025505, AA057567, N72695, H86419, W02476, N27200, |
| | | | | | AA001522, AW194286, AI264419, AI220672, |
| | | | | | AI290418, T30927, AI620442, AA985424, R49316, |
| | | | | | H86772, AA725465, R91429, R93547, |
| | | | | | AA017106, AI074855, H95701, H69217, H95226, |
| | | | | | AW188581, AI678424, AA057566, AA326095, |
| | | | | | AA976949, H56456, W57713, AW166317, Z42112, |
| | | | | | AA775239, AI864069, AA918031, H85105, |
| | | | | | AA015626, AA977988, AA429622, R99866, H14085, |
| | | | | | AI000910, AI431360, Z38375, W57838, |
| | | | | | AA015625, R57558, AI949351, AI262422, AC005865.1, |
| | | | | | AF217967.1, AK027366.1, AC005912.1. |
| HOVBD85 | 166 | 827362 | 1-1115 | 15-1129 | AC009039.6, AP001721.1, AF015262.2, AJ229043.1, |
| | | | | | AC008015.5. |
| HPCAB41 | 167 | 758003 | 1-2573 | 15-2587 | AW130635, AA732548, R66294, H02322, |
| | | | | | AA992616, R63528, AA089513, R80947, BG180648, |
| | | | | | AL110237.1, AL157372.18, AL022394.3. |
| HPEAD23 | 168 | 773409 | 1-568 | 15-582 | BG037089, BF973374, BG025260, BF981319, |
| | | | | | AI827721, AI220233, BE876017, AA910948, |
| | | | | | AW663886, AA728767, AI279770, BF727458, |
| | | | | | AA972390, AI051448, AA932444, AI346841, |
| | | | | | AA740783, AI186713, AA948231, AA905780, |
| | | | | | AA918553, AA884145, AI268749, AI346070, |
| | | | | | AA858123, AA857640, BE275406, AW025402, |
| | | | | | AI262503, T95182, AL389983.1, AK025239.1, |
| | | | | | U90913.1, AF234997.1, AF028823.2, U78525.1, |
| | | | | | AL137298.1, AL389943.1, AK025254.1. |
| HPFCI36 | 169 | 855966 | 1-865 | 15-879 | AL516624, AW967335, AI346493, BF969871, |
| | | | | | AI379068, AW813968, AI435632, AW439597, |
| | | | | | AA160513, AA111896, AI129000, AI803023, |
| | | | | | AI587653, AI247913, AW080897, AA111878, |
| | | | | | BF197837, T58186, H04232, W07286, |
| | | | | | BE243262, BG165835, AA046003, AW028757, BE882257, |
| | | | | | BE393612, AA357180, AA085677, AA085834, |
| | | | | | AA621577, R36594, BF733978, AI014838, |
| | | | | | AL536330, AV753531, AV751871, R36593, |
| | | | | | AV752854, AW605869, AA341976, T58072, |
| | | | | | AW955926, AA576671, BF825158, BF245058, |
| | | | | | AL527071, AI367586, N79788, AA321931, |
| | | | | | AI566375, AI709192, AW379008, AA441898, |
| | | | | | AK000452.1. |
| HPFDI37 | 170 | 862056 | 1-338 | 15-352 | H55085, AA434130, R25258, R20029, |
| | | | | | H14658, AW950901, BE275081, R19886, BE727676, |
| | | | | | BG248105, BF345809, BE730221, BE904350, |
| | | | | | AC000090.2, AF106697.1, BC007489.1, AF171054.1, |
| | | | | | AF044212.1, AF166126.1, AF166127.1, AB019694.1, |
| | | | | | AB019695.1, AF201385.1. |
| HPIAA80 | 171 | 829972 | 1-905 | 15-919 | BE865466, BG170320, AW043782, AW662099, |
| | | | | | AI933030, BF432372, AI553724, AA629903, |
| | | | | | AW341957, AW073315, AW972918, AA542856, |
| | | | | | AA380138, H22229, BF667499, C02428, |
| | | | | | BF573889, BF695553, BF697671, BF982558, |
| | | | | | BE694971, BE961006, BE865295, BF507508, |
| | | | | | AW467509, BF571682, AW372886, H25153, |
| | | | | | AA302738. |
| HPMFH77 | 173 | 702014 | 1-1877 | 15-1891 | BF969970, BG253932, BE857961, AI185063, |
| | | | | | AA985520, H97907, N70065, AA503843, N68939, |
| | | | | | W94388, AA829801, AA349438, W00572, |
| | | | | | AI301208, AA349459, R23765, BF813707, R23718, |
| | | | | | AI129242, H97073, H47246, AI382737, |
| | | | | | BF818365, AW027760, AW027780, W74636, AI471120, |
| | | | | | AL042488, BF932339, BF891282, AI401774, |
| | | | | | BE859019, AA775471, AI685740, AL356095.11, |
| | | | | | AC007270.2, AL139100.9, AL078600.15. |
| HPRBH85 | 175 | 695752 | 1-1659 | 15-1673 | AI147467, BG252600, BF354490, BF354491, |
| | | | | | BE999965, BF032961, W52563, AW512426, |
| | | | | | AI810178, BE274472, AI188557, BF432115, |
| | | | | | N25987, AI700626, N29859, AI659619, N29340, |
| | | | | | AI031999, AA974460, AI267374, BF593262, |
| | | | | | N36618, AL538054, AI350777, AI656701, AV724003, |
| | | | | | W01296, AI949788, Z39752, H09136, |
| | | | | | AA234945, W60255, AA635309, Z43693, H09192, |
| | | | | | AI583723, BE830918, N67638, AA371469, |
| | | | | | AA706920, AI537632, AW028490, AI799012, |
| | | | | | AA234944, R34999, T64063, AA855109, |
| | | | | | BF082755, BF332778, BF082768, BF082759, BF082766, |
| | | | | | BF328302, N57281, AW301576, AA610602, |
| | | | | | BE181224, BE830920, R49386, BE009565, BF332781, |
| | | | | | T63991, N83625, AA495939, H26811, |
| | | | | | AI348901, AI564500, AL039274, AW051088, AI866469, |
| | | | | | R41605, AL514691, BF871314, BG029058, |
| | | | | | AI889180, AW834282, AI433611, AW089844, |
| | | | | | AA806757, AL118781, AI370623, AI471429, |
| | | | | | AL039086, AI619525, AI628325, AA464646, |
| | | | | | AW076124, BE875959, AI345688, AI583558, |
| | | | | | AL121365, BF033757, AL048351, AI285439, |
| | | | | | AI638644, AI621341, AI524654, AL046466, |
| | | | | | AI474646, BF970162, AW195253, AW020381, |
| | | | | | AA808175, AV704934, AV750565, AI445069, |
| | | | | | AI619820, AI537677, AI874107, AI309306, |
| | | | | | AI927233, AI891084, AI589428, AI472487, |
| | | | | | AI270183, AL079963, BG169738, AW083572, |
| | | | | | AA806719, AI859464, AI951123, AI634457, |
| | | | | | BF812960, AA470491, BE906646, AI475371, N92140, |
| | | | | | AW827107, BF811808, BF750886, AI684127, |
| | | | | | AA654216, AI972070, AI473536, AV734747, |
| | | | | | AV733582, AI590755, AW150557, AI499963, |
| | | | | | AI932503, AW192300, BE393784, BF971340, |
| | | | | | AW050850, AL046595, AA825826, AI582932, |
| | | | | | AI923989, BE909549, AI978703, BG250575, |
| | | | | | BF525577, AI536685, AA857847, BG253684, |
| | | | | | BE892118, AV701597, BG170663, AW080140, |
| | | | | | AV682112, AW025279, BG260760, AW021091, |
| | | | | | BF796402, AI923559, BG260287, AI610446, |
| | | | | | N25033, AI702527, BE966968, BG256090, |
| | | | | | BF970123, AI861973, AW088183, AI564212, |
| | | | | | BG034586, AA693331, BG034746, AL138376, |
| | | | | | AW023072, BF089679, AV726156, AW105087, |
| | | | | | AI866090, AI479292, AV682403, AW021256, |
| | | | | | AI932794, AV757018, BG255493, AW076127, |
| | | | | | BF527697, AA838435, AI560873, AI590043, |
| | | | | | AI440260, AV747571, AV656932, AI433590, |
| | | | | | AW029566, AI819976, AW020710, AI609331, |
| | | | | | AV762892, AI225000, AI357599, BF680133, |
| | | | | | AI954721, BG260524, AI815232, BF724651, |
| | | | | | BE877142, AL045950, BG026483, AW019988, |
| | | | | | AI566613, BF892007, AI524179, AI368691, |
| | | | | | BF766531, AW075382, AI567971, AW080076, |
| | | | | | AV682366, AI539260, BE047852, AW172745, |
| | | | | | BE439677, AW089275, AW020419, AI079736, |
| | | | | | AL039390, AI879377, BE536417, AI500061, |
| | | | | | AI306610, AW168875, AI537516, BE621256, |
| | | | | | AI799313, AI096771, T69241, BG250789, |
| | | | | | AV682250, AI225004, AI698391, BG113851, BF680131, |
| | | | | | AI741158, AK027690.1, AB050514.1, AL162002.1, |
| | | | | | BC008899.1, AK026959.1, AF155656.1, |
| | | | | | AF326206.1, AF265236.1, BC001967.1, AL137459.1, |
| | | | | | AK024747.1, BC006287.1, AF006516.1, |
| | | | | | AF117959.1, BC001236.1, BC002373.1, AK025113.1, |
| | | | | | AF245044.1, BC001964.1, BC003590.1, |
| | | | | | AL136882.1, AL389935.1, AL137480.1, AK026389.1, |
| | | | | | BC002733.1, AB048881.1, BC008946.1, |
| | | | | | X61970.1, AK027096.1, AL359583.1, X99226.1, |
| | | | | | AB051158.1, BC008708.1, BC009395.1, |
| | | | | | BC004925.1, AL137711.1, AF274348.1, AF274347.1, |
| | | | | | AK026534.1, AK024588.1, AL512733.1, |
| | | | | | X59812.1, AK025015.1, BC001199.1, AL136864.1, |
| | | | | | AB062978.1, M92439.1, AL137523.1, |
| | | | | | AL359615.1, AL137550.1, Y10080.1, AL110196.1, |
| | | | | | AB044547.1, AK027142.1, BC002476.1, |
| | | | | | AJ006417.1, AB055370.1, AF195092.1, AK026647.1, |
| | | | | | AF026816.2, BC009026.1, AF353396.1, |
| | | | | | AL136622.1, AK025906.1, AK026541.1, AF131821.1, |
| | | | | | AF044323.1, BC000778.1, BC003658.1, |
| | | | | | AL137657.1, BC008488.1, AK025209.1, Z37987.1, |
| | | | | | AL122100.1, BC005843.1, AK026434.1, |
| | | | | | AL117435.1, BC001328.1, BC000090.1, AL136586.1, |
| | | | | | X72889.1, BC003637.1, AK027129.1, |
| | | | | | AF056191.1, BC003122.1, AK026649.1, AK000647.1, |
| | | | | | BC004945.1, AB055361.1, AL049464.1, |
| | | | | | AK026626.1, AB060852.1, BC005854.1, AF205861.1, |
| | | | | | BC001670.1, AK026506.1, BC006807.1, |
| | | | | | AL133637.1, AK026633.1, BC008920.1, BC007364.1, |
| | | | | | BC000386.1, BC000643.1, AL080146.1, |
| | | | | | AL137478.1, BC008836.1, AL359596.1, AK025084.1, |
| | | | | | M85165.1, AK025092.1, AL512746.1, |
| | | | | | BC007767.1, S77771.1, AL136893.1, AL353940.1, |
| | | | | | BC001844.1, BC000235.1, AL050138.1, |
| | | | | | BC009398.1, X83544.1, BC000316.1, AL137267.1, |
| | | | | | AL137557.1, AL133080.1, AB060837.1, |
| | | | | | AL133049.1, BC000761.1, BC008673.1, AK026518.1, |
| | | | | | AK027146.1, AK026613.1, BC002466.1, |
| | | | | | S76508.1, AF227198.1, AJ406930.1, BC001082.1, |
| | | | | | BC005002.1, BC000751.1, AK027081.1, |
| | | | | | AK027116.1, AK024594.1, AK026057.1, AK027210.1, |
| | | | | | AL117587.1, BC001785.1, BC005168.1, |
| | | | | | AB056421.1, AL133062.1, BC002985.1, U73682.1, |
| | | | | | AY033593.1, BC006181.1, AL049283.1, |
| | | | | | AC009364.8, AK026462.1, AL137258.1, BC007375.1, |
| | | | | | AL389939.1, BC000007.1, AF111112.1, |
| | | | | | AL137627.1, AL512704.1, AK027152.1, AL136615.1, |
| | | | | | AL049382.1, BC006440.1, AK027173.1, |
| | | | | | Z82022.1, BC002343.1, BC006494.1, BC006345.1, |
| | | | | | AL137663.1, AF106697.1, BC007556.1, |
| | | | | | AL512718.1, AB060839.1, AK000250.1, AK000197.1, |
| | | | | | BC007420.1, AL050143.1, AL096720.1, |
| | | | | | AL157433.1, AJ406932.1, BC003410.1, AF285836.1, |
| | | | | | BC004297.1, AL137275.1, AL110280.1, |
| | | | | | AC002467.1, AC020908.6, AK026600.1, BC002491.1, |
| | | | | | AB060893.1, BC007255.1, AF114784.1, |
| | | | | | BC007852.1, AB048995.1, BC004874.1, AB052200.1, |
| | | | | | BC008078.1, BC001675.1, AK027136.1, |
| | | | | | BC005890.1, AF057300.1, AF057299.1, AL356103.8, |
| | | | | | BC007674.1, AL080124.1, AL133104.1, |
| | | | | | BC005858.1, AK024533.1, AK027137.1, AL122104.1, |
| | | | | | BC002541.1, AB050410.1, BC004951.1, |
| | | | | | BC007204.1, AL050172.1, BC007456.1, BC006196.1, |
| | | | | | AF183393.1, AK027164.1, BC002495.1, |
| | | | | | AK025632.1, AB050431.1, AB060888.1, AF061795.1, |
| | | | | | AF151685.1, AK000618.1, U42766.1, |
| | | | | | AL136787.1, AK000653.1, AF102166.1, X66417.1, |
| | | | | | BC000077.1, AB060229.1, BC004960.1, |
| | | | | | X82434.1, AL049339.1, Y14040.1, BC004991.1, |
| | | | | | AF159141.1, BC006091.1, BC008591.1, |
| | | | | | BC003591.1, BC002519.1. |
| HPRCD35 | 176 | 853551 | 1-695 | 15-709 | AI952238, BF966633, BE673553, AW249944, |
| | | | | | AW673164, AI491912, AI433456, AW027835, |
| | | | | | AI434093, AA040338, BG152387, AI744101, |
| | | | | | BF589019, AI433927, AW388710, BE710661, |
| | | | | | AW027844, BF951319, AW514110, BE893648, |
| | | | | | AW235679, BF951645, AA853738, N77918, |
| | | | | | BF904963, AW027796, BF951640, AI820008, |
| | | | | | BF802330, BF802123, BE091385, AA040337, |
| | | | | | D20818, BG116710, W07085, BE348578, |
| | | | | | BF979894, BF448283, AI806099, AA746652, AI269951, |
| | | | | | AI370493, BE251472, BG255671, BE743054, |
| | | | | | BE873348, AA034242, AI269933, AI494531, |
| | | | | | AA193194, R01841, AW130830, R71213, |
| | | | | | BE746974, BG252660, R01109, AV746580, AV709278, |
| | | | | | AA910706, BF204537, R94047, N62862, |
| | | | | | BF832992, AI828509, BE700205, AW899366, BF951647, |
| | | | | | AA323326, AL042486, AL527593, T97110, |
| | | | | | AW176293, AA886453, AA319188, AI521632, |
| | | | | | AV699431, BF922964, AV700764, AV700026, |
| | | | | | W26006, N93989, BF951643, AA193234, N87415, |
| | | | | | BF825093, BF841081, BE695594, BE695488, |
| | | | | | AV695783, AV692484, T69241, AA398143, |
| | | | | | AV682403, AV682366, BE907663, BG030601, |
| | | | | | BF978949, BF965959, AI801106, AL039456, |
| | | | | | AI499161, AI635132, AL359611.1, AK025633.1, |
| | | | | | AB037802.1, AK027681.1, BC002349.1, |
| | | | | | AK026408.1, AL133088.1, AL359583.1, Y10183.1, |
| | | | | | AB048881.1, AC011450.4. |
| HPTRM02 | 177 | 812879 | 1-1746 | 15-1760 | AL524458, BE738365, BE797125, BE799999, |
| | | | | | BG029222, BE745922, BE545163, BE907437, |
| | | | | | BE799866, BF305271, BE544399, BF663830, |
| | | | | | BE796881, BF308083, BG169861, BE350925, |
| | | | | | AW385462, BF307517, BE797270, BE743037, |
| | | | | | BF668016, BG180312, BF974123, BE737908, |
| | | | | | BF663981, AW247807, BE513095, BE906969, |
| | | | | | AL138083, BE255971, BF664455, BF338518, |
| | | | | | BF244474, AL536412, BG231717, BG121312, |
| | | | | | AW005562, AI357069, BF000625, AA644049, |
| | | | | | AL523557, AW513359, AA632166, AW246260, |
| | | | | | BF892728, AA706163, AL520864, BE746537, |
| | | | | | AW245080, AI879390, AA496904, BG177219, |
| | | | | | AW005067, AW276591, BE791039, AW804483, |
| | | | | | AA738041, BE747177, BF869837, BE251828, |
| | | | | | BE875024, AI088680, BE297879, BF948818, |
| | | | | | AA831030, BE559592, BE561590, BF340321, |
| | | | | | AW248071, AA860150, AA149920, T63138, |
| | | | | | AL524459, AW439742, AI609027, AW804577, |
| | | | | | AI659057, AW886264, AA193529, AA057835, |
| | | | | | BE743405, R73214, AW194065, BE562027, |
| | | | | | AW075497, R75945, BE559810, AA706533, |
| | | | | | BF894712, AI468114, AW249614, AA335528, |
| | | | | | BE795304, AA827797, AI302055, BF129302, |
| | | | | | AI750232, AA427422, BF930249, BE560497, |
| | | | | | AA860105, BF939406, AA335848, AW404930, |
| | | | | | AW571830, R76783, T15952, BE560176, |
| | | | | | BG152613, BE267829, AW991408, BE269966, |
| | | | | | AW991532, BF664249, AL138082, BE269643, |
| | | | | | AW575878, BE797429, AW071243, AA304216, |
| | | | | | BE791865, AW945716, AW875302, R37100, |
| | | | | | AA682206, BE277420, AA193433, AW751797, |
| | | | | | AA352416, AA587756, AI818900, AW518507, |
| | | | | | BE939890, AA852530, R07062, BE900192, |
| | | | | | BE296328, AA931598, BE671371, T32042, |
| | | | | | AI033227, AA353903, R82530, BG121259, AI281709, |
| | | | | | BE389644, H28650, AA534672, AA548317, |
| | | | | | BE866982, AW084505, R73151, AA349275, T62995, |
| | | | | | BF205162, AI219302, BF688975, BG117867, |
| | | | | | BE748125, BF128654, AW772768, R82480, |
| | | | | | AA665591, BF434544, AW246149, BE859039, |
| | | | | | AA687496, AW403743, AI738846, BF893795, |
| | | | | | BF772867, BE388333, AW874200, BE890138, |
| | | | | | BE791538, BG027900, BF129181, AI468932, |
| | | | | | C00531, AW150444, AW338439, BE388322, |
| | | | | | BF931213, AW875234, AW385458, AW991401, |
| | | | | | AW875290, AW373139, AW385460, AW581536, |
| | | | | | AW875235, AW875239, AA687440, AI948428, |
| | | | | | BE727787, AW403641, AW393066, AW875349, |
| | | | | | AW581529, AW875238, AW875305, AW875255, |
| | | | | | BE748665, AW875292, AW875249, BE383820, |
| | | | | | AW875301, AW581521, AW581531, AW875245, |
| | | | | | AW875307, AW875248, AW875296, AW875241, |
| | | | | | AW875360, AW581537, AW875368, AA653357, |
| | | | | | AW385464, AA852531, AI878829, AI079775, |
| | | | | | BF874873, BF991409, AW403272, BF772016, |
| | | | | | BF688505, BF592857, AW518551, AW991487, |
| | | | | | BG012697, AW835133, AW875362, AW962437, |
| | | | | | AA078519, AW581533, AF218020.1, AF151364.1, |
| | | | | | AF077353.1, AK027367.1, AF197060.1, |
| | | | | | AF250287.1. |
| HRADA42 | 178 | 827302 | 1-1121 | 15-1135 | BG167431, AI870419, BF794745, BF212001, |
| | | | | | AI379833, AA894530, AI339336, AI336165, |
| | | | | | AW173013, BF688231, BE546835, AW615315, |
| | | | | | BG029651, AI660120, BE793058, AI961630, |
| | | | | | BG024470, AI418065, AA946777, AI697018, |
| | | | | | AW629846, BE538634, BF694672, AA126483, |
| | | | | | AW957695, AA948109, BE565388, AA864307, |
| | | | | | AI281293, AI124079, W58372, AI372055, |
| | | | | | AA918864, AI284979, AA961355, BF245466, |
| | | | | | AW627534, AI018252, AI804228, AA115687, |
| | | | | | AI123356, AA460235, AA938579, AA806449, |
| | | | | | BF667170, AI191797, BF218360, BF211069, |
| | | | | | BF666624, AI201697, BE789077, AW958886, |
| | | | | | BE888833, BE566320, BF678487, AA181956, |
| | | | | | AI280166, BF701292, AA187579, AI476152, |
| | | | | | AA975500, AI262806, AA633371, T86966, |
| | | | | | BF027457, AA670154, BE858489, N54918, |
| | | | | | AI285113, AI282777, AA928294, BF184831, |
| | | | | | AA856633, AA554905, AA952898, AA939258, |
| | | | | | BF245493, BE565724, H01916, H04478, BF029426, |
| | | | | | AA358260, AA283086, AI498851, AA070685, |
| | | | | | BF209151, BE252410, W04639, AA503091, |
| | | | | | D20722, AI473325, N78134, BF207942, |
| | | | | | AA553782, BF477790, BE302428, AA383311, BE568842, |
| | | | | | W31735, AI718566, BF695644, T56012, |
| | | | | | BF239325, N21275, BF696213, BE897499, AA651925, |
| | | | | | H78232, AA383310, AI583297, BF694034, |
| | | | | | AA296522, R70784, N40501, AA282901, T31842, |
| | | | | | BF081525, R70837, BF665566, BF668121, |
| | | | | | AI381360, BF243257, AW630758, R80104, W58050, |
| | | | | | BF700860, BF593090, AA358261, BE394694, |
| | | | | | C14037, BF822945, BF211844, BF699997, |
| | | | | | AA329615, AA463798, BF239695, N31210, |
| | | | | | AA375691, AA932915, AW188939, AA770225, |
| | | | | | AA381668, AA969062, AI284357, BE379498, |
| | | | | | AW754363, AA918735, BF902310, AV683902, |
| | | | | | AV695726, AV691171, AI863382, AA911767, |
| | | | | | AI270183, AW983832, AI590423, BF814449, |
| | | | | | AI491842, AI932818, BF909758, AI886123, |
| | | | | | AV713022, BG166654, AI679550, AI690813, |
| | | | | | AL036631, AI591420, BF885000, AI802542, |
| | | | | | BE783206, BG260287, BF337479, BF816037, |
| | | | | | AW190891, BE621256, AI680498, AL041772, |
| | | | | | AV689304, AL036403, AV729462, BG029053, |
| | | | | | BE011880, BF814516, AW827119, AI817552, |
| | | | | | AI344817, AI345745, BG110517, BF726207, |
| | | | | | BF061283, BG026714, BE964614, BE877142, |
| | | | | | BG151388, AI950877, BE964820, AV733679, |
| | | | | | BG026746, AV734259, AV757000, AW827106, |
| | | | | | BE906123, AI872910, BF339322, AI923989, |
| | | | | | AI888621, AL135022, AL039086, AI699011, |
| | | | | | AW020095, AI608936, AI559296, BG112718, |
| | | | | | BG112239, BF856052, AI370890, AI538764, |
| | | | | | AI611738, BE048071, AW827211, AA640779, |
| | | | | | AI589668, BF338002, AW268083, AL036274, |
| | | | | | AW834302, AV712229, AV651983, AI927755, |
| | | | | | AL079963, AW157767, BF340889, BF969228, |
| | | | | | AL040205, BF904189, BF924882, AL040241, |
| | | | | | AA738104, BG256592, AV705384, AI336575, |
| | | | | | BF814357, AI284517, BF814360, AW269097, |
| | | | | | AW827102, BG121335, AW191003, AC011890.4, |
| | | | | | BC001013.1, AB034206.1, AL110115.38, |
| | | | | | AK024538.1, AF218014.1, AK026741.1, BC006412.1, |
| | | | | | AK027164.1, AK024588.1, AL512746.1, |
| | | | | | AL512718.1, AK027116.1, AL133560.1, AF028823.2, |
| | | | | | AL049430.1, AL137521.1, AL162002.1, |
| | | | | | AF252872.1, AK026592.1, AB052200.1, Z37987.1, |
| | | | | | BC007021.1, AB051158.1, AF091084.1, |
| | | | | | AB049758.1, U42766.1, AL050024.1, AL049465.1, |
| | | | | | AK026506.1, AL136893.1, AB060839.1, |
| | | | | | AL137533.1, AK000486.1, AL049466.1, AB060929.1, |
| | | | | | AB047801.1, BC009212.1, AB055368.1, |
| | | | | | AF106862.1, AK024545.1, AL137557.1, AL512689.1, |
| | | | | | AK025254.1, AB060916.1, AK000391.1, |
| | | | | | S78214.1, AL137488.1, AL133606.1, AL389935.1, |
| | | | | | AK027868.1, AL080124.1, AL133104.1, |
| | | | | | AK025857.1, AK024992.1, AK026086.1, AK000445.1, |
| | | | | | BC006164.1, AB060908.1, AB055366.1, |
| | | | | | AL050116.1, AF217991.1, AL133113.1, AK025484.1, |
| | | | | | X72889.1, AL080074.1, BC008280.1, |
| | | | | | X65873.1, AL136882.1, BC006195.1, AF227198.1, |
| | | | | | AL137294.1, AL050277.1, BC001418.2, |
| | | | | | AL133093.1, AK026597.1, AJ242859.1, AL133075.1, |
| | | | | | AF111847.1, AL157482.1, BC006508.1, |
| | | | | | AL137523.1, BC006440.1, AK025349.1, AK025798.1, |
| | | | | | AK025573.1, AL117457.1, X53587.1, |
| | | | | | AL512719.1, BC008387.1, BC008382.1, Y16645.1, |
| | | | | | BC004958.1, AK026452.1, AL359615.1, |
| | | | | | AK025708.1, AL050092.1, AK026855.1, AK025967.1, |
| | | | | | Y10936.1, AF132676.1, AL512754.1, |
| | | | | | AK026045.1, AF061836.1, AK026797.1, AL389939.1, |
| | | | | | AB063046.1, AL117416.1, BC008417.1, |
| | | | | | AK025524.1, AK026927.1, AL359618.1, BC006807.1, |
| | | | | | AL122093.1, BC008893.1, AK024524.1, |
| | | | | | AL136786.1, BC004530.1, AB055370.1, AK026626.1, |
| | | | | | AL137459.1, BC007355.1, AK025092.1, |
| | | | | | AL133568.1, U78525.1, AK026600.1, AL136805.1, |
| | | | | | AL137479.1, AB062750.1, AL136799.1, |
| | | | | | AL080086.1, BC007389.1, AL512750.1, AL137526.1, |
| | | | | | AK026647.1, BC008070.1, AK026642.1, |
| | | | | | AL122123.1, AL049382.1, AF183393.1, BC000316.1, |
| | | | | | AB060825.1, AB060852.1, AL162062.1, |
| | | | | | AF090900.1, AK026608.1, AL389982.1, AL122121.1, |
| | | | | | AF104032.1, AL137539.1, BC007326.1, |
| | | | | | AK026480.1, AL390154.1, AL137560.1, AL137271.1, |
| | | | | | AL359583.1, AK025414.1, BC001963.1, |
| | | | | | AL117460.1, AL080158.1, AL023657.1, AL512765.1, |
| | | | | | BC002733.1, AL137292.1, BC008365.1, |
| | | | | | AB055361.1, AK026534.1, AK027114.1, AL122049.1, |
| | | | | | AF353396.1, AL136622.1, AL049283.1, |
| | | | | | AF069506.1, AK026164.1, BC004951.1, U58996.2, |
| | | | | | AF210052.1, AK026784.1, AL096744.1, |
| | | | | | AL133077.1, AL353956.1, AL117435.1, AK025465.1, |
| | | | | | AF057300.1, AF057299.1, BC003687.1, |
| | | | | | AK024594.1, BC002457.1, BC009403.1, AB047615.1, |
| | | | | | AB052191.1, AL353957.1, AB047941.1, |
| | | | | | AL117583.1, AB048954.1, AK027213.1, AL137538.1, |
| | | | | | AL133557.1, AK000421.1, AL110221.1, |
| | | | | | AF090903.1, AK025312.1, AL080137.1, AL137527.1, |
| | | | | | AF056191.1, AL136787.1, U88966.1, |
| | | | | | AF078844.1, AK026528.1, BC003602.1, BC002643.1, |
| | | | | | AK025906.1, BC004370.1, AF225424.1, |
| | | | | | BC005168.1, AL122106.1, BC004362.1, AL050172.1, |
| | | | | | AL133098.1, BC006180.1, AK000647.1, |
| | | | | | AL137550.1, AK025435.1, AL136792.1, AL133016.1, |
| | | | | | AL137658.1, BC004556.1, AL136864.1, |
| | | | | | AL136586.1, AL359620.1, AB063100.1, AL080148.1, |
| | | | | | AL136540.1, AL136784.1, AK000718.1, |
| | | | | | AL137463.1, AB019565.1, BC009284.1, AK026464.1, |
| | | | | | AL136928.1, X82434.1, BC009033.1, |
| | | | | | AB060826.1, AL389978.1, AL050155.1, BC008899.1, |
| | | | | | AL162003.1, BC009395.1, AK000137.1, |
| | | | | | AB047897.1. |
| HRADF49 | 179 | 866481 | 1-2690 | 15-2704 | AL521382, AL518826, AL521381, AL530977, |
| | | | | | AU124017, AL040407, BE791530, BF981293, |
| | | | | | BG254592, AU118953, BF344355, BE740053, |
| | | | | | BF303862, BF569193, BF689517, BG169396, |
| | | | | | BE746952, BE299333, BF343050, AL040965, |
| | | | | | AI890747, BE262124, BE262749, AW952814, |
| | | | | | AL039282, AW084007, AI911096, BF337955, |
| | | | | | AU158472, BG253868, BF690437, AW270132, |
| | | | | | AU145398, AA531346, BF725565, AI803664, |
| | | | | | AL039531, AW663883, BF980374, AA284526, |
| | | | | | AV704289, AA464099, AV727566, AA725631, |
| | | | | | AA287069, BE313910, AI937483, AA459615, |
| | | | | | AI362056, AW269445, AA994395, AI827109, |
| | | | | | AI963554, AA531242, BF725564, AU145598, |
| | | | | | AV751889, BE047669, BE302399, AA292966, |
| | | | | | BG033996, AA417174, BF036819, AI159963, |
| | | | | | AA575850, AL044057, AI309235, AW268808, |
| | | | | | AA417070, AW581576, H93876, D53731, |
| | | | | | AA703065, H17707, BG004754, AA598746, |
| | | | | | BF878254, AI751892, AI863325, AA699411, H93516, |
| | | | | | AA612854, AA326192, AA608913, H50994, |
| | | | | | H06488, R77015, AW802244, H17796, Z21667, |
| | | | | | D60336, H06546, D53158, AI499464, |
| | | | | | H17089, H03185, H51646, BF843440, R70504, AI751893, |
| | | | | | AW104937, D60587, T15778, AA463962, |
| | | | | | AI698963, BF570178, BE093116, AA367859, |
| | | | | | AW073342, R74223, R70596, BE903088, |
| | | | | | AA339790, AI611402, AA827345, AI872839, AV747217, |
| | | | | | BF207394, T85774, F17581, F22580, |
| | | | | | AA333977, H03985, BF886534, AA459390, AA781915, |
| | | | | | BE041929, AW178545, T91167, AA074564, |
| | | | | | BE075634, T07088, AW273719, BE378883, |
| | | | | | AL529296, BE835059, R67434, AL518827, |
| | | | | | BF216264, AI609819, AW749542, BF830925, |
| | | | | | BE621938, BF834744, AL040408, AW387038, |
| | | | | | BF888401, AA868869, AI287476, AI445862, |
| | | | | | AA742390, AA766077, AI955866, BG164250, |
| | | | | | BC001206.1, BC001098.1, AK025822.1, |
| | | | | | AK021732.1, AK027448.1, AF308473.1, BC000860.1, |
| | | | | | BC005888.1, AK026615.1, AK000618.1, |
| | | | | | BC009360.1, AB049629.1, BC008742.1, AF249267.3, |
| | | | | | BC004265.1, AB048974.1, AB060929.1, |
| | | | | | AK000445.1, AK026894.1, AL133081.1, AK000027.1, |
| | | | | | BC007034.1, BC002415.1, AL161953.1, |
| | | | | | AF078844.1, AF114784.1, BC007556.1. |
| HRADN25 | 180 | 800628 | 1-1211 | 15-1225 | BF970417, BE871509, BF794109, AL526454, |
| | | | | | BE613934, BE905773, BF530960, AI911227, |
| | | | | | BG177658, BF034925, BG108075, BF203211, |
| | | | | | BG180755, BF691907, BF344447, BE781907, |
| | | | | | BE387776, AW149618, BE395988, BE262824, |
| | | | | | BE379253, BF978384, AW025001, AI760168, |
| | | | | | AW082806, BE391375, BF130003, BE139640, |
| | | | | | BE544410, BE909917, BE388549, BE884607, |
| | | | | | BE614181, AW339993, AI752742, BG230765, |
| | | | | | AI700463, AI926722, AA843550, AI936652, |
| | | | | | BF665754, BF698346, BE884217, BG056573, |
| | | | | | AI095901, AI554935, AI138745, AW593083, |
| | | | | | AW958242, BE622189, BF571310, AI693589, |
| | | | | | AW469544, BF883936, AI357218, AI277497, |
| | | | | | AA972697, AI199598, AI241950, AW452978, |
| | | | | | AI830389, AI024270, AA401585, BF886169, |
| | | | | | AA936697, AA931135, AA401345, H64785, |
| | | | | | BF923986, AI206725, AA873221, BE222978, |
| | | | | | BF948219, AA084391, AA988399, AA987748, |
| | | | | | AA838228, AI752743, H50235, AI275531, |
| | | | | | AI362439, AW450568, AI362511, BF842031, |
| | | | | | AA618048, BG024996, BE908231, BE937874, |
| | | | | | H06750, BF841745, H15722, H06700, |
| | | | | | AA937768, AI879499, BE763002, N50809, BF817866, |
| | | | | | AI366339, H64022, H15344, H20386, |
| | | | | | R09749, H18813, H30571, AW363996, AI363966, |
| | | | | | AW083589, AW449564, AA663409, T91307, |
| | | | | | AA025560, Z44943, BF341574, H20195, BF868861, |
| | | | | | AA991841, AA970173, Z40694, T84887, |
| | | | | | AA345553, AA378558, AI963935, AA081540, AA725384, |
| | | | | | R09748, BE966128, AI243967, AA025704, |
| | | | | | R23438, BE561045, BE392574, H40825, BF214147, |
| | | | | | AA885941, BG009780, W96140, BF695813, |
| | | | | | W92486, H41770, H50269, BF928386, AA018786, |
| | | | | | AA580941, AF289485.1, AB055802.1. |
| HRDDQ39 | 181 | 840405 | 1-762 | 15-776 | AA564252, AV763026, AV763058, AI499954, |
| | | | | | AI654738, BF763954, AI066646, AW813668, |
| | | | | | AI537020, AI801505, AI491765, AI251576, |
| | | | | | AW502796, AW272294, AA935409, AI040051, |
| | | | | | AI306232, AA503298, BE062545, AA225406, |
| | | | | | AI583466, AW274191, AI755202, BF771774, |
| | | | | | AW962251, AI635028, AV764259, AC008073.4, |
| | | | | | AC020604.9, U95740.1, AB020867.1, |
| | | | | | AF001552.1, AL049712.12, AC025168.7, AL512347.14, |
| | | | | | AC012469.9, AC007066.4, AC002996.1, |
| | | | | | AP003439.2, AL357752.19, AC073273.9, AC008372.6, |
| | | | | | AP001883.5, AC004973.1, AC013264.4, |
| | | | | | AL163285.2, AC073657.5, AC009516.19, AC012284.5, |
| | | | | | AL031230.1, AC005034.1, AC012476.8, |
| | | | | | AP002815.3, AC011485.6, AL365338.17, AL160397.17, |
| | | | | | AL008635.1, AL158830.17, AL033518.14, |
| | | | | | AC007172.6, AL391065.6, AC005768.17, AC007425.16, |
| | | | | | AL031123.14, AC005911.6, AC090947.1, |
| | | | | | AL157838.24, AL591398.2, AC009756.9, AC009274.9, |
| | | | | | AC006600.4, AC007748.2, AF312915.1, |
| | | | | | Z99716.4, AC008733.7, Z83822.1, AC004675.1, |
| | | | | | AL121753.30, AL121754.18, AL109804.41, |
| | | | | | AC006511.5, AC005157.1, AL133324.13, AC006480.3, |
| | | | | | AL080243.21, AF088219.1, AC004887.2, |
| | | | | | AL139353.3, AC002563.1, AC006435.7, AC005081.3, |
| | | | | | AL160236.4, AC005859.1, AC010651.7, |
| | | | | | AC022414.6, AC025679.4, AP001752.1, AL442167.1, |
| | | | | | AC018738.4, AL031685.18, AL352978.6, |
| | | | | | AC025262.27, AP000557.2, AC012320.6, AL133229.40, |
| | | | | | AL031311.1, AC008440.8, AC003962.1, |
| | | | | | AL034372.33, AL133295.16, Z93020.1, AC004209.1, |
| | | | | | AL078581.11, AC010654.8, AC007226.3, |
| | | | | | AL356503.18, AP001922.4, AC010789.9, AC018690.5, |
| | | | | | AF168787.1, AL080314.29, AC011510.7, |
| | | | | | AE000658.1, AL160492.5, AL133244.1, AL117380.28, |
| | | | | | AL161629.10, AC010320.9, AC002546.1, |
| | | | | | AP000692.1, AC011742.3, AC008720.6, AC005023.1, |
| | | | | | AC025588.1, AC004584.1, AC004848.1, |
| | | | | | AP001725.1, AF019413.1, AC005013.1, AC011443.6, |
| | | | | | AL121899.37, AC006449.19, AP001694.1, |
| | | | | | AL359682.4, AL109825.23, AC034240.4, AP000355.1, |
| | | | | | AC011473.4, AC008569.6, AC009570.13, |
| | | | | | AC007381.3, AL365295.4, U91321.1, AC007363.3, |
| | | | | | AC009502.4, AL157882.5, AC006130.1, |
| | | | | | AL445201.14, AL137061.12, AL135818.3, AD000092.1, |
| | | | | | AL121578.1, AL035404.20, AP000513.1, |
| | | | | | AC069548.4, U91323.1, AC008507.8, AC005747.1, |
| | | | | | AC005071.2, AC009503.3, AL121653.2, |
| | | | | | AL359644.10, AL031622.1, AL031659.9, AC004526.1, |
| | | | | | AC010102.3, AC006270.1, AC021752.5, |
| | | | | | AC068319.4, AF031078.1, AP003357.2, AC008511.6, |
| | | | | | AC078846.2, AL445184.11, AC009275.6, |
| | | | | | AC009194.8, AF030876.1, AC018663.3, Z84474.1, |
| | | | | | AC008556.5, AC002350.1, AC010543.8, |
| | | | | | AC003108.1, AC007276.3, AJ003147.1, AC008764.7, |
| | | | | | AC015982.9, AL049830.3, AF003529.1, |
| | | | | | AL080239.11, AC020931.5, AC004125.1, AL391827.18, |
| | | | | | AC010150.3, AC005043.2, AL137222.17, |
| | | | | | AC011005.7, AC020750.3, AC004859.2, AP000356.1, |
| | | | | | AF001549.1, Z94801.1, AC005914.1, |
| | | | | | AL133342.14, AC007308.13, AL355836.3, AC009953.4, |
| | | | | | AC005138.1, AC008493.4, AC006116.1, |
| | | | | | AP001052.1, AL122001.32, AL139100.9, AP001732.1, |
| | | | | | AC009137.6, AL035450.1, AC003037.1, |
| | | | | | AC006042.2, Z84484.1, AC004089.25, AL357519.19, |
| | | | | | AC002312.1, AC026368.37, AL449223.7, |
| | | | | | AL359695.6, AL022159.1, AC009955.4, AF279660.2, |
| | | | | | AC008616.6, AL139230.25, AC005952.1, |
| | | | | | AC006443.1, AL121586.31, AC008551.5, AL035367.5, |
| | | | | | AL133245.2, AL354720.14, AC005740.1, |
| | | | | | AC023114.5, AC007318.4, AC090951.1, AC066597.4, |
| | | | | | AC003049.1, AC008821.5, AL162571.9, |
| | | | | | AC019171.4, AL136162.17, AC022083.6. |
| HRDER22 | 182 | 688056 | 1-529 | 15-543 | BF727044, AI748813, AI694426, AU148346, |
| | | | | | AI860331, AW206751, H19708, AI368623, |
| | | | | | BF685348, BF061078, C15772, AW973165, |
| | | | | | F22520, F29231, F36814, H67240, AA550873, |
| | | | | | AI871877, AI003318, AA883557, H81558, |
| | | | | | H20045, AA609021, AI679361, BF683664, AI216706, |
| | | | | | AW079340, D61490, AI867271, C01198, |
| | | | | | BF946359, AI215944, F18487, AA970129, BC003585.1, |
| | | | | | AK001252.2. |
| HRDEX93 | 183 | 816046 | 1-1667 | 15-1681 | AL527900, AL529036, AL529408, AL533906, |
| | | | | | AL533907, AL529035, AL527941, BE903615, |
| | | | | | BE791071, BG166982, BE299248, BE793113, |
| | | | | | BE909498, BF205960, BE900230, BF663336, |
| | | | | | BE900477, AU138677, BF317122, BE902376, |
| | | | | | BG105338, AL046917, BG248168, BE387420, |
| | | | | | AU128036, BF796169, BF674884, BE734698, |
| | | | | | AW247351, AW245938, BG122744, BF794696, |
| | | | | | AI832791, AU139448, BE295651, AI310124, |
| | | | | | AW674400, AI792211, AW515975, BE265061, |
| | | | | | AW245495, AW675728, BE394504, AA226400, |
| | | | | | AA569956, BE300693, AW388658, AU150370, |
| | | | | | AI890679, AW402628, AL527942, AI962952, |
| | | | | | AI221330, AI245352, AI601125, AW469172, |
| | | | | | BF957886, W80352, AW188512, AW405360, |
| | | | | | AI215909, AI564190, AI208267, AA533187, |
| | | | | | AA633700, N95345, AA431700, AA311285, |
| | | | | | AA643585, AI865794, BF221803, W26197, BF241479, |
| | | | | | N90770, AA040058, BE251149, AW512882, |
| | | | | | AA031577, N30739, AI890616, AA349670, |
| | | | | | AA994951, AI372503, N59649, H91459, |
| | | | | | AW731826, AW672782, BE265966, BF807476, |
| | | | | | AA554209, BF802350, AA226371, AA737167, |
| | | | | | AW592984, BF802840, AA349671, H72140, |
| | | | | | AW006451, AA176708, AA037422, BF807473, |
| | | | | | AI352253, AA972235, AW934951, AI905350, |
| | | | | | AU158023, T95955, AI733502, AA229521, |
| | | | | | AA226888, T95961, AA226924, AA323327, BF767741, |
| | | | | | BF371957, W67484, BE767129, AW247493, |
| | | | | | T95866, T95860, AL046918, AI148858, AA876362, |
| | | | | | AA216424, AA936123, BF240778, BF476991, |
| | | | | | H13591, AA813410, AA173027, C03952, |
| | | | | | AA641404, N78203, AA865022, AA876167, |
| | | | | | AI879823, AW518440, BE303017, AI015568, H26512, |
| | | | | | AI784024, AA040044, W25254, AA431493, |
| | | | | | AA031456, AI275659, AW513500, AA861578, |
| | | | | | H54187, N35164, BE770665, R77485, |
| | | | | | AW088915, AA384005, AA470650, H13222, BF767990, |
| | | | | | BE241964, R38117, AA368017, W80351, |
| | | | | | AA336001, BE872227, AA054613, H91107, BE546333, |
| | | | | | AA054553, BE171388, AI378983, R69693, |
| | | | | | R38031, W21999, AW749739, AI364635, AI961834, |
| | | | | | BE242695, AA303798, R57459, AA994783, |
| | | | | | AW958926, AB026628.1, AB018357.1, BC002773.1, |
| | | | | | AK001420.1. |
| HRDFK37 | 184 | 840381 | 1-714 | 15-728 | BG107419, AA210943, W77904, AA729879, |
| | | | | | N27422, BE833271, BE833267, BE698411, |
| | | | | | BE698282, AA116105, W72144, AA460896, |
| | | | | | AA460724, D19856, AA116106, BF911568, T74524, |
| | | | | | AA664126, BF830998, AA658018, BF747320, |
| | | | | | AA568853, BG015078, N66744, BF346026, |
| | | | | | BE090515, H85032, AW902135, AW902110, |
| | | | | | H86546, AA059247, AI627868, C16358, AA017169, |
| | | | | | BE090514, AI224184, W38349, AU147414, |
| | | | | | BF800607, AA016279, AA507035, AL035413.19, |
| | | | | | AL033529.25, AC011449.6, AL359091.10, AC020913.6, |
| | | | | | AC008379.6, U91321.1, AL354720.14, |
| | | | | | AC023510.16, AL357559.16, AC002404.1, AL445222.9, |
| | | | | | AC011895.4, AL034422.24, AC007620.30, |
| | | | | | AC004867.5, AL391839.9, AL359092.14, AC004983.2, |
| | | | | | AL031427.15, AC003029.2, AL132775.29, |
| | | | | | AC007193.1, AP001711.1, AL034429.1, AL136526.27, |
| | | | | | AC020904.6, Z93015.9, AC004686.1, |
| | | | | | AL079342.17, AC008946.6, AC022383.3, AC008755.6, |
| | | | | | AC008687.4, AC005972.1, AL034548.25, |
| | | | | | AC009123.6, AL390241.19, AC000379.1, AC021325.5, |
| | | | | | AC006312.8, AL137139.9, AC073138.3, |
| | | | | | AL138720.19, AP001753.1, AL512430.14, AL118520.26, |
| | | | | | AC005516.1, AL355336.15, AC006480.3, |
| | | | | | AC005800.1, AC005921.3, AC004622.1, AC008551.5, |
| | | | | | AC010271.6, AC024082.6, AF196779.1, |
| | | | | | AC002312.1, AP000997.1, AL035249.6, AL590762.1, |
| | | | | | AC005081.3, AL359813.23, AL121656.2, |
| | | | | | AC005015.2, AC010092.4, AC009812.17, AL136441.16, |
| | | | | | AC012170.6, AL022311.5, AC022384.4, |
| | | | | | AC008171.3, AF283320.1, AL021154.1, AC005071.2, |
| | | | | | AP000424.3, AC008397.7, AC020928.6, |
| | | | | | AC008132.35, AC007151.2, AL121983.13, AJ277546.2, |
| | | | | | AF129756.1, AL121897.32, AC004963.2, |
| | | | | | AC005670.1, AC005585.1, AC083871.2, AC011811.42, |
| | | | | | AL109804.41, AC087071.2, AC008491.6, |
| | | | | | AL591398.2, AC005098.2, AC007384.3, AP000030.1, |
| | | | | | AL391136.9, AC005887.3, AC005952.1, |
| | | | | | AC002430.1, AC018809.4, AC011462.4, AC027125.4, |
| | | | | | AL121890.34, AL137802.7, AC018828.3, |
| | | | | | AC008403.6, AC006111.3, AC004125.1, AC018663.3, |
| | | | | | AC025588.1, AC005089.2, AC008543.7, |
| | | | | | AC004820.2, AC009131.6, AC034207.4, AC019227.4, |
| | | | | | AC022007.3, AC004216.1, AC005326.1, |
| | | | | | Z95114.19, AC021999.4, AC005519.3, AC004966.2, |
| | | | | | AL390298.13, AC020983.7, AC010543.8, |
| | | | | | AC034193.4, AC008155.9, AC005529.7, AL355312.24, |
| | | | | | AL135978.4, AL034346.31, AL023553.5, |
| | | | | | AC007664.12, AC006120.1, AC020728.4, AL049766.14, |
| | | | | | AC007066.4, AC005736.1, AC011718.2, |
| | | | | | AC011484.4, AC069285.8, AC002350.1, AC011455.6, |
| | | | | | AC018808.4, U07562.1, AC009362.8, |
| | | | | | AC008569.6, AL022165.1, AC020754.4, AC004087.1, |
| | | | | | AL121834.20, AC005488.2, AC020716.3, |
| | | | | | AL136137.15, AL136303.15, AC006946.20, AP002812.3, |
| | | | | | AC005914.1, AC090954.1, AC026776.4, |
| | | | | | AP000514.1, AE006463.1, U52111.2, AP001169.1, |
| | | | | | AC009247.12, AL031311.1, AC004644.1, |
| | | | | | AC083867.4, AC009137.6, AC002310.1, AL031228.1, |
| | | | | | AC018500.3, AC002565.1, AL133312.3, |
| | | | | | AC004821.3, AL022336.1, AL138688.27, AC005184.1, |
| | | | | | AL023807.6, AC002470.17, AL049636.22, |
| | | | | | AL021453.1. |
| HRTAP63 | 185 | 780698 | 1-2562 | 15-2576 | AL530903, BF980210, AV713636, AV714538, |
| | | | | | BF795697, BG165908, BG034785, AW954212, |
| | | | | | AA476834, AA454040, BE787658, W87846, |
| | | | | | W95796, AV723163, AA210879, BG121323, |
| | | | | | AI140750, AA394298, BE544064, BF110177, |
| | | | | | BG260733, AW957532, AW835225, AV715167, |
| | | | | | AW043868, W95753, BE675523, AI830085, |
| | | | | | AV684273, BF669098, AW575257, AI719282, |
| | | | | | AW402599, AA594596, BF030937, AV751996, |
| | | | | | AA151651, BF439829, AI972457, AA203350, |
| | | | | | AW835231, AV698320, AW835223, BF195333, |
| | | | | | BF245739, AI458367, BF217997, AW103450, |
| | | | | | AV646999, AA443779, AI804705, AA779750, |
| | | | | | AA609993, AV646707, AI161426, AA883267, |
| | | | | | AV761220, AW105020, AI859827, N21490, |
| | | | | | AA769659, AI961457, AI963269, AV748401, |
| | | | | | AV702852, AA454948, BF477944, BE378300, |
| | | | | | BF507584, AA398140, AA829928, AA723665, |
| | | | | | AA152423, AI066682, C05924, AI342144, |
| | | | | | AI818909, AI949342, AW173168, H95180, AI150177, |
| | | | | | AI744274, AI373130, AI936317, BF131934, |
| | | | | | AW935736, AI373127, BF184877, AW848815, |
| | | | | | AI168246, AW630390, AA703773, AI809600, |
| | | | | | AI858227, AI620702, BF211545, AA453622, |
| | | | | | AW511827, BE550555, BF352641, AI811412, |
| | | | | | BF216016, AI149376, BF028661, AA777078, |
| | | | | | AA988774, AA825373, AA745603, AA447847, |
| | | | | | AI634257, AI148253, BE568959, AW474847, |
| | | | | | H50762, AW340117, AI148595, AA152318, |
| | | | | | AA455325, H18773, AA446817, AI983483, N70494, |
| | | | | | AI950667, AI367305, AA447696, AA165032, |
| | | | | | BF349702, AA595127, W37577, AI865137, W60533, |
| | | | | | H27027, AI088311, AA781728, BE244882, |
| | | | | | AA411860, AI380799, BF130302, AI927370, |
| | | | | | AA150348, AW876985, R96314, AV726405, |
| | | | | | AA729374, W32295, AA448492, AI453093, |
| | | | | | AW769995, W04863, AI263830, AA083837, |
| | | | | | AA133757, AV734814, H24217, BE564563, N99875, |
| | | | | | N77905, AA679441, AI352336, AI188487, |
| | | | | | AI432136, AA033645, AI266690, AI433965, AA877077, |
| | | | | | AA055324, W44808, H49413, AA411995, |
| | | | | | AA833544, AI300087, BE972332, AV682350, |
| | | | | | AA992809, AA814064, AA741027, AV702746, |
| | | | | | W32538, AA683291, AA621431, AA902136, |
| | | | | | AA214623, AV647110, AA663647, AA494354, |
| | | | | | BE245415, AW151578, AW150662, W60562, |
| | | | | | AA705000, AI950580, N27003, AA345942, |
| | | | | | H85708, AA133758, AI627657, AA224004, W37452, |
| | | | | | T80362, AA452695, AI146286, H49227, |
| | | | | | AW074691, BG142207, H47030, F25806, H85509, |
| | | | | | BE244420, C17218, H24204, AA480190, |
| | | | | | AV651579, AI272131, T80478, AI381311, W87586, |
| | | | | | W37696, H18682, H24218, AV647065, |
| | | | | | N29206, N28458, AW468405, BF081529, W44802, |
| | | | | | AA927134, AW821055, BF854323, AA083939, |
| | | | | | F35729, AA682763, R31829, AA148436, |
| | | | | | AA125918, H95144, BE246322, W44717, |
| | | | | | AW194993, AA729762, H50669, AA343940, BE244987, |
| | | | | | AA115539, R26021, N35260, H46491, |
| | | | | | AI902181, AI149536, R37220, AA325890, AF151885.1, |
| | | | | | AK025730.1, BC000836.1, AF135161.1, AB062991.1, |
| | | | | | AC007298.17, AF172940.1, AC022149.3, |
| | | | | | R26823, R38842, H88357, H88417, |
| | | | | | H88357, N40125, W05840, W25309, W32702, AA027857, |
| | | | | | AA027923, AA034476, AA115050, AA151732. |
| HSAVA08 | 186 | 580870 | 1-1047 | 15-1061 | AA523633, BE562634, AI828787, AC008738.6, |
| | | | | | AC005722.1, AC020908.6, AC090942.1, |
| | | | | | AL035685.21, AL049843.18, AC027124.4, AC005089.2, |
| | | | | | AC084865.2, AC002465.1, AC034251.5, |
| | | | | | AC022211.5, AL050335.32, AC009123.6, AC005320.1, |
| | | | | | AC002365.1, U91323.1, AJ251973.1, |
| | | | | | Z95115.1, AL359792.3, AL133545.10, AC011444.5, |
| | | | | | Z95152.1, AC002378.1, AL139352.16, |
| | | | | | AL122035.6, AC006160.9, AL109825.23, AC005015.2, |
| | | | | | AL162430.15, AL033526.24, AP000697.1, |
| | | | | | AC005328.1, AC007907.2, AL353653.19, AC010463.6, |
| | | | | | AC007637.9, AL161779.32, AC008755.6, |
| | | | | | AC018644.6, AC002996.1, AP001712.1, AC005756.1, |
| | | | | | AC010363.6, AC005225.2, AC002544.1, |
| | | | | | AC002470.17, AC003684.1, AC011480.3, AC007277.2, |
| | | | | | AC010878.4, AC011491.5, AL022394.3, |
| | | | | | AC068799.14, AL137918.4, AP001726.1, AC006130.1, |
| | | | | | AL138827.16, AC073864.28, AL034420.16. |
| HSAVW42 | 187 | 637660 | 1-581 | 15-595 | AI336192, AI911235, BE644656, AI459354, |
| | | | | | BF030919, AI333569, AA652155, AW974708, |
| | | | | | AI700779, AA932386, AI922689, AI888953, |
| | | | | | AA848053, AI863382, AI932794, AI554821, |
| | | | | | AI539687, AW081231, AI587156, AW189415, |
| | | | | | AI610362, AA225339, AI934011, AI498067, |
| | | | | | AW168373, BG031338, AI280732, AI590423, |
| | | | | | AI590686, BF724894, BG036614, AV709522, |
| | | | | | AI242251, AV756150, AI890907, AI687065, |
| | | | | | AV682074, AI583065, AI472536, BF811793, |
| | | | | | BF812960, AW167222, AI636588, AI249946, |
| | | | | | BF970652, AW169234, AI431909, AI610115, |
| | | | | | BF981148, AI635016, AI874243, BF970768, |
| | | | | | BF727034, AI798351, AI580254, AI627988, |
| | | | | | AL037582, AL037602, AW022682, AI916419, |
| | | | | | AI872804, AW072719, AW151714, AI613038, |
| | | | | | AI470293, AV704962, AI588892, BF725644, |
| | | | | | BE965169, AV757161, AA470491, AW172723, |
| | | | | | AI281867, AL514791, AW983783, AI802542, |
| | | | | | AV682875, BG256090, AA502794, AI758437, |
| | | | | | AI609409, AI798456, AI345551, AI628833, |
| | | | | | AI590830, AI560683, AW198090, BG108070, |
| | | | | | AV733470, AI591407, AW090071, AI335426, |
| | | | | | AI348777, AI521244, AW983832, AI955906, |
| | | | | | AI288050, BE963244, AW084117, BE546262, |
| | | | | | BE783819, AL514627, AI274541, AI274745, |
| | | | | | AW059713, AI612913, AI493576, BG165979, |
| | | | | | BF726207, AW268302, BF033757, BG001235, |
| | | | | | AW104196, AI538764, AW983754, AI633125, |
| | | | | | BF726237, R36271, AL042628, AI539771, |
| | | | | | BG108268, BF528717, BF970263, BE621472, |
| | | | | | AI680498, AI269696, AV714710, AI655841, |
| | | | | | AA910956, AI890223, AI921281, AW169039, |
| | | | | | AI686073, AI583085, AV682224, AW162189, |
| | | | | | AW105601, AV648430, AV714100, AI567612, |
| | | | | | AI697372, AI702073, AW827227, BG179993, |
| | | | | | AI866082, BE018334, BG114304, AI633000, |
| | | | | | BG112239, AI950664, AL039086, AL046849, |
| | | | | | AI816947, AW302954, AV734180, AL036980, |
| | | | | | AV682791, AW169604, AI249877, AW082088, |
| | | | | | AL041105, AI866770, AI887772, AA427700, |
| | | | | | AI376180, AW002174, AW089179, BG036846, |
| | | | | | BE966927, AA807352, AI241923, AW167918, |
| | | | | | AV755589, AI864836, BE892503, AI621362, |
| | | | | | AL048323, AL040827, AI570807, AI634345, |
| | | | | | AL048340, BE785868, AI608932, BE910373, |
| | | | | | AI537677, AI879064, AW081255, AI738854, |
| | | | | | AI956080, AL080046, AI440263, AI862135, |
| | | | | | AI690748, AI865906, BG180295, BF868489, |
| | | | | | AA833760, BG108309, AI537261, BF342157, |
| | | | | | BF764528, AI866083, AI623941, AI922315, |
| | | | | | AI433157, AI870192, AI597731, AA641818, |
| | | | | | AW198112, AI637584, AI440239, AI345677, |
| | | | | | AW151729, BF753013, BF924882, AW004886, |
| | | | | | AW079336, AW983691, BF762612, AI520785, |
| | | | | | AL119863, BF344691, AW022699, BF814357, |
| | | | | | AI580694, AI923989, AI499986, BF343568, |
| | | | | | AW169848, AI627893, AI572717, AV715462, |
| | | | | | AW301513, AW081298, AA572758, BG109590, |
| | | | | | AW089310, AI554344, BF752999, BF968017, |
| | | | | | AW079859, AV656595, BF925729, BG252914, |
| | | | | | AW301505, AI620093, AW088538, AI538850, |
| | | | | | AW163834, AL036403, AL389939.1, BC005678.1, |
| | | | | | AB062942.1, BC008485.1, AK000432.1, |
| | | | | | AF000145.1, AB047904.1, AL359618.1, AK024538.1, |
| | | | | | AL133067.1, AL049452.1, AK025798.1, |
| | | | | | AL389982.1, AK025857.1, AL136844.1, AK027213.1, |
| | | | | | AB050410.1, AL137476.1, AL122110.1, |
| | | | | | AL137550.1, AK027182.1, AF090901.1, AK026057.1, |
| | | | | | AL137648.1, AL137488.1, BC008893.1, |
| | | | | | AL049382.1, AL512733.1, AB048974.1, AL136747.1, |
| | | | | | U38847.1, AF230496.1, AF183393.1, |
| | | | | | AF090900.1, BC006525.1, AL137533.1, AK026532.1, |
| | | | | | AK025092.1, AF159615.1, S78214.1, |
| | | | | | S61953.1, AK000614.1, AK026480.1, AL117578.1, |
| | | | | | AL023657.1, AF061943.1, X72889.1, |
| | | | | | AL389935.1, AJ299431.1, AF143723.1, U58996.2, |
| | | | | | AL133557.1, AF056191.1, AF081197.1, |
| | | | | | AL122123.1, Y16645.1, AK000083.1, AF057300.1, |
| | | | | | AF057299.1, AL162083.1, AL122049.1, |
| | | | | | AL137526.1, AB063070.1, AL080159.1, AL137560.1, |
| | | | | | BC006103.1, AL117460.1, AL080074.1, |
| | | | | | AK027160.1, AK026592.1, AK000418.1, AF090943.1, |
| | | | | | AL359583.1, AF217987.1, AB056420.1, |
| | | | | | AJ242859.1, AL136749.1, AL110171.1, BC008382.1, |
| | | | | | AL137640.1, Y10936.1, AL137271.1, |
| | | | | | BC008075.1, AK027204.1, AF113222.1, BC004958.1, |
| | | | | | AL359601.1, AL583915.1, AL133606.1, |
| | | | | | AK026593.1, AL050366.1, AK000718.1, AF162270.1, |
| | | | | | AF026816.2, AK026642.1, Y10080.1, |
| | | | | | AK026784.1, AB055368.1, AL117435.1, BC008780.1, |
| | | | | | AF217966.1, BC006440.1, AB047801.1, |
| | | | | | AL137529.1, BC007680.1, AK027614.1, AK000486.1, |
| | | | | | AL080148.1, AK026600.1, AL136805.1, |
| | | | | | X98834.1, AB049892.1, AL080086.1, BC008488.1, |
| | | | | | BC003627.1, AK000618.1, AL122050.1, |
| | | | | | BC009310.1, AL110197.1, AB060908.1, AL136789.1, |
| | | | | | AF090903.1, AL157482.1, AL512765.1, |
| | | | | | AK000450.1, AL137273.1, AL136845.1, AL133113.1, |
| | | | | | AL137292.1, AK027116.1, AF285167.1, |
| | | | | | AB019565.1, AL512719.1, AL359941.1, AK026533.1, |
| | | | | | BC009026.1, AL136622.1, AL136615.1, |
| | | | | | AK026045.1, AF225424.1, AL122106.1, AB056421.1, |
| | | | | | AK025084.1, AK025209.1, AK026741.1, |
| | | | | | AK027144.1, AK025708.1, AL442072.1, AL117440.1, |
| | | | | | AL122093.1, AB062978.1, AL137294.1, |
| | | | | | AK026542.1, AF061573.2, AK025383.1, AL162004.1, |
| | | | | | AK026534.1, AL162002.1, AB060912.1, |
| | | | | | AF090934.1, AL512718.1, AB048964.1, AB050418.1, |
| | | | | | AL512761.1, BC004951.1, AF210052.1, |
| | | | | | AB048954.1, AK026630.1, AB063084.1, AL133665.1, |
| | | | | | AL133075.1, AL049465.1, AF061795.1, |
| | | | | | AF151685.1, AK025254.1, BC007198.1, AL157431.1, |
| | | | | | AL137527.1, BC003122.1, AY033593.1, |
| | | | | | AL136882.1, AF207829.1, AF081195.1, X53587.1, |
| | | | | | AL137276.1, AF271350.1, BC006164.1, |
| | | | | | U39656.1, AB063008.1, AB050534.1, BC005890.1, |
| | | | | | AL353957.1, AF177336.1, AK026885.1, |
| | | | | | L30117.1, AB060903.1, AB060825.1, AB056809.1, |
| | | | | | AF262032.1, AL359620.1, AK026551.1, |
| | | | | | AL050393.1, BC007021.1, S76508.1, BC008983.1, |
| | | | | | BC008387.1, AK027114.1, L19437.2, |
| | | | | | AK026504.1, BC008070.1, AK025967.1, AK026528.1, |
| | | | | | BC008284.1, AL136786.1, AL117585.1, |
| | | | | | U68233.1, AL110221.1, AL162062.1, AL050116.1, |
| | | | | | AL096744.1, AL133077.1, AL110225.1, |
| | | | | | BC006807.1, AL050138.1, AJ006417.1, AF106862.1, |
| | | | | | AL136790.1, BC009341.1, AK026408.1, |
| | | | | | AL137429.1, BC009033.1, M64349.1, AF097996.1, |
| | | | | | AL389978.1, Z82022.1, BC006180.1, |
| | | | | | AB060929.1, AL136843.1, AL133016.1, BC003684.1, |
| | | | | | AF125948.1, AF090896.1, AB056768.1, |
| | | | | | AB060214.1, AL117432.1, AL110222.1, AL137521.1, |
| | | | | | AL137300.1, AL080060.1. |
| HSAYC41 | 188 | 688057 | 1-200 | 15-214 | AF001545, AA548754, AA909788, AW468262, |
| | | | | | AI751080, AI251827, AA576709, AI800743, |
| | | | | | AA875953, AW131183, AW149412, AW339554, |
| | | | | | AI263391, AW168132, BE300485, AI638563, |
| | | | | | AI920829, AI751079, AV700614, AI682030, |
| | | | | | BF688845, AA665727, BC008593.1, AC000159.6, |
| | | | | | AB007864.1. |
| HSDZM54 | 189 | 637870 | 1-540 | 15-554 | AV729255, AI535959, AV726938, AV701879, |
| | | | | | AV729339, AV654282, AV725709, AV705433, |
| | | | | | AV702947, AV691890, AV662257, AV705443, |
| | | | | | AV706584, AV725529, AV728243, AI557222, |
| | | | | | AV726503, AV709039, AV692176, AV758197, |
| | | | | | BF942332, BG222560, BG222322, AV738071, |
| | | | | | AA469321, BE880733, AV717185, BE881230, |
| | | | | | BE879882, BE875275, BE876183, AI064816, |
| | | | | | BE877078, AA467922, AV724819, BE877083, |
| | | | | | BE877146, AL047841, AV653804, AV707611, |
| | | | | | AA468250, AA467983, AA467864, BE874475, |
| | | | | | AA657843, AA467872, BG223149, BG231240, |
| | | | | | AV727472, BE878467, AA533928, AV756682, |
| | | | | | BF942071, AV759063, AW128905, AV759547, |
| | | | | | AV721822, AI535873, AV757055, AV715748, |
| | | | | | BE878136, BE878027, BE878818, BE873792, |
| | | | | | AV721050, AI207666, AI065052, AV762317, |
| | | | | | AV742528, AV759381, BE876648, BE877183, |
| | | | | | BE875306, AI207671, AV742491, BE876813, |
| | | | | | AV722499, BG230797, BE874917, AA468002, |
| | | | | | BE874492, AI557473, AA467862, AA468434, |
| | | | | | AW277108, AA468184, AA467920, AA467928, |
| | | | | | AI374100, AA467967, AA468143, AA468361, |
| | | | | | AI114862, AW070665, AA468920, BF680264, |
| | | | | | C16929, BE714703, AV695014, AI720411, |
| | | | | | AA468467, AW243938, AV705090, AA468095, |
| | | | | | BE896904, AV754426, AI065071, C17062, |
| | | | | | AW265193, AA094361, BG223154, AA652499, |
| | | | | | AA468996, AW129315, AI698669, BE153318, |
| | | | | | AI951338, AA654934, C17215, AA468176, |
| | | | | | BG231144, AA602107, BG231135, AA729610, |
| | | | | | AA226446, C17433, AA541818, AA550877, |
| | | | | | AI033651, AI799863, AA541815, C18736, |
| | | | | | AA467968, AA574306, AI022799, AA508188, |
| | | | | | BF942136, AA513120, AA535933, AI460289, |
| | | | | | AV745072, AV653812, AA781850, BE044950, |
| | | | | | AI287963, C18396, AA652954, AI926958, |
| | | | | | AI796602, AA978151, AW872525, AA420618, |
| | | | | | AA569429, AI749178, AI581768, AI735781, |
| | | | | | AI718674, AI418640, AA468004, BG231064, |
| | | | | | AJ202491, AA579481, AV711061, AI634214, |
| | | | | | AA480424, AA978149, AI092988, AA564192, |
| | | | | | AA658047, AV712864, BE879318, AA494138, |
| | | | | | BE168579, AA934542, AA724186, AA550867, |
| | | | | | AA468511, AW235024, AA535848, AA533509, |
| | | | | | AA527093, AA613771, AA513599, AA247586, |
| | | | | | AV729805, AW237889, AA548217, AA724187, |
| | | | | | AI735751, AA938056, AA658218, AI626072, |
| | | | | | AI749551, AA230233, AA548923, AW440526, |
| | | | | | BG231142, AA978154, AI708944, AA641087, |
| | | | | | AI707532, AV744874, BE879020, AA664671, |
| | | | | | AA654470, AA527020, AA558381, AA468395, |
| | | | | | AA494234, AA468981, AA641600, AA468310, |
| | | | | | BE174413, AA658970, AA687521, AI880361, |
| | | | | | AA484530, AI031693, AA742862, AA551840, |
| | | | | | AI749568, AI078862, AA652909, AA938041, |
| | | | | | AA664938, AA516238, AW235484, BG230835, |
| | | | | | AA657450, AV739800, AA513215, AI832319, |
| | | | | | C17475, AA572851, AA477483, AI535874, |
| | | | | | AI581596, AA508180, AA788847, AA588245, |
| | | | | | AA094820, AW265092, BE878632, AI081273, |
| | | | | | AW264966, AW265056, AV701496, AA854696, |
| | | | | | AI719891, AF004342.1, X62996.1, AB055387.1, |
| | | | | | D38112.1, AF346998.1, AF347001.1, AF346999.1, |
| | | | | | AF347011.1, AF347013.1, AF346967.1, AF346971.1, |
| | | | | | AF346975.1, AF346985.1, AF346986.1, |
| | | | | | AF347009.1, AF347012.1, AF347014.1, AF346989.1, |
| | | | | | AF347006.1, J01415.1, V00662.1, |
| | | | | | AF346966.1, AF346978.1, AF346979.1, AF346982.1, |
| | | | | | AF346983.1, AF346988.1, AF346990.1, |
| | | | | | AF346994.1, AF347008.1, X93334.1, AF346970.1, |
| | | | | | AF346972.1, AF346981.1, AF346984.1, |
| | | | | | AF346991.1, AF347010.1, AF347015.1, AF346964.1, |
| | | | | | AF346965.1, AF346993.1, AF347007.1, |
| | | | | | AF346987.1, AF346996.1, AF346968.1, AF346969.1, |
| | | | | | AF346997.1, AF346995.1, AF346963.1, |
| | | | | | AF346977.1, AF347000.1, AF346973.1, AF346976.1, |
| | | | | | AF346980.1, AF347003.1, AF346974.1, |
| | | | | | AF346992.1, AF347004.1, AF347005.1, AF347002.1, |
| | | | | | D38113.1, X93335.1, AF271371.1, L27636.1, |
| | | | | | D34614.1, L27601.1, AB017116.1, X67155.2, |
| | | | | | L27600.1, S78798.1, D88547.1, X92518.1, D14548.1, |
| | | | | | AF058696.1, AB028859.1, AJ244003.1, AJ244004.1, |
| | | | | | AJ244005.1, X73004.1, AC007993.15, |
| | | | | | Z96142.1, BC007712.1, Y11923.1, AB002449.1, |
| | | | | | Y11926.1, AB033111.1, X73003.1. |
| HSHBF76 | 190 | 715838 | 1-1259 | 15-1273 | AI198543, AW027453, BF569035, BF062076, |
| | | | | | BF056301, AI694380, AW771566, AI950836, |
| | | | | | AI769655, AI800526, AI765069, BE552071, |
| | | | | | AA708811, BE645418, BF983434, AW514312, |
| | | | | | BE870149, AI804763, AI193044, AI273413, |
| | | | | | BE840116, AW504874, AA156450, BF568737, |
| | | | | | AA678373, AW369915, AW071657, BG150349, |
| | | | | | AA143141, AW369859, AW369914, AW369917, |
| | | | | | N45126, AI143564, AW196425, AW369906, |
| | | | | | AA026661, AA147579, AI248731, AW176312, |
| | | | | | BE857715, AW378548, BE840067, BE840065, |
| | | | | | AW369858, W70056, R68010, C15009, AW960647, |
| | | | | | AA564420, AA534504, AW516592, BE696667, |
| | | | | | AW168286, AW027279, W70183, BF334843, |
| | | | | | AW631008, T49357, AI248547, AI909950, |
| | | | | | R68011, BF115265, AW369857, C15008, BF847503, |
| | | | | | AW316856, AA368406, BF054931, T24692, |
| | | | | | AI653377, AI762291, AA503862, C15912, AA143381, |
| | | | | | AW316788, AI891034, R73287, D80781, |
| | | | | | AI688643, AA370097, BF351644, W57620, BE502165, |
| | | | | | AW627705, BF513704, AI418942, AI767449, |
| | | | | | AA427668, BE673340, AI342555, AW748211, |
| | | | | | AI682534, AA513358, AA026709, AA333744, |
| | | | | | AI333618, BF939494, AI660050, AI291907, |
| | | | | | AI906801, AI906791, BC008335.1, AC009000.6, |
| | | | | | AC011472.7. |

Description of Table 4

[0166] Table 4 provides a key to the tissue/cell source identifier code disclosed in Table 1B 0.2, column 8. Column 1 provides the tissue/cell source identifier code disclosed in Table 1B.2, Column 8. Columns 2-5 provide a description of the tissue or cell source. Note that “Description” and “Tissue” sources (i.e. columns 2 and 3) having the prefix “a_” indicates organs, tissues, or cells derived from “adult” sources. Codes corresponding to diseased tissues are indicated in column 6 with the word “disease.” The use of the word “disease” in column 6 is non-limiting. The tissue or cell source may be specific (e.g. a neoplasm), or may be disease-associated (e.g., a tissue sample from a normal portion of a diseased organ). Furthermore, tissues and/or cells lacking the “disease” designation may still be derived from sources directly or indirectly involved in a disease state or disorder, and therefore may have a further utility in that disease state or disorder. In numerous cases where the tissue/cell source is a library, column 7 identifies the vector used to generate the library.

TABLE 4

| Code | Description | Tissue | Organ | Cell Line | Disease | Vector |
|---|---|---|---|---|---|---|
| AR022 | a_Heart | a_Heart | | | | |
| AR023 | a_Liver | a_Liver | | | | |
| AR024 | a_mammary gland | a_mammary gland | | | | |
| AR025 | a_Prostate | a_Prostate | | | | |
| AR026 | a_small intestine | a_small intestine | | | | |
| AR027 | a_Stomach | a_Stomach | | | | |
| AR028 | Blood B cells | Blood B cells | | | | |
| AR029 | Blood B cells activated | Blood B cells activated | | | | |
| AR030 | Blood B cells resting | Blood B cells resting | | | | |
| AR031 | Blood T cells activated | Blood T cells activated | | | | |
| AR032 | Blood T cells resting | Blood T cells resting | | | | |
| AR033 | brain | brain | | | | |
| AR034 | breast | breast | | | | |
| AR024 | a_mammary gland | a_mammary gland | | | | |
| AR025 | a_Prostate | a_Prostate | | | | |
| AR026 | a_small intestine | a_small intestine | | | | |
| AR035 | breast cancer | breast cancer | | | | |
| AR036 | Cell Line CAOV3 | Cell Line CAOV3 | | | | |
| AR037 | cell line PA-1 | cell line PA-1 | | | | |
| AR038 | cell line transformed | cell line transformed | | | | |
| AR039 | colon | colon | | | | |
| AR040 | colon (9808co65R) | colon (9808co65R) | | | | |
| AR041 | colon (9809co15) | colon (9809co15) | | | | |
| AR042 | colon cancer | colon cancer | | | | |
| AR043 | colon cancer | colon cancer (9808co64R) | | | | |
| | (9808co64R) | | | | | |
| AR044 | colon cancer 9809co14 | colon cancer 9809co14 | | | | |
| AR050 | Donor II B Cells 24 hrs | Donor II B Cells 24 hrs | | | | |
| AR051 | Donor II B Cells 72 hrs | Donor II B Cells 72 hrs | | | | |
| AR052 | Donor II B-Cells 24 hrs. | Donor II B-Cells 24 hrs. | | | | |
| AR053 | Donor II B-Cells 72 hrs | Donor II B-Cells 72 hrs | | | | |
| AR054 | Donor II Resting B | Donor II Resting B Cells | | | | |
| | Cells | | | | | |
| AR055 | Heart | Heart | | | | |
| AR056 | Human Lung | Human Lung (clonetech) | | | | |
| | (clonetech) | | | | | |
| AR057 | Human Mammary | Human Mammary (clontech) | | | | |
| | (clontech) | | | | | |
| AR058 | Human Thymus | Human Thymus (clonetech) | | | | |
| | (clonetech) | | | | | |
| AR059 | Jurkat (unstimulated) | Jurkat (unstimulated) | | | | |
| AR060 | Kidney | Kidney | | | | |
| AR061 | Liver | Liver | | | | |
| AR062 | Liver (Clontech) | Liver (Clontech) | | | | |
| AR063 | Lymphocytes chronic | Lymphocytes chronic | | | | |
| | lymphocytic leukaemia | lymphocytic leukaemia | | | | |
| AR064 | Lymphocytes diffuse | Lymphocytes diffuse large B | | | | |
| | large B cell lymphoma | cell lymphoma | | | | |
| AR065 | Lymphocytes follicular | Lymphocytes follicular | | | | |
| | lymphoma | lymphoma | | | | |
| AR066 | normal breast | normal breast | | | | |
| AR067 | Normal Ovarian | Normal Ovarian (4004901) | | | | |
| | (4004901) | | | | | |
| AR068 | Normal Ovary | Normal Ovary 9508G045 | | | | |
| | 9508G045 | | | | | |
| AR069 | Normal Ovary | Normal Ovary 9701G208 | | | | |
| | 9701G208 | | | | | |
| AR070 | Normal Ovary | Normal Ovary 9806G005 | | | | |
| | 9806G005 | | | | | |
| AR071 | Ovarian Cancer | Ovarian Cancer | | | | |
| AR072 | Ovarian Cancer | Ovarian Cancer (9702G001) | | | | |
| | (9702G001) | | | | | |
| AR073 | Ovarian Cancer | Ovarian Cancer (9707G029) | | | | |
| | (9707G029) | | | | | |
| AR074 | Ovarian Cancer | Ovarian Cancer (9804G011) | | | | |
| | (9804G011) | | | | | |
| AR075 | Ovarian Cancer | Ovarian Cancer (9806G019) | | | | |
| | (9806G019) | | | | | |
| AR076 | Ovarian Cancer | Ovarian Cancer (9807G017) | | | | |
| | (9807G017) | | | | | |
| AR077 | Ovarian Cancer | Ovarian Cancer (9809G001) | | | | |
| | (9809G001) | | | | | |
| AR078 | ovarian cancer 15799 | ovarian cancer 15799 | | | | |
| AR079 | Ovarian Cancer | Ovarian Cancer 17717AID | | | | |
| | 17717AID | | | | | |
| AR080 | Ovarian Cancer | Ovarian Cancer 4004664B1 | | | | |
| | 4004664B1 | | | | | |
| AR081 | Ovarian Cancer | Ovarian Cancer 4005315A1 | | | | |
| | 4005315A1 | | | | | |
| AR082 | ovarian cancer | ovarian cancer 94127303 | | | | |
| | 94127303 | | | | | |
| AR083 | Ovarian Cancer | Ovarian Cancer 96069304 | | | | |
| | 96069304 | | | | | |
| AR084 | Ovarian Cancer | Ovarian Cancer 9707G029 | | | | |
| | 9707G029 | | | | | |
| AR085 | Ovarian Cancer | Ovarian Cancer 9807G045 | | | | |
| | 9807G045 | | | | | |
| AR086 | ovarian cancer | ovarian cancer 9809G001 | | | | |
| | 9809G001 | | | | | |
| AR087 | Ovarian Cancer | Ovarian Cancer 9905C032RC | | | | |
| | 9905C032RC | | | | | |
| AR088 | Ovarian cancer 9907 | Ovarian cancer 9907 C00 3rd | | | | |
| | C00 3rd | | | | | |
| AR089 | Prostate | Prostate | | | | |
| AR090 | Prostate (clonetech) | Prostate (clonetech) | | | | |
| AR091 | prostate cancer | prostate cancer | | | | |
| AR092 | prostate cancer #15176 | prostate cancer #15176 | | | | |
| AR093 | prostate cancer #15509 | prostate cancer #15509 | | | | |
| AR094 | prostate cancer #15673 | prostate cancer #15673 | | | | |
| AR095 | Small Intestine | Small Intestine (Clontech) | | | | |
| | (Clontech) | | | | | |
| AR096 | Spleen | Spleen | | | | |
| AR097 | Thymus T cells | Thymus T cells activated | | | | |
| | activated | | | | | |
| AR098 | Thymus T cells resting | Thymus T cells resting | | | | |
| AR099 | Tonsil | Tonsil | | | | |
| AR100 | Tonsil geminal center | Tonsil geminal center | | | | |
| | centroblast | centroblast | | | | |
| AR101 | Tonsil germinal center | Tonsil germinal center B cell | | | | |
| | B cell | | | | | |
| AR102 | Tonsil lymph node | Tonsil lymph node | | | | |
| AR103 | Tonsil memory B cell | Tonsil memory B cell | | | | |
| AR104 | Whole Brain | Whole Brain | | | | |
| AR105 | Xenograft ES-2 | Xenograft ES-2 | | | | |
| AR106 | Xenograft SW626 | Xenograft SW626 | | | | |
| AR119 | 001: IL-2 | 001: IL-2 | | | | |
| AR120 | 001: IL-2.1 | 001: IL-2.1 | | | | |
| AR121 | 001: IL-2_b | 001: IL-2_b | | | | |
| AR124 | 002: Monocytes | 002: Monocytes untreated | | | | |
| | untreated (1 hr) | (1 hr) | | | | |
| AR125 | 002: Monocytes | 002: Monocytes untreated | | | | |
| | untreated (5 hrs) | (5 hrs) | | | | |
| AR126 | 002: Control.1C | 002: Control.1C | | | | |
| AR127 | 002: IL2.1C | 002: IL2.1C | | | | |
| AR130 | 003: Placebo-treated | 003: Placebo-treated Rat | | | | |
| | Rat Lacrimal Gland | Lacrimal Gland | | | | |
| AR131 | 003: Placebo-treated | 003: Placebo-treated Rat | | | | |
| | Rat Submandibular | Submandibular Gland | | | | |
| | Gland | | | | | |
| AR135 | 004: Monocytes | 004: Monocytes untreated | | | | |
| | untreated (5 hrs) | (5 hrs) | | | | |
| AR136 | 004: Monocytes | 004: Monocytes untreated | | | | |
| | untreated 1 hr | 1 hr | | | | |
| AR139 | 005: Placebo (48 hrs) | 005: Placebo (48 hrs) | | | | |
| AR140 | 006: pC4 (24 hrs) | 006: pC4 (24 hrs) | | | | |
| AR141 | 006: pC4 (48 hrs) | 006: pC4 (48 hrs) | | | | |
| AR152 | 007: PHA(1 hr) | 007: PHA(1 hr) | | | | |
| AR153 | 007: PHA(6 HRS) | 007: PHA(6 HRS) | | | | |
| AR154 | 007: PMA(6 hrs) | 007: PMA(6 hrs) | | | | |
| AR155 | 008: 1449_#2 | 008: 1449_#2 | | | | |
| AR161 | 01: A - max 24 | 01: A - max 24 | | | | |
| AR162 | 01: A - max 26 | 01: A - max 26 | | | | |
| AR163 | 01: A - max 30 | 01: A - max 30 | | | | |
| AR164 | 01: B - max 24 | 01: B - max 24 | | | | |
| AR165 | 01: B - max 26 | 01: B - max 26 | | | | |
| AR166 | 01: B - max 30 | 01: B - max 30 | | | | |
| AR167 | 1449 Sample | 1449 Sample | | | | |
| AR168 | 3T3P10 1.0 uM insulin | 3T3P10 1.0 uM insulin | | | | |
| AR169 | 3T3P10 10 nM Insulin | 3T3P10 10 nM Insulin | | | | |
| AR170 | 3T3P10 10 uM insulin | 3T3P10 10 uM insulin | | | | |
| AR171 | 3T3P10 No Insulin | 3T3P10 No Insulin | | | | |
| AR172 | 3T3P4 | 3T3P4 | | | | |
| AR173 | Adipose (41892) | Adipose (41892) | | | | |
| AR174 | Adipose Diabetic | Adipose Diabetic (41611) | | | | |
| | (41611) | | | | | |
| AR175 | Adipose Diabetic | Adipose Diabetic (41661) | | | | |
| | (41661) | | | | | |
| AR176 | Adipose Diabetic | Adipose Diabetic (41689) | | | | |
| | (41689) | | | | | |
| AR177 | Adipose Diabetic | Adipose Diabetic (41706) | | | | |
| | (41706) | | | | | |
| AR178 | Adipose Diabetic | Adipose Diabetic (42352) | | | | |
| | (42352) | | | | | |
| AR179 | Adipose Diabetic | Adipose Diabetic (42366) | | | | |
| | (42366) | | | | | |
| AR180 | Adipose Diabetic | Adipose Diabetic (42452) | | | | |
| | (42452) | | | | | |
| AR181 | Adipose Diabetic | Adipose Diabetic (42491) | | | | |
| | (42491) | | | | | |
| AR182 | Adipose Normal | Adipose Normal (41843) | | | | |
| | (41843) | | | | | |
| AR183 | Adipose Normal | Adipose Normal (41893) | | | | |
| | (41893) | | | | | |
| AR184 | Adipose Normal | Adipose Normal (42452) | | | | |
| | (42452) | | | | | |
| AR185 | Adrenal Gland | Adrenal Gland | | | | |
| AR186 | Adrenal Gland + Whole | Adrenal Gland + Whole | | | | |
| | Brain | Brain | | | | |
| AR187 | B7(1 hr)+ (inverted) | B7(1 hr)+ (inverted) | | | | |
| AR188 | Breast (18275A2B) | Breast (18275A2B) | | | | |
| AR189 | Breast (4004199) | Breast (4004199) | | | | |
| AR190 | Breast (4004399) | Breast (4004399) | | | | |
| AR191 | Breast (4004943B7) | Breast (4004943B7) | | | | |
| AR192 | Breast (4005570B1) | Breast (4005570B1) | | | | |
| AR193 | Breast Cancer | Breast Cancer (4004127A30) | | | | |
| | (4004127A30) | | | | | |
| AR194 | Breast Cancer | Breast Cancer (400443A21) | | | | |
| | (400443A21) | | | | | |
| AR195 | Breast Cancer | Breast Cancer (4004643A2) | | | | |
| | (4004643A2) | | | | | |
| AR196 | Breast Cancer | Breast Cancer (4004710A7) | | | | |
| | (4004710A7) | | | | | |
| AR197 | Breast Cancer | Breast Cancer (4004943A21) | | | | |
| | (4004943A21) | | | | | |
| AR198 | Breast Cancer | Breast Cancer (400553A2) | | | | |
| | (400553A2) | | | | | |
| AR199 | Breast Cancer | Breast Cancer (9805C046R) | | | | |
| | (9805C046R) | | | | | |
| AR200 | Breast Cancer | Breast Cancer (9806C012R) | | | | |
| | (9806C012R) | | | | | |
| AR201 | Breast Cancer (ODQ | Breast Cancer (ODQ 45913) | | | | |
| | 45913) | | | | | |
| AR202 | Breast Cancer | Breast Cancer (ODQ45913) | | | | |
| | (ODQ45913) | | | | | |
| AR203 | Breast Cancer | Breast Cancer (ODQ4591B) | | | | |
| | (ODQ4591B) | | | | | |
| AR204 | Colon Cancer (15663) | Colon Cancer (15663) | | | | |
| AR205 | Colon Cancer | Colon Cancer (4005144A4) | | | | |
| | (4005144A4) | | | | | |
| H0002 | Human Adult Heart | Human Adult Heart | Heart | | | Uni-ZAP XR |
| H0003 | Human Adult Liver | Human Adult Liver | Liver | | | Uni-ZAP XR |
| H0004 | Human Adult Spleen | Human Adult Spleen | Spleen | | | Uni-ZAP XR |
| H0008 | Whole 6 Week Old | | | | | Uni-ZAP XR |
| | Embryo | | | | | |
| H0009 | Human Fetal Brain | | | | | Uni-ZAP XR |
| H0011 | Human Fetal Kidney | Human Fetal Kidney | Kidney | | | Uni-ZAP XR |
| H0012 | Human Fetal Kidney | Human Fetal Kidney | Kidney | | | Uni-ZAP XR |
| H0013 | Human 8 Week Whole | Human 8 Week Old Embryo | Embryo | | | Uni-ZAP XR |
| | Embryo | | | | | |
| H0014 | Human Gall Bladder | Human Gall Bladder | Gall Bladder | | | Uni-ZAP XR |
| H0015 | Human Gall Bladder, | Human Gall Bladder | Gall Bladder | | | Uni-ZAP XR |
| | fraction II | | | | | |
| H0018 | Human Greater | Human Greater Omentum | peritoneum | | | Uni-ZAP XR |
| | Omentum, fII remake | | | | | |
| H0022 | Jurkat Cells | Jurkat T-Cell Line | | | | Lambda ZAP II |
| H0024 | Human Fetal Lung III | Human Fetal Lung | Lung | | | Uni-ZAP XR |
| H0026 | Namalwa Cells | Namalwa B-Cell Line, EBV | | | | Lambda ZAP II |
| | | immortalized | | | | |
| H0028 | Human Old Ovary | Human Old Ovary | Ovary | | | pBluescript |
| H0029 | Human Pancreas | Human Pancreas | Pancreas | | | Uni-ZAP XR |
| H0030 | Human Placenta | | | | | Uni-ZAP XR |
| H0031 | Human Placenta | Human Placenta | Placenta | | | Uni-ZAP XR |
| H0032 | Human Prostate | Human Prostate | Prostate | | | Uni-ZAP XR |
| H0033 | Human Pituitary | Human Pituitary | | | | Uni-ZAP XR |
| H0036 | Human Adult Small | Human Adult Small Intestine | Small Int. | | | Uni-ZAP XR |
| | Intestine | | | | | |
| H0037 | Human Adult Small | Human Adult Small Intestine | Small Int. | | | pBluescript |
| | Intestine | | | | | |
| H0038 | Human Testes | Human Testes | Testis | | | Uni-ZAP XR |
| H0039 | Human Pancreas Tumor | Human Pancreas Tumor | Pancreas | | disease | Uni-ZAP XR |
| H0040 | Human Testes Tumor | Human Testes Tumor | Testis | | disease | Uni-ZAP XR |
| H0041 | Human Fetal Bone | Human Fetal Bone | Bone | | | Uni-ZAP XR |
| H0042 | Human Adult | Human Adult Pulmonary | Lung | | | Uni-ZAP XR |
| | Pulmonary | | | | | |
| H0044 | Human Cornea | Human Cornea | eye | | | Uni-ZAP XR |
| H0046 | Human Endometrial | Human Endometrial Tumor | Uterus | | disease | Uni-ZAP XR |
| | Tumor | | | | | |
| H0047 | Human Fetal Liver | Human Fetal Liver | Liver | | | Uni-ZAP XR |
| H0050 | Human Fetal Heart | Human Fetal Heart | Heart | | | Uni-ZAP XR |
| H0051 | Human Hippocampus | Human Hippocampus | Brain | | | Uni-ZAP XR |
| H0052 | Human Cerebellum | Human Cerebellum | Brain | | | Uni-ZAP XR |
| H0056 | Human Umbilical Vein, | Human Umbilical Vein | Umbilical vein | | | Uni-ZAP XR |
| | Endo. remake | Endothelial Cells | | | | |
| H0057 | Human Fetal Spleen | | | | | Uni-ZAP XR |
| H0059 | Human Uterine Cancer | Human Uterine Cancer | Uterus | | disease | Lambda ZAP II |
| H0060 | Human Macrophage | Human Macrophage | Blood | Cell Line | | pBluescript |
| H0061 | Human Macrophage | Human Macrophage | Blood | Cell Line | | pBluescript |
| H0063 | Human Thymus | Human Thymus | Thymus | | | Uni-ZAP XR |
| H0068 | Human Skin Tumor | Human Skin Tumor | Skin | | disease | Uni-ZAP XR |
| H0069 | Human Activated T- | Activated T-Cells | Blood | Cell Line | | Uni-ZAP XR |
| | Cells | | | | | |
| H0070 | Human Pancreas | Human Pancreas | Pancreas | | | Uni-ZAP XR |
| H0071 | Human Infant Adrenal | Human Infant Adrenal Gland | Adrenal gland | | | Uni-ZAP XR |
| | Gland | | | | | |
| H0075 | Human Activated T- | Activated T-Cells | Blood | Cell Line | | Uni-ZAP XR |
| | Cells (II) | | | | | |
| H0081 | Human Fetal Epithelium | Human Fetal Skin | Skin | | | Uni-ZAP XR |
| | (Skin) | | | | | |
| H0082 | Human Fetal Muscle | Human Fetal Muscle | Sk Muscle | | | Uni-ZAP XR |
| H0083 | HUMAN JURKAT | Jurkat Cells | | | | Uni-ZAP XR |
| | MEMBRANE BOUND | | | | | |
| | POLYSOMES | | | | | |
| H0085 | Human Colon | Human Colon | | | | Lambda ZAP II |
| H0086 | Human epithelioid | Epithelioid Sarcoma, muscle | Sk Muscle | | disease | Uni-ZAP XR |
| | sarcoma | | | | | |
| H0087 | Human Thymus | Human Thymus | | | | pBluescript |
| H0090 | Human T-Cell | T-Cell Lymphoma | T-Cell | | disease | Uni-ZAP XR |
| | Lymphoma | | | | | |
| H0095 | Human Greater | Human Greater Omentum | peritoneum | | | Uni-ZAP XR |
| | Omentum, RNA | | | | | |
| | Remake | | | | | |
| H0097 | Human Adult Heart, | Human Adult Heart | Heart | | | pBluescript |
| | subtracted | | | | | |
| H0098 | Human Adult Liver, | Human Adult Liver | Liver | | | Uni-ZAP XR |
| | subtracted | | | | | |
| H0099 | Human Lung Cancer, | Human Lung Cancer | Lung | | | pBluescript |
| | subtracted | | | | | |
| H0100 | Human Whole Six | Human Whole Six Week Old | Embryo | | | Uni-ZAP XR |
| | Week Old Embryo | Embryo | | | | |
| H0101 | Human 7 Weeks Old | Human Whole 7 Week Old | Embryo | | | Lambda ZAP II |
| | Embryo, subtracted | Embryo | | | | |
| H0102 | Human Whole 6 Week | Human Whole Six Week Old | Embryo | | | pBluescript |
| | Old Embryo (II), subt | Embryo | | | | |
| H0107 | Human Infant Adrenal | Human Infant Adrenal Gland | Adrenal gland | | | pBluescript |
| | Gland, subtracted | | | | | |
| H0111 | Human Placenta, | Human Placenta | Placenta | | | pBluescript |
| | subtracted | | | | | |
| H0121 | Human Cornea, | Human Cornea | eye | | | Uni-ZAP XR |
| | subtracted | | | | | |
| H0122 | Human Adult Skeletal | Human Skeletal Muscle | Sk Muscle | | | Uni-ZAP XR |
| | Muscle | | | | | |
| H0123 | Human Fetal Dura | Human Fetal Dura Mater | Brain | | | Uni-ZAP XR |
| | Mater | | | | | |
| H0124 | Human | Human Rhabdomyosarcoma | Sk Muscle | | disease | Uni-ZAP XR |
| | Rhabdomyosarcoma | | | | | |
| H0125 | Cem cells | Cyclohexamide Treated Cem, | Blood | Cell Line | | Uni-ZAP XR |
| | cyclohexamide treated | Jurkat, Raji, and Supt | | | | |
| H0129 | Jurkat cells, thiouridine | Jurkat Cells | | | | Uni-ZAP XR |
| | activated, fract II | | | | | |
| H0130 | LNCAP untreated | LNCAP Cell Line | Prostate | Cell Line | | Uni-ZAP XR |
| H0131 | LNCAP + o.3 nM R1881 | LNCAP Cell Line | Prostate | Cell Line | | Uni-ZAP XR |
| H0132 | LNCAP + 30 nM R1881 | LNCAP Cell Line | Prostate | Cell Line | | Uni-ZAP XR |
| H0134 | Raji Cells, | Cyclohexamide Treated Cem, | Blood | Cell Line | | Uni-ZAP XR |
| | cyclohexamide treated | Jurkat, Raji, and Supt | | | | |
| H0135 | Human Synovial | Human Synovial Sarcoma | Synovium | | | Uni-ZAP XR |
| | Sarcoma | | | | | |
| H0136 | Supt Cells, | Cyclohexamide Treated Cem, | Blood | Cell Line | | Uni-ZAP XR |
| | cyclohexamide treated | Jurkat, Raji, and Supt | | | | |
| H0140 | Activated T-Cells, 8 hrs. | Activated T-Cells | Blood | Cell Line | | Uni-ZAP XR |
| H0141 | Activated T-Cells, 12 hrs. | Activated T-Cells | Blood | Cell Line | | Uni-ZAP XR |
| H0144 | Nine Week Old Early | 9 Wk Old Early Stage Human | Embryo | | | Uni-ZAP XR |
| | Stage Human | | | | | |
| H0147 | Human Adult Liver | Human Adult Liver | Liver | | | Uni-ZAP XR |
| H0149 | 7 Week Old Early Stage | Human Whole 7 Week Old | Embryo | | | Uni-ZAP XR |
| | Human, subtracted | Embryo | | | | |
| H0150 | Human Epididymus | Epididymis | Testis | | | Uni-ZAP XR |
| H0151 | Early Stage Human | Human Fetal Liver | Liver | | | Uni-ZAP XR |
| | Liver | | | | | |
| H0154 | Human Fibrosarcoma | Human Skin Fibrosarcoma | Skin | | disease | Uni-ZAP XR |
| H0156 | Human Adrenal Gland | Human Adrenal Gland Tumor | Adrenal Gland | | disease | Uni-ZAP XR |
| | Tumor | | | | | |
| H0157 | Activated T-Cells, 0 hrs, | Activated T-Cells | Blood | Cell Line | | Uni-ZAP XR |
| | ligation 2 | | | | | |
| H0159 | Activated T-Cells, 8 hrs., | Activated T-Cells | Blood | Cell Line | | Uni-ZAP XR |
| ligation 2 | | | | | | |
| H0163 | Human Synovium | Human Synovium | Synovium | | | Uni-ZAP XR |
| H0165 | Human Prostate Cancer, | Human Prostate Cancer, stage | Prostate | | disease | Uni-ZAP XR |
| | Stage B2 | B2 | | | | |
| H0166 | Human Prostate Cancer, | Human Prostate Cancer, stage | Prostate | | disease | Uni-ZAP XR |
| | Stage B2 fraction | B2 | | | | |
| H0167 | Activated T-Cells, 24 hrs. | Activated T-Cells | Blood | Cell Line | | Uni-ZAP XR |
| H0168 | Human Prostate Cancer, | Human Prostate Cancer, stage C | Prostate | | disease | Uni-ZAP XR |
| | Stage C | | | | | |
| H0169 | Human Prostate Cancer, | Human Prostate Cancer, stage C | Prostate | | disease | Uni-ZAP XR |
| | Stage C fraction | | | | | |
| H0170 | 12 Week Old Early | Twelve Week Old Early | Embryo | | | Uni-ZAP XR |
| | Stage Human | Stage Human | | | | |
| H0171 | 12 Week Old Early | Twelve Week Old Early | Embryo | | | Uni-ZAP XR |
| | Stage Human, II | Stage Human | | | | |
| H0173 | Human | Human Cardiomyopathy | Heart | | disease | Uni-ZAP XR |
| | Cardiomyopathy, RNA | | | | | |
| | remake | | | | | |
| H0175 | H. Adult Spleen, ziplox | | | | | pSport1 |
| H0177 | CAMA1Ee Cell Line | CAMA1Ee Cell Line | Breast | Cell Line | | Uni-ZAP XR |
| H0178 | Human Fetal Brain | Human Fetal Brain | Brain | | | Uni-ZAP XR |
| H0179 | Human Neutrophil | Human Neutrophil | Blood | Cell Line | | Uni-ZAP XR |
| H0181 | Human Primary Breast | Human Primary Breast | Breast | | disease | Uni-ZAP XR |
| | Cancer | Cancer | | | | |
| H0182 | Human Primary Breast | Human Primary Breast | Breast | | disease | Uni-ZAP XR |
| | Cancer | Cancer | | | | |
| H0183 | Human Colon Cancer | Human Colon Cancer | Colon | | disease | Uni-ZAP XR |
| H0187 | Resting T-Cell | T-Cells | Blood | Cell Line | | Lambda ZAP II |
| H0188 | Human Normal Breast | Human Normal Breast | Breast | | | Uni-ZAP XR |
| H0194 | Human Cerebellum, | Human Cerebellum | Brain | | | pBluescript |
| | subtracted | | | | | |
| H0196 | Human | Human Cardiomyopathy | Heart | | | Uni-ZAP XR |
| | Cardiomyopathy, | | | | | |
| | subtracted | | | | | |
| H0197 | Human Fetal Liver, | Human Fetal Liver | Liver | | | Uni-ZAP XR |
| | subtracted | | | | | |
| H0199 | Human Fetal Liver, | Human Fetal Liver | Liver | | | Uni-ZAP XR |
| | subtracted, neg clone | | | | | |
| H0200 | Human Greater | Human Greater Omentum | peritoneum | | | Uni-ZAP XR |
| | Omentum, fract II | | | | | |
| | remake, | | | | | |
| H0201 | Human Hippocampus, | Human Hippocampus | Brain | | | pBluescript |
| | subtracted | | | | | |
| H0202 | Jurkat Cells, | Cyclohexamide Treated Cem, | Blood | Cell Line | | Uni-ZAP XR |
| | cyclohexamide treated, | Jurkat, Raji, and Supt | | | | |
| | subtraction | | | | | |
| H0204 | Human Colon Cancer, | Human Colon Cancer | Colon | | | pBluescript |
| | subtracted | | | | | |
| H0205 | Human Colon Cancer, | Human Colon Cancer | Colon | | | pBluescript |
| | differential | | | | | |
| H0207 | LNCAP, differential | LNCAP Cell Line | Prostate | Cell Line | | pBluescript |
| | expression | | | | | |
| H0208 | Early Stage Human | Human Fetal Lung | Lung | | | pBluescript |
| | Lung, subtracted | | | | | |
| H0209 | Human Cerebellum, | Human Cerebellum | Brain | | | Uni-ZAP XR |
| | differentially expressed | | | | | |
| H0212 | Human Prostate, | Human Prostate | Prostate | | | pBluescript |
| | subtracted | | | | | |
| H0213 | Human Pituitary, | Human Pituitary | | | | Uni-ZAP XR |
| | subtracted | | | | | |
| H0216 | Supt cells, | Cyclohexamide Treated Cem, | Blood | Cell Line | | pBluescript |
| | cyclohexamide treated, | Jurkat, Raji, and Supt | | | | |
| | subtracted | | | | | |
| H0218 | Activated T-Cells, 0 hrs, | Activated T-Cells | Blood | Cell Line | | Uni-ZAP XR |
| | subtracted | | | | | |
| H0219 | Activated T-Cells, 0 hrs, | Activated T-Cells | Blood | Cell Line | | Uni-ZAP XR |
| | differentially expressed | | | | | |
| H0220 | Activated T-Cells, 4 hrs, | Activated T-Cells | Blood | Cell Line | | Uni-ZAP XR |
| | subtracted | | | | | |
| H0222 | Activated T-Cells, 8 hrs, | Activated T-Cells | Blood | Cell Line | | Uni-ZAP XR |
| | subtracted | | | | | |
| H0225 | Activated T-Cells, | Activated T-Cells | Blood | Cell Line | | Uni-ZAP XR |
| | 12 hrs, differentially | | | | | |
| | expressed | | | | | |
| H0229 | Early Stage Human | Early Stage Human Brain | Brain | | | Lambda ZAP II |
| | Brain, random primed | | | | | |
| H0230 | Human | Human Cardiomyopathy | Heart | | disease | Uni-ZAP XR |
| | Cardiomyopathy, diff | | | | | |
| | exp | | | | | |
| H0231 | Human Colon, | Human Colon | | | | pBluescript |
| | subtraction | | | | | |
| H0232 | Human Colon, | Human Colon | | | | pBluescript |
| | differential expression | | | | | |
| H0235 | Human colon cancer, | Human Colon Cancer, | Liver | | | pBluescript |
| | metaticized to liver, | metasticized to liver | | | | |
| | subtraction | | | | | |
| H0239 | Human Kidney Tumor | Human Kidney Tumor | Kidney | | disease | Uni-ZAP XR |
| H0241 | C7MCF7 cell line, | C7MCF7 Cell Line, estrogen | Breast | Cell Line | | Uni-ZAP XR |
| | estrogen treated, | treated | | | | |
| | subtraction | | | | | |
| H0242 | Human Fetal Heart, | Human Fetal Heart | Heart | | | pBluescript |
| | Differential (Fetal- | | | | | |
| | Specific) | | | | | |
| H0244 | Human 8 Week Whole | Human 8 Week Old Embryo | Embryo | | | Uni-ZAP XR |
| | Embryo, subtracted | | | | | |
| H0246 | Human Fetal Liver- | Human Fetal Liver | Liver | | | Uni-ZAP XR |
| | Enzyme subtraction | | | | | |
| H0249 | HE7, subtracted by | Human Whole 7 Week Old | Embryo | | | Uni-ZAP XR |
| | hybridization with E7 | Embryo | | | | |
| | cDNA | | | | | |
| H0250 | Human Activated | Human Monocytes | | | | Uni-ZAP XR |
| | Monocytes | | | | | |
| H0251 | Human | Human Chondrosarcoma | Cartilage | | disease | Uni-ZAP XR |
| | Chondrosarcoma | | | | | |
| H0252 | Human Osteosarcoma | Human Osteosarcoma | Bone | | disease | Uni-ZAP XR |
| H0253 | Human adult testis, | Human Adult Testis | Testis | | | Uni-ZAP XR |
| | large inserts | | | | | |
| H0254 | Breast Lymph node | Breast Lymph Node | Lymph Node | | | Uni-ZAP XR |
| | cDNA library | | | | | |
| H0255 | breast lymph node | Breast Lymph Node | Lymph Node | | | Lambda ZAP II |
| | CDNA library | | | | | |
| H0256 | HL-60, unstimulated | Human HL-60 Cells, | Blood | Cell Line | | Uni-ZAP XR |
| | | unstimulated | | | | |
| H0257 | HL-60, PMA 4 H | HL-60 Cells, PMA stimulated | Blood | Cell Line | | Uni-ZAP XR |
| | | 4 H | | | | |
| H0261 | H. cerebellum, Enzyme | Human Cerebellum | Brain | | | Uni-ZAP XR |
| | subtracted | | | | | |
| H0263 | human colon cancer | Human Colon Cancer | Colon | | disease | Lambda ZAP II |
| H0264 | human tonsils | Human Tonsil | Tonsil | | | Uni-ZAP XR |
| H0265 | Activated T-Cell | T-Cells | Blood | Cell Line | | Uni-ZAP XR |
| | (12 hs)/Thiouridine | | | | | |
| | labelledEco | | | | | |
| H0266 | Human Microvascular | HMEC | Vein | Cell Line | | Lambda ZAP II |
| | Endothelial Cells, fract. A | | | | | |
| H0267 | Human Microvascular | HMEC | Vein | Cell Line | | Lambda ZAP II |
| | Endothelial Cells, fract. B | | | | | |
| H0268 | Human Umbilical Vein | HUVE Cells | Umbilical vein | Cell Line | | Lambda ZAP II |
| | Endothelial Cells, fract. A | | | | | |
| H0269 | Human Umbilical Vein | HUVE Cells | Umbilical vein | Cell Line | | Lambda ZAP II |
| | Endothelial Cells, fract. B | | | | | |
| H0270 | HPAS (human pancreas, | Human Pancreas | Pancreas | | | Uni-ZAP XR |
| | subtracted) | | | | | |
| H0271 | Human Neutrophil, | Human Neutrophil - | Blood | Cell Line | | Uni-ZAP XR |
| | Activated | Activated | | | | |
| H0272 | HUMAN TONSILS, | Human Tonsil | Tonsil | | | Uni-ZAP XR |
| | FRACTION 2 | | | | | |
| H0275 | Human Infant Adrenal | Human Infant Adrenal Gland | Adrenal gland | | | pBluescript |
| | Gland, Subtracted | | | | | |
| H0280 | K562 + PMA (36 hrs) | K562 Cell line | cell line | Cell Line | | ZAP Express |
| H0284 | Human OB MG63 | Human Osteoblastoma MG63 | Bone | Cell Line | | Uni-ZAP XR |
| | control fraction I | cell line | | | | |
| H0286 | Human OB MG63 | Human Osteoblastoma MG63 | Bone | Cell Line | | Uni-ZAP XR |
| | treated (10 nM E2) | cell line | | | | |
| | fraction I | | | | | |
| H0288 | Human OB HOS | Human Osteoblastoma HOS | Bone | Cell Line | | Uni-ZAP XR |
| | control fraction I | cell line | | | | |
| H0290 | Human OB HOS treated | Human Osteoblastoma HOS | Bone | Cell Line | | Uni-ZAP XR |
| | (1 nM E2) fraction I | cell line | | | | |
| H0292 | Human OB HOS treated | Human Osteoblastoma HOS | Bone | Cell Line | | Uni-ZAP XR |
| | (10 nM E2) fraction I | cell Line | | | | |
| H0293 | WI 38 cells | | | | | Uni-ZAP XR |
| H0294 | Amniotic Cells - TNF | Amniotic Cells - TNF | Placenta | Cell Line | | Uni-ZAP XR |
| | induced | induced | | | | |
| H0295 | Amniotic Cells - | Amniotic Cells - Primary | Placenta | Cell Line | | Uni-ZAP XR |
| | Primary Culture | Culture | | | | |
| H0300 | CD34 positive cells | CD34 Positive Cells | Cord Blood | | | ZAP Express |
| | (Cord Blood) | | | | | |
| H0305 | CD34 positive cells | CD34 Positive Cells | Cord Blood | | | ZAP Express |
| | (Cord Blood) | | | | | |
| H0306 | CD34 depleted Buffy | CD34 Depleted Buffy Coat | Cord Blood | | | ZAP Express |
| | Coat (Cord Blood) | (Cord Blood) | | | | |
| H0309 | Human Chronic | Synovium, Chronic | Synovium | | disease | Uni-ZAP XR |
| | Synovitis | Synovitis/Osteoarthritis | | | | |
| H0310 | human caudate nucleus | Brain | Brain | | | Uni-ZAP XR |
| H0318 | HUMAN B CELL | Human B Cell Lymphoma | Lymph Node | | disease | Uni-ZAP XR |
| | LYMPHOMA | | | | | |
| H0327 | human corpus colosum | Human Corpus Callosum | Brain | | | Uni-ZAP XR |
| H0328 | human ovarian cancer | Ovarian Cancer | Ovary | | disease | Uni-ZAP XR |
| H0329 | Dermatofibrosarcoma | Dermatofibrosarcoma | Skin | | disease | Uni-ZAP XR |
| | Protuberance | Protuberans | | | | |
| H0331 | Hepatocellular Tumor | Hepatocellular Tumor | Liver | | disease | Lambda ZAP II |
| H0333 | Hemangiopericytoma | Hemangiopericytoma | Blood vessel | | disease | Lambda ZAP II |
| H0334 | Kidney cancer | Kidney Cancer | Kidney | | disease | Uni-ZAP XR |
| H0339 | Duodenum | Duodenum | | | | Uni-ZAP XR |
| H0340 | Corpus Callosum | Corpus Collosum-93052 | | | | Uni-ZAP XR |
| H0341 | Bone Marrow Cell Line | Bone Marrow Cell Line | Bone Marrow | Cell Line | | Uni-ZAP XR |
| | (RS4; 11) | RS4; 11 | | | | |
| H0343 | stomach cancer (human) | Stomach Cancer - 5383A | | | disease | Uni-ZAP XR |
| | | (human) | | | | |
| H0344 | Adipose tissue (human) | Adipose - 6825A (human) | | | | Uni-ZAP XR |
| H0345 | SKIN | Skin - 4000868H | Skin | | | Uni-ZAP XR |
| H0346 | Brain-medulloblastoma | Brain (Medulloblastoma)- | Brain | | disease | Uni-ZAP XR |
| | | 9405C006R | | | | |
| H0349 | human adult liver | Human Adult Liver | Liver | | | pCMVSport 1 |
| | cDNA library | | | | | |
| H0350 | Human Fetal Liver, | Human Fetal Liver, mixed | Liver | | | Uni-ZAP XR |
| | mixed 10 & 14 week | 10&14 Week | | | | |
| H0351 | Glioblastoma | Glioblastoma | Brain | | disease | Uni-ZAP XR |
| H0352 | wilm''s tumor | Wilm''s Tumor | | | disease | Uni-ZAP XR |
| H0354 | Human Leukocytes | Human Leukocytes | Blood | Cell Line | | pCMVSport 1 |
| H0355 | Human Liver | Human Liver, normal Adult | | | | pCMVSport 1 |
| H0357 | H. Normalized Fetal | Human Fetal Liver | Liver | | | Uni-ZAP XR |
| | Liver, II | | | | | |
| H0366 | L428 cell line | L428 | | | | ZAP Express |
| H0369 | H. Atrophic | Atrophic Endometrium and | | | | Uni-ZAP XR |
| | Endometrium | myometrium | | | | |
| H0370 | H. Lymph node breast | Lymph node with Met. Breast | | | disease | Uni-ZAP XR |
| | Cancer | Cancer | | | | |
| H0373 | Human Heart | Human Adult Heart | Heart | | | pCMVSport 1 |
| H0374 | Human Brain | Human Brain | | | | pCMVSport 1 |
| H0375 | Human Lung | Human Lung | | | | pCMVSport 1 |
| H0379 | Human Tongue, frac 1 | Human Tongue | | | | pSport1 |
| H0380 | Human Tongue, frac 2 | Human Tongue | | | | pSport1 |
| H0381 | Bone Cancer | Bone Cancer | | | disease | Uni-ZAP XR |
| H0383 | Human Prostate BPH, | Human Prostate BPH | | | | Uni-ZAP XR |
| | re-excision | | | | | |
| H0386 | Leukocyte and Lung; 4 | Human Leukocytes | Blood | Cell Line | | pCMVSport 1 |
| | screens | | | | | |
| H0388 | Human Rejected | Human Rejected Kidney | | | disease | pBluescript |
| | Kidney, 704 re-excision | | | | | |
| H0390 | Human Amygdala | Human Amygdala Depression | | | disease | pBluescript |
| | Depression, re-excision | | | | | |
| H0391 | H. Meniingima, M6 | Human Meningima | brain | | | pSport1 |
| H0392 | H. Meningima, M1 | Human Meningima | brain | | | pSport1 |
| H0393 | Fetal Liver, subtraction | Human Fetal Liver | Liver | | | pBluescript |
| | II | | | | | |
| H0395 | A1-CELL LINE | Redd-Sternberg cell | | | | ZAP Express |
| H0400 | Human Striatum | Human Brain, Striatum | Brain | | | Lambda ZAP II |
| | Depression, re-rescue | Depression | | | | |
| H0401 | Human Pituitary, | Human Pituitary | | | | pBluescript |
| | subtracted V | | | | | |
| H0402 | CD34 depleted Buffy | CD34 Depleted Buffy Coat | Cord Blood | | | ZAP Express |
| | Coat (Cord Blood), re- | (Cord Blood) | | | | |
| | excision | | | | | |
| H0403 | H. Umbilical Vein | HUVE Cells | Umbilical vein | Cell Line | | Uni-ZAP XR |
| | Endothelial Cells, IL4 | | | | | |
| | induced | | | | | |
| H0406 | H Amygdala | Human Amygdala Depression | | | | Uni-ZAP XR |
| | Depression, subtracted | | | | | |
| H0408 | Human kidney Cortex, | Human Kidney Cortex | | | | pBluescript |
| | subtracted | | | | | |
| H0409 | H. Striatum Depression, | Human Brain, Striatum | Brain | | | pBluescript |
| | subtracted | Depression | | | | |
| H0411 | H Female Bladder, | Human Female Adult Bladder | Bladder | | | pSport1 |
| | Adult | | | | | |
| H0412 | Human umbilical vein | HUVE Cells | Umbilical vein | Cell Line | | pSport1 |
| | endothelial cells, IL-4 | | | | | |
| | induced | | | | | |
| H0413 | Human Umbilical Vein | HUVE Cells | Umbilical vein | Cell Line | | pSport1 |
| | Endothelial Cells, | | | | | |
| | uninduced | | | | | |
| H0414 | Ovarian Tumor I, | Ovarian Tumor, OV5232 | Ovary | | disease | pSport1 |
| | OV5232 | | | | | |
| H0415 | H. Ovarian Tumor, II, | Ovarian Tumor, OV5232 | Ovary | | disease | pCMVSport 2.0 |
| | OV5232 | | | | | |
| H0416 | Human Neutrophils, | Human Neutrophil - | Blood | Cell Line | | pBluescript |
| | Activated, re-excision | Activated | | | | |
| H0417 | Human Pituitary, | Human Pituitary | | | | pBluescript |
| | subtracted VIII | | | | | |
| H0419 | Bone Cancer, re- | Bone Cancer | | | | Uni-ZAP XR |
| | excision | | | | | |
| H0421 | Human Bone Marrow, | Bone Marrow | | | | pBluescript |
| | re-excision | | | | | |
| H0422 | T-Cell PHA 16 hrs | T-Cells | Blood | Cell Line | | pSport1 |
| H0423 | T-Cell PHA 24 hrs | T-Cells | Blood | Cell Line | | pSport1 |
| H0424 | Human Pituitary, subt | Human Pituitary | | | | pBluescript |
| | IX | | | | | |
| H0427 | Human Adipose | Human Adipose, left | | | | pSport1 |
| | | hiplipoma | | | | |
| H0428 | Human Ovary | Human Ovary Tumor | Ovary | | | pSport1 |
| H0429 | K562 + PMA (36 hrs), | K562 Cell line | cell line | Cell Line | | ZAP Express |
| | re-excisision | | | | | |
| H0431 | H. Kidney Medulla, re- | Kidney medulla | Kidney | | | pBluescript |
| | excision | | | | | |
| H0433 | Human Umbilical Vein | HUVE Cells | Umbilical vein | Cell Line | | pBluescript |
| | Endothelial cells, frac | | | | | |
| | B, re-excision | | | | | |
| H0435 | Ovarian Tumor 10-3-95 | Ovarian Tumor, OV350721 | Ovary | | | pCMVSport 2.0 |
| H0436 | Resting T-Cell | T-Cells | Blood | Cell Line | | pSport1 |
| | Library, II | | | | | |
| H0437 | H Umbilical Vein | HUVE Cells | Umbilical vein | Cell Line | | Lambda ZAP II |
| | Endothelial Cells, frac | | | | | |
| | A, re-excision | | | | | |
| H0438 | H. Whole Brain #2, re- | Human Whole Brain #2 | | | | ZAP Express |
| | excision | | | | | |
| H0439 | Human Eosinophils | Eosinophils | | | | pBluescript |
| H0441 | H. Kidney Cortex, | Kidney cortex | Kidney | | | pBluescript |
| | subtracted | | | | | |
| H0444 | Spleen metastic | Spleen, Metastic malignant | Spleen | | disease | pSport1 |
| | melanoma | melanoma | | | | |
| H0445 | Spleen, Chronic | Human Spleen, CLL | Spleen | | disease | pSport1 |
| | lymphocytic leukemia | | | | | |
| H0449 | CD34 + cell, I | CD34 positive cells | | | | pSport1 |
| H0450 | CD34 + cells, II | CD34 positive cells | | | | pCMVSport 2.0 |
| H0453 | H. Kidney Pyramid, | Kidney pyramids | Kidney | | | pBluescript |
| | subtracted | | | | | |
| H0455 | H. Striatum Depression, | Human Brain, Striatum | Brain | | | pBluescript |
| | subt | Depression | | | | |
| H0457 | Human Eosinophils | Human Eosinophils | | | | pSport1 |
| H0458 | CD34 + cell, I, frac II | CD34 positive cells | | | | pSport1 |
| H0459 | CD34 + cells, II, | CD34 positive cells | | | | pCMVSport 2.0 |
| | FRACTION 2 | | | | | |
| H0461 | H. Kidney Medulla, | Kidney medulla | Kidney | | | pBluescript |
| | subtracted | | | | | |
| H0477 | Human Tonsil, Lib 3 | Human Tonsil | Tonsil | | | pSport1 |
| H0478 | Salivary Gland, Lib 2 | Human Salivary Gland | Salivary gland | | | pSport1 |
| H0479 | Salivary Gland, Lib 3 | Human Salivary Gland | Salivary gland | | | pSport1 |
| H0483 | Breast Cancer cell line, | Breast Cancer Cell line, | | | | pSport1 |
| | MDA 36 | MDA 36 | | | | |
| H0484 | Breast Cancer Cell line, | Breast Cancer Cell line, | | | | pSport1 |
| | angiogenic | Angiogenic, 36T3 | | | | |
| H0485 | Hodgkin''s Lymphoma I | Hodgkin''s Lymphoma I | | | disease | pCMVSport 2.0 |
| H0486 | Hodgkin''s Lymphoma | Hodgkin''s Lymphoma II | | | disease | pMVSport 2.0 |
| | II | | | | | |
| H0487 | Human Tonsils, lib I | Human Tonsils | | | | pCMVSport 2.0 |
| H0488 | Human Tonsils, Lib 2 | Human Tonsils | | | | pCMVSport 2.0 |
| H0492 | HL-60, RA 4 h, | HL-60 Cells, RA stimulated | Blood | Cell Line | | Uni-ZAP XR |
| | Subtracted | for 4 H | | | | |
| H0493 | HL-60, PMA 1 d, | HL-60 Cells, PMA stimulated | Blood | Cell Line | | Uni-ZAP XR |
| | subtracted | for 1 day | | | | |
| H0494 | Keratinocyte | Keratinocyte | | | | pCMVSport 2.0 |
| H0497 | HEL cell line | HEL cell line | | HEL 92.1.7 | | pSport1 |
| H0505 | Human Astrocyte. | Human Astrocyte | | | | pSport1 |
| H0506 | Ulcerative Colitis | Colon | Colon | | | pSport1 |
| H0509 | Liver, Hepatoma | Human Liver, Hepatoma, | Liver | | disease | pCMVSport 3.0 |
| | | patient 8 | | | | |
| H0510 | Human Liver, normal | Human Liver, normal, Patient | Liver | | | pCMVSport 3.0 |
| | | # 8 | | | | |
| H0518 | pBMC stimulated w/ | pBMC stimulated with poly | | | | pCMVSport 3.0 |
| | poly I/C | I/C | | | | |
| H0519 | NTERA2, control | NTERA2, Teratocarcinoma | | | | pCMVSport 3.0 |
| | | cell line | | | | |
| H0520 | NTERA2 + retinoic | NTERA2, Teratocarcinoma | | | | pSport1 |
| | acid, 14 days | cell line | | | | |
| H0521 | Primary Dendritic Cells, | Primary Dendritic cells | | | | pCMVSport 3.0 |
| | lib 1 | | | | | |
| H0522 | Primary Dendritic | Primary Dendritic cells | | | | pCMVSport 3.0 |
| | cells, frac 2 | | | | | |
| H0528 | Poly[I]/Poly[C] Normal | Poly[I]/Poly[C] Normal Lung | | | | pCMVSport 3.0 |
| | Lung Fibroblasts | Fibroblasts | | | | |
| H0529 | Myoloid Progenitor Cell | TF-1 Cell Line; Myoloid | | | | pCMVSport 3.0 |
| | Line | progenitor cell line | | | | |
| H0530 | Human Dermal | Human Dermal Endothelial | | | | pSport1 |
| | Endothelial | Cells; untreated | | | | |
| | Cells, untreated | | | | | |
| H0535 | Human ovary tumor cell | Ovarian Tumor, OV350721 | Ovary | | disease | pSport1 |
| | OV350721 | | | | | |
| H0538 | Merkel Cells | Merkel cells | Lymph node | | | pSport1 |
| H0539 | Pancreas Islet Cell | Pancreas Islet Cell Tumour | Pancreas | | disease | pSport1 |
| | Tumor | | | | | |
| H0540 | Skin, burned | Skin, leg burned | Skin | | | pSport1 |
| H0542 | T Cell helper I | Helper T cell | | | | pCMVSport 3.0 |
| H0543 | T cell helper II | Helper T cell | | | | pCMVSport 3.0 |
| H0544 | Human endometrial | Human endometrial stromal | | | | pCMVSport 3.0 |
| | stromal cells | cells | | | | |
| H0545 | Human endometrial | Human endometrial stromal | | | | pCMVSport 3.0 |
| | stromal cells-treated | cells-treated with proge | | | | |
| | with progesterone | | | | | |
| H0546 | Human endometrial | Human endometrial stromal | | | | pCMVSport 3.0 |
| | stromal cells-treated | cells-treated with estra | | | | |
| | with estradiol | | | | | |
| H0547 | NTERA2 | NTERA2, Teratocarcinoma | | | | pSport1 |
| | teratocarcinoma cell | cell line | | | | |
| | line + retinoic acid (14 | | | | | |
| | days) | | | | | |
| H0549 | H. Epididiymus, caput | Human Epididiymus, caput | | | | Uni-ZAP XR |
| | & corpus | and corpus | | | | |
| H0550 | H. Epididiymus, cauda | Human Epididiymus, cauda | | | | Uni-ZAP XR |
| H0551 | Human Thymus Stromal | Human Thymus Stromal | | | | pCMVSport 3.0 |
| | Cells | Cells | | | | |
| H0553 | Human Placenta | Human Placenta | | | | pCMVSport 3.0 |
| H0555 | Rejected Kidney, lib 4 | Human Rejected Kidney | Kidney | | disease | pCMVSport 3.0 |
| H0556 | Activated T- | T-Cells | Blood | Cell Line | | Uni-ZAP XR |
| | cell(12 h)/Thiouridine- | | | | | |
| | re-excision | | | | | |
| H0559 | HL-60, PMA 4 H, re- | HL-60 Cells, PMA stimulated | Blood | Cell Line | | Uni-ZAP XR |
| | excision | 4 H | | | | |
| H0560 | KMH2 | KMH2 | | | | pCMVSport 3.0 |
| H0561 | L428 | L428 | | | | pCMVSport 3.0 |
| H0562 | Human Fetal Brain, | Human Fetal Brain | | | | pCMVSport 2.0 |
| | normalized c5-11-26 | | | | | |
| H0563 | Human Fetal Brain, | Human Fetal Brain | | | | pCMVSport 2.0 |
| | normalized 50021F | | | | | |
| H0565 | HUman Fetal Brain, | Human Fetal Brain | | | | pCMVSport 2.0 |
| | normalized 100024F | | | | | |
| H0566 | Human Fetal | Human Fetal Brain | | | | pCMVSport 2.0 |
| | Brain, normalized c50F | | | | | |
| H0567 | Human Fetal Brain, | Human Fetal Brain | | | | pCMVSport 2.0 |
| | normalized A5002F | | | | | |
| H0569 | Human Fetal Brain, | Human Fetal Brain | | | | pCMVSport 2.0 |
| | normalized CO | | | | | |
| H0570 | Human Fetal Brain, | Human Fetal Brain | | | | pCMVSport 2.0 |
| | normalized C500H | | | | | |
| H0571 | Human Fetal Brain, | Human Fetal Brain | | | | pCMVSport 2.0 |
| | normalized C500HE | | | | | |
| H0572 | Human Fetal Brain, | Human Fetal Brain | | | | pCMVSport 2.0 |
| | normalized AC5002 | | | | | |
| H0574 | Hepatocellular Tumor; | Hepatocellular Tumor | Liver | | disease | Lambda ZAP II |
| | re-excision | | | | | |
| H0575 | Human Adult | Human Adult Pulmonary | Lung | | | Uni-ZAP XR |
| | Pulmonary; re-excision | | | | | |
| H0576 | Resting T-Cell; re- | T-Cells | Blood | Cell Line | | Lambda ZAP II |
| | excision | | | | | |
| H0580 | Dendritic cells, pooled | Pooled dendritic cells | | | | pCMVSport 3.0 |
| H0581 | Human Bone Marrow, | Human Bone Marrow | Bone Marrow | | | pCMVSport 3.0 |
| | treated | | | | | |
| H0583 | B Cell lymphoma | B Cell Lymphoma | B Cell | | disease | pCMVSport 3.0 |
| H0584 | Activated T-cells, 24 hrs, | Activated T-Cells | Blood | Cell Line | | Uni-ZAP XR |
| | re-excision | | | | | |
| H0585 | Activated T-Cells, 12 hrs, | Activated T-Cells | Blood | Cell Line | | Uni-ZAP XR |
| | re-excision | | | | | |
| H0586 | Healing groin wound, | healing groin wound, 6.5 | groin | | disease | pCMVSport 3.0 |
| | 6.5 hours post incision | hours post incision - 2/ | | | | |
| H0587 | Healing groin wound; | Groin-Feb. 19, 1997 | groin | | disease | pCMVSport 3.0 |
| | 7.5 hours post incision | | | | | |
| H0589 | CD34 positive cells | CD34 Positive Cells | Cord Blood | | | ZAP Express |
| | (cord blood), re-ex | | | | | |
| H0590 | Human adult small | Human Adult Small Intestine | Small Int. | | | Uni-ZAP XR |
| | intestine, re-excision | | | | | |
| H0591 | Human T-cell | T-Cell Lymphoma | T-Cell | | disease | Uni-ZAP XR |
| | lymphoma; re-excision | | | | | |
| H0592 | Healing groin wound - | HGS wound healing project; | | | disease | pCMVSport 3.0 |
| | zero hr post-incision | abdomen | | | | |
| | (control) | | | | | |
| H0593 | Olfactory | Olfactory epithelium from | | | | pCMVSport 3.0 |
| | epithelium; nasalcavity | roof of left nasal cacit | | | | |
| H0594 | Human Lung Cancer; re- | Human Lung Cancer | Lung | | disease | Lambda ZAP II |
| | excision | | | | | |
| H0595 | Stomach cancer | Stomach Cancer - 5383A | | | disease | Uni-ZAP XR |
| | (human); re-excision | (human) | | | | |
| H0596 | Human Colon | Human Colon Cancer | Colon | | | Lambda ZAP II |
| | Cancer; re-excision | | | | | |
| H0597 | Human Colon; re- | Human Colon | | | | Lambda ZAP II |
| | excision | | | | | |
| H0598 | Human Stomach; re- | Human Stomach | Stomach | | | Uni-ZAP XR |
| | excision | | | | | |
| H0599 | Human Adult Heart; re- | Human Adult Heart | Heart | | | Uni-ZAP XR |
| | excision | | | | | |
| H0600 | Healing Abdomen | Abdomen | | | disease | pCMVSport 3.0 |
| | wound; 70&90 min post | | | | | |
| | incision | | | | | |
| H0601 | Healing Abdomen | Abdomen | | | disease | pCMVSport 3.0 |
| | Wound; 15 days post | | | | | |
| | incision | | | | | |
| H0602 | Healing Abdomen | Abdomen | | | disease | pCMVSport 3.0 |
| | Wound; 21&29 days | | | | | |
| | post incision | | | | | |
| H0604 | Human Pituitary, re- | Human Pituitary | | | | pBluescript |
| | excision | | | | | |
| H0606 | Human Primary Breast | Human Primary Breast | Breast | | disease | Uni-ZAP XR |
| | Cancer; re-excision | Cancer | | | | |
| H0607 | H. Leukocytes, | H. Leukocytes | | | | pCMVSport 1 |
| | normalized cot 50A3 | | | | | |
| H0610 | H. Leukocytes, | H. Leukocytes | | | | pCMVSport 1 |
| | normalized cot 5A | | | | | |
| H0611 | H. Leukocytes, | H. Leukocytes | | | | pCMVSport 1 |
| | normalized cot 500 B | | | | | |
| H0612 | H. Leukocytes, | H. Leukocytes | | | | pCMVSport 1 |
| | normalized cot 50 B | | | | | |
| H0613 | H. Leukocytes, | H. Leukocytes | | | | pCMVSport 1 |
| | normalized cot 5B | | | | | |
| H0614 | H. Leukocytes, | H. Leukocytes | | | | pCMVSport 1 |
| | normalized cot 500 A | | | | | |
| H0615 | Human Ovarian Cancer | Ovarian Cancer | Ovary | | disease | Uni-ZAP XR |
| | Reexcision | | | | | |
| H0616 | Human Testes, | Human Testes | Testis | | | Uni-ZAP XR |
| | Reexcision | | | | | |
| H0617 | Human Primary Breast | Human Primary Breast | Breast | | disease | Uni-ZAP XR |
| | Cancer Reexcision | Cancer | | | | |
| H0618 | Human Adult Testes, | Human Adult Testis | Testis | | | Uni-ZAP XR |
| | Large Inserts, | | | | | |
| | Reexcision | | | | | |
| H0619 | Fetal Heart | Human Fetal Heart | Heart | | | Uni-ZAP XR |
| H0620 | Human Fetal Kidney; | Human Fetal Kidney | Kidney | | | Uni-ZAP XR |
| | Reexcision | | | | | |
| H0622 | Human Pancreas | Human Pancreas Tumor | Pancreas | | disease | Uni-ZAP XR |
| | Tumor; Reexcision | | | | | |
| H0623 | Human Umbilical Vein; | Human Umbilical Vein | Umbilical vein | | | Uni-ZAP XR |
| | Reexcision | Endothelial Cells | | | | |
| H0624 | 12 Week Early Stage | Twelve Week Old Early | Embryo | | | Uni-ZAP XR |
| | Human II; Reexcision | Stage Human | | | | |
| H0625 | Ku 812F Basophils Line | Ku 812F Basophils | | | | pSport1 |
| H0626 | Saos2 Cells; Untreated | Saos2 Cell Line; Untreated | | | | pSport1 |
| H0627 | Saos2 Cells; Vitamin | Saos2 Cell Line; Vitamin D3 | | | | pSport1 |
| | D3 Treated | Treated | | | | |
| H0628 | Human Pre- | Human Pre-Differentiated | | | | Uni-ZAP XR |
| | Differentiated | Adipocytes | | | | |
| | Adipocytes | | | | | |
| H0630 | Human | Human Normalized leukocyte | | | | pCMVSport 1 |
| | Leukocytes, normalized | | | | | |
| | control #4 | | | | | |
| H0631 | Saos2, Dexamethosome | Saos2 Cell Line; | | | | pSport1 |
| | Treated | Dexamethosome Treated | | | | |
| H0632 | Hepatocellular | Hepatocellular Tumor | Liver | | | Lambda ZAP II |
| | Tumor; re-excision | | | | | |
| H0633 | Lung Carcinoma A549 | TNFalpha activated A549- | | | disease | pSport1 |
| | TNFalpha activated | Lung Carcinoma | | | | |
| H0634 | Human Testes Tumor, | Human Testes Tumor | Testis | | disease | Uni-ZAP XR |
| | re-excision | | | | | |
| H0635 | Human Activated T- | Activated T-Cells | Blood | Cell Line | | Uni-ZAP XR |
| | Cells, re-excision | | | | | |
| H0637 | Dendritic Cells From | Dentritic cells from CD34 | | | | pSport1 |
| | CD34 Cells | cells | | | | |
| H0638 | CD40 activated | CD40 activated monocyte | | | | pSport1 |
| | monocyte dendridic | dendridic cells | | | | |
| | cells | | | | | |
| H0641 | LPS activated derived | LPS activated monocyte | | | | pSport1 |
| | dendritic cells | derived dendritic cells | | | | |
| H0642 | Hep G2 Cells, lambda | Hep G2 Cells | | | | Other |
| | library | | | | | |
| H0643 | Hep G2 Cells, PCR | Hep G2 Cells | | | | Other |
| | library | | | | | |
| H0644 | Human Placenta (re- | Human Placenta | Placenta | | | Uni-ZAP XR |
| | excision) | | | | | |
| H0645 | Fetal Heart, re-excision | Human Fetal Heart | Heart | | | Uni-ZAP XR |
| H0646 | Lung, Cancer (4005313 | Metastatic squamous cell | | | | pSport1 |
| | A3): Invasive Poorly | lung carcinoma, poorly di | | | | |
| | Differentiated Lung | | | | | |
| | Adenocarcinoma, | | | | | |
| H0647 | Lung, Cancer (4005163 | Invasive poorly differentiated | | | disease | pSport1 |
| | B7): Invasive, Poorly | lung adenocarcinoma | | | | |
| | Diff. Adenocarcinoma, | | | | | |
| | Metastatic | | | | | |
| H0648 | Ovary, Cancer: | Papillary Cstic neoplasm of | | | disease | pSport1 |
| | (4004562 B6) Papillary | low malignant potentia | | | | |
| | Serous Cystic | | | | | |
| | Neoplasm, Low | | | | | |
| | Malignant Pot | | | | | |
| H0649 | Lung, Normal: | Normal Lung | | | | pSport1 |
| | (4005313 B1) | | | | | |
| H0650 | B-Cells | B-Cells | | | | pCMVSport 3.0 |
| H0651 | Ovary, Normal: | Normal Ovary | | | | pSport1 |
| | (9805C040R) | | | | | |
| H0652 | Lung, Normal: | Normal Lung | | | | pSport1 |
| | (4005313 B1) | | | | | |
| H0653 | Stromal Cells | Stromal Cells | | | | pSport1 |
| H0656 | B-cells (unstimulated) | B-cells (unstimulated) | | | | pSport1 |
| H0657 | B-cells (stimulated) | B-cells (stimulated) | | | | pSport1 |
| H0658 | Ovary, Cancer | 9809C332- Poorly | Ovary & | | disease | pSport1 |
| | (9809C332): Poorly | differentiate | Fallopian Tubes | | | |
| | differentiated | | | | | |
| | adenocarcinoma | | | | | |
| H0659 | Ovary, Cancer | Grade II Papillary Carcinoma, | Ovary | | disease | pSport1 |
| | (15395A1F): Grade II | Ovary | | | | |
| | Papillary Carcinoma | | | | | |
| H0660 | Ovary, Cancer: | Poorly differentiated | | | disease | pSport1 |
| | (15799A1F) Poorly | carcinoma, ovary | | | | |
| | differentiated carcinoma | | | | | |
| H0661 | Breast, Cancer: | Breast cancer | | | disease | pSport1 |
| | (4004943 A5) | | | | | |
| H0662 | Breast, Normal: | Normal Breast - | Breast | | | pSport1 |
| | (4005522B2) | #4005522(B2) | | | | |
| H0663 | Breast, Cancer: | Breast Cancer - | Breast | | disease | pSport1 |
| | (4005522 A2) | #4005522(A2) | | | | |
| H0664 | Breast, Cancer: | Breast Cancer | Breast | | disease | pSport1 |
| | (9806C012R) | | | | | |
| H0665 | Stromal cells 3.88 | Stromal cells 3.88 | | | | pSport1 |
| H0666 | Ovary, Cancer: | Ovarian Cancer, Sample | | | disease | pSport1 |
| | (4004332 A2) | #4004332A2 | | | | |
| H0667 | Stromal | Stromal cell(HBM 3.18) | | | | pSport1 |
| | cells(HBM3.18) | | | | | |
| H0668 | stromal cell clone 2.5 | stromal cell clone 2.5 | | | | pSport1 |
| H0669 | Breast, Cancer: | Breast Cancer (4005385A2) | Breast | | | pSport1 |
| | (4005385 A2) | | | | | |
| H0670 | Ovary, Cancer(4004650 | Ovarian Cancer - 4004650A3 | | | | pSport1 |
| | A3): Well- | | | | | |
| | Differentiated | | | | | |
| | Micropapillary Serous | | | | | |
| | Carcinoma | | | | | |
| H0671 | Breast, Cancer: | Breast Cancer- Sample # | | | | pSport1 |
| | (9802C02OE) | 9802C02OE | | | | |
| H0672 | Ovary, Cancer: | Ovarian Cancer(4004576A8) | Ovary | | | pSport1 |
| | (4004576 A8) | | | | | |
| H0673 | Human Prostate Cancer, | Human Prostate Cancer, stage | Prostate | | | Uni-ZAP XR |
| | Stage B2; re-excision | B2 | | | | |
| H0674 | Human Prostate Cancer, | Human Prostate Cancer, stage C | Prostate | | | Uni-ZAP XR |
| | Stage C; re-excission | | | | | |
| H0675 | Colon, Cancer: | Colon Cancer 9808C064R | | | | pCMVSport 3.0 |
| | (9808C064R) | | | | | |
| H0676 | Colon, Cancer: | Colon Cancer 9808C064R | | | | pCMVSport 3.0 |
| | (9808C064R)-total | | | | | |
| | RNA | | | | | |
| H0677 | TNFR degenerate oligo | B-Cells | | | | PCRII |
| H0682 | Serous Papillary | serous papillary | | | | pCMVSport 3.0 |
| | Adenocarcinoma | adenocarcinoma | | | | |
| | | (9606G304SPA3B) | | | | |
| H0683 | Ovarian Serous | Serous papillary | | | | pCMVSport 3.0 |
| | Papillary | adenocarcinoma, stage 3C | | | | |
| | Adenocarcinoma | (9804G01 | | | | |
| H0684 | Serous Papillary | Ovarian Cancer-9810G606 | Ovaries | | | pCMVSport 3.0 |
| | Adenocarcinoma | | | | | |
| H0685 | Adenocarcinoma of | Adenocarcinoma of Ovary, | | | | pCMVSport 3.0 |
| | Ovary, Human Cell | Human Cell Line, # OVCAR- | | | | |
| | Line, # OVCAR-3 | | | | | |
| H0686 | Adenocarcinoma of | Adenocarcinoma of Ovary, | | | | pCMVSport 3.0 |
| | Ovary, Human Cell | Human Cell Line, # SW-626 | | | | |
| | Line | | | | | |
| H0687 | Human normal | Human normal | Ovary | | | pCMVSport 3.0 |
| | ovary(#9610G215) | ovary(#9610G215) | | | | |
| H0688 | Human Ovarian | Human Ovarian | | | | pCMVSport 3.0 |
| | Cancer(#9807G017) | cancer(#9807G017), mRNA | | | | |
| | | from Maura Ru | | | | |
| H0689 | Ovarian Cancer | Ovarian Cancer, #9806G019 | | | | pCMVSport 3.0 |
| H0690 | Ovarian Cancer, # | Ovarian Cancer, #9702G001 | | | | pCMVSport 3.0 |
| | 9702G001 | | | | | |
| H0692 | BLyS Receptor from | B Cell Lymphoma | B Cell | | | pCMVSport 3.0 |
| | Expression Cloning | | | | | |
| H0693 | Normal Prostate | Normal Prostate Tissue # | | | | pCMVSport 3.0 |
| | #ODQ3958EN | ODQ3958EN | | | | |
| H0694 | Prostate gland | Prostate gland, | prostate gland | | | pCMVSport 3.0 |
| | adenocarcinoma | adenocarcinoma, mod/diff, | | | | |
| | | gleason | | | | |
| H0695 | mononucleocytes from | mononucleocytes from | | | | pCMVSport 3.0 |
| | patient | patient at Shady Grove | | | | |
| | | Hospit | | | | |
| N0006 | Human Fetal Brain | Human Fetal Brain | | | | |
| S0001 | Brain frontal cortex | Brain frontal cortex | Brain | | | Lambda ZAP II |
| S0002 | Monocyte activated | Monocyte-activated | blood | Cell Line | | Uni-ZAP XR |
| S0003 | Human Osteoclastoma | Osteoclastoma | bone | | disease | Uni-ZAP XR |
| S0004 | Prostate | Prostate BPH | Prostate | | | Lambda ZAP II |
| S0005 | Heart | Heart-left ventricle | Heart | | | pCDNA |
| S0006 | Neuroblastoma | Human Neural Blastoma | | | disease | pCDNA |
| S0007 | Early Stage Human | Human Fetal Brain | | | | Uni-ZAP XR |
| | Brain | | | | | |
| S0010 | Human Amygdala | Amygdala | | | | Uni-ZAP XR |
| S0011 | STROMAL - | Osteoclastoma | bone | | disease | Uni-ZAP XR |
| | OSTEOCLASTOMA | | | | | |
| S0014 | Kidney Cortex | Kidney cortex | Kidney | | | Uni-ZAP XR |
| S0015 | Kidney medulla | Kidney medulla | Kidney | | | Uni-ZAP XR |
| S0022 | Human Osteoclastoma | Osteoclastoma Stromal Cells | | | | Uni-ZAP XR |
| | Stromal Cells - | | | | | |
| | unamplified | | | | | |
| S0026 | Stromal cell TF274 | stromal cell | Bone marrow | Cell Line | | Uni-ZAP XR |
| S0027 | Smooth muscle, serum | Smooth muscle | Pulmanary | Cell Line | | Uni-ZAP XR |
| | treated | | artery | | | |
| S0028 | Smooth muscle, control | Smooth muscle | Pulmanary | Cell Line | | Uni-ZAP XR |
| | | | artery | | | |
| S0029 | brain stem | Brain stem | brain | | | Uni-ZAP XR |
| S0031 | Spinal cord | Spinal cord | spinal cord | | | Uni-ZAP XR |
| S0032 | Smooth muscle-ILb | Smooth muscle | Pulmanary | Cell Line | | Uni-ZAP XR |
| | induced | | artery | | | |
| S0036 | Human Substantia Nigra | Human Substantia Nigra | | | | Uni-ZAP XR |
| S0037 | Smooth muscle, IL1b | Smooth muscle | Pulmanary | Cell Line | | Uni-ZAP XR |
| | induced | | artery | | | |
| S0038 | Human Whole Brain #2 - | Human Whole Brain #2 | | | | ZAP Express |
| | Oligo dT >1.5 Kb | | | | | |
| S0040 | Adipocytes | Human Adipocytes from | | | | Uni-ZAP XR |
| | | Osteoclastoma | | | | |
| S0042 | Testes | Human Testes | | | | ZAP Express |
| S0044 | Prostate BPH | prostate BPH | Prostate | | disease | Uni-ZAP XR |
| S0045 | Endothelial cells-control | Endothelial cell | endothelial cell- | Cell Line | | Uni-ZAP XR |
| | | | lung | | | |
| S0046 | Endothelial-induced | Endothelial cell | endothelial cell- | Cell Line | | Uni-ZAP XR |
| | | | lung | | | |
| S0049 | Human Brain, Striatum | Human Brain, Striatum | | | | Uni-ZAP XR |
| S0050 | Human Frontal Cortex, | Human Frontal Cortex, | | | disease | Uni-ZAP XR |
| | Schizophrenia | Schizophrenia | | | | |
| S0051 | Human | Human Hypothalamus, | | | disease | Uni-ZAP XR |
| | Hypothalmus, Schizophrenia | Schizophrenia | | | | |
| S0052 | neutrophils control | human neutrophils | blood | Cell Line | | Uni-ZAP XR |
| S0053 | Neutrophils IL-1 and | human neutrophil induced | blood | Cell Line | | Uni-ZAP XR |
| | LPS induced | | | | | |
| S0106 | STRIATUM | | BRAIN | | disease | Uni-ZAP XR |
| | DEPRESSION | | | | | |
| S0110 | Brain Amygdala | | Brain | | disease | Uni-ZAP XR |
| | Depression | | | | | |
| S0112 | Hypothalamus | | Brain | | | Uni-ZAP XR |
| S0114 | Anergic T-cell | Anergic T-cell | | Cell Line | | Uni-ZAP XR |
| S0116 | Bone marrow | Bone marrow | Bone marrow | | | Uni-ZAP XR |
| S0118 | Smooth muscle control 2 | Smooth muscle | Pulmanary | Cell Line | | Uni-ZAP XR |
| | | | artery | | | |
| S0124 | Smooth muscle-edited A | Smooth muscle | Pulmanary | Cell Line | | Uni-ZAP XR |
| | | | artery | | | |
| S0126 | Osteoblasts | Osteoblasts | Knee | Cell Line | | Uni-ZAP XR |
| S0132 | Epithelial-TNFa and | Airway Epithelial | | | | Uni-ZAP XR |
| | INF induced | | | | | |
| S0134 | Apoptotic T-cell | apoptotic cells | | Cell Line | | Uni-ZAP XR |
| S0136 | PERM TF274 | stromal cell | Bone marrow | Cell Line | | Lambda ZAP II |
| S0140 | eosinophil-IL5 induced | eosinophil | lung | Cell Line | | Uni-ZAP XR |
| S0142 | Macrophage-oxLDL | macrophage-oxidized LDL | blood | Cell Line | | Uni-ZAP XR |
| | | treated | | | | |
| S0144 | Macrophage (GM-CSF | Macrophage (GM-CSF | | | | Uni-ZAP XR |
| | treated) | treated) | | | | |
| S0146 | prostate-edited | prostate BPH | Prostate | | | Uni-ZAP XR |
| S0148 | Normal Prostate | Prostate | prostate | | | Uni-ZAP XR |
| S0150 | LNCAP prostate cell | LNCAP Cell Line | Prostate | Cell Line | | Uni-ZAP XR |
| | line | | | | | |
| S0152 | PC3 Prostate cell line | PC3 prostate cell line | | | | Uni-ZAP XR |
| S0176 | Prostate, normal, | Prostate | prostate | | | Uni-ZAP XR |
| | subtraction I | | | | | |
| S0182 | Human B Cell 8866 | Human B-Cell 8866 | | | | Uni-ZAP XR |
| S0188 | Prostate, BPH, Lib 2 | Human Prostate BPH | | | disease | pSport1 |
| S0192 | Synovial Fibroblasts | Synovial Fibroblasts | | | | pSport1 |
| | (control) | | | | | |
| S0194 | Synovial hypoxia | Synovial Fibroblasts | | | | pSport1 |
| S0196 | Synovial IL-1/TNF | Synovial Fibroblasts | | | | pSport1 |
| | stimulated | | | | | |
| S0206 | Smooth Muscle- | Smooth muscle | Pulmanary | Cell Line | | pBluescript |
| | HASTE normalized | | artery | | | |
| S0208 | Messangial cell, frac 1 | Messangial cell | | | | pSport1 |
| S0210 | Messangial cell, frac 2 | Messangial cell | | | | pSport1 |
| S0212 | Bone Marrow Stromal | Bone Marrow Stromal | | | | pSport1 |
| | Cell, untreated | Cell, untreated | | | | |
| S0214 | Human Osteoclastoma, | Osteoclastoma | bone | | disease | Uni-ZAP XR |
| | re-excision | | | | | |
| S0216 | Neutrophils IL-1 and | human neutrophil induced | blood | Cell Line | | Uni-ZAP XR |
| | LPS induced | | | | | |
| S0218 | Apoptotic T-cell, re- | apoptotic cells | | Cell Line | | Uni-ZAP XR |
| | excision | | | | | |
| S0220 | H. hypothalamus, frac | Hypothalamus | Brain | | | ZAP Express |
| | A; re-excision | | | | | |
| S0222 | H. Frontal | H. Brain, Frontal Cortex, | Brain | | disease | Uni-ZAP XR |
| | cortex, epileptic; re- | Epileptic | | | | |
| | excision | | | | | |
| S0242 | Synovial Fibroblasts | Synovial Fibroblasts | | | | pSport1 |
| | (Il1/TNF), subt | | | | | |
| S0250 | Human Osteoblasts II | Human Osteoblasts | Femur | | disease | pCMVSport 2.0 |
| S0260 | Spinal Cord, re-excision | Spinal cord | spinal cord | | | Uni-ZAP XR |
| S0276 | Synovial hypoxia-RSF | Synovial fobroblasts | Synovial tissue | | | pSport1 |
| | subtracted | (rheumatoid) | | | | |
| S0278 | H Macrophage (GM- | Macrophage (GM-CSF | | | | Uni-ZAP XR |
| | CSF treated), re- | treated) | | | | |
| | excision | | | | | |
| S0280 | Human Adipose Tissue, | Human Adipose Tissue | | | | Uni-ZAP XR |
| | re-excision | | | | | |
| S0282 | Brain Frontal Cortex, | Brain frontal cortex | Brain | | | Lambda ZAP II |
| | re-excision | | | | | |
| S0292 | Osteoarthritis (OA-4) | Human Osteoarthritic | Bone | | disease | pSport1 |
| | | Cartilage | | | | |
| S0294 | Larynx tumor | Larynx tumor | Larynx, vocal | | disease | pSport1 |
| | | | cord | | | |
| S0298 | Bone marrow | Bone marrow | Bone marrow | | | pSport1 |
| | stroma, treated | stroma, treatedSB | | | | |
| S0300 | Frontal | Frontal Lobe | Brain | | | Uni-ZAP XR |
| | lobe, dementia; re- | dementia/Alzheimer''s | | | | |
| | excision | | | | | |
| S0306 | Larynx normal #10 261-273 | Larynx normal | | | | pSport1 |
| S0308 | Spleen/normal | Spleen normal | | | | pSport1 |
| S0310 | Normal trachea | Normal trachea | | | | pSport1 |
| S0312 | Human | Human osteoarthritic | | | disease | pSport1 |
| | osteoarthritic; fraction II | cartilage | | | | |
| S0314 | Human | Human osteoarthritic | | | disease | pSport1 |
| | osteoarthritis; fraction I | cartilage | | | | |
| S0322 | Siebben Polyposis | Siebben Polyposis | | | | pSport1 |
| S0328 | Palate carcinoma | Palate carcinoma | Uvula | | disease | pSport1 |
| S0330 | Palate normal | Palate normal | Uvula | | | pSport1 |
| S0332 | Pharynx carcinoma | Pharynx carcinoma | Hypopharynx | | | pSport1 |
| S0340 | Human Osteoarthritic | Human osteoarthritic | | | disease | pSport1 |
| | Cartilage Fraction IV | cartilage | | | | |
| S0342 | Adipocytes; re-excision | Human Adipocytes from | | | | Uni-ZAP XR |
| | | Osteoclastoma | | | | |
| S0344 | Macrophage-oxLDL; | macrophage-oxidized LDL | blood | Cell Line | | Uni-ZAP XR |
| | re-excision | treated | | | | |
| S0346 | Human Amygdala; re- | Amygdala | | | | Uni-ZAP XR |
| | excision | | | | | |
| S0350 | Pharynx Carcinoma | Pharynx carcinoma | Hypopharynx | | disease | pSport1 |
| S0352 | Larynx Carcinoma | Larynx carcinoma | | | disease | pSport1 |
| S0354 | Colon Normal II | Colon Normal | Colon | | | pSport1 |
| S0356 | Colon Carcinoma | Colon Carcinoma | Colon | | disease | pSport1 |
| S0358 | Colon Normal III | Colon Normal | Colon | | | pSport1 |
| S0360 | Colon Tumor II | Colon Tumor | Colon | | disease | pSport1 |
| S0362 | Human Gastrocnemius | Gastrocnemius muscle | | | | pSport1 |
| S0364 | Human Quadriceps | Quadriceps muscle | | | | pSport1 |
| S0366 | Human Soleus | Soleus Muscle | | | | pSport1 |
| S0370 | Larynx carcinoma II | Larynx carcinoma | | | disease | pSport1 |
| S0372 | Larynx carcinoma III | Larynx carcinoma | | | disease | pSport1 |
| S0374 | Normal colon | Normal colon | | | | pSport1 |
| S0376 | Colon Tumor | Colon Tumor | | | disease | pSport1 |
| S0378 | Pancreas normal PCA4 | Pancreas Normal PCA4 No | | | | pSport1 |
| | No | | | | | |
| S0380 | Pancreas Tumor PCA4 | Pancreas Tumor PCA4 Tu | | | disease | pSport1 |
| | Tu | | | | | |
| S0382 | Larynx carcinoma IV | Larynx carcinoma | | | disease | pSport1 |
| S0384 | Tongue carcinoma | Tongue carcinoma | | | disease | pSport1 |
| S0386 | Human Whole Brain, | Whole brain | Brain | | | ZAP Express |
| | re-excision | | | | | |
| S0388 | Human | Human Hypothalamus, | | | disease | Uni-ZAP XR |
| | Hypothalamus, schizophrenia, | Schizophrenia | | | | |
| | re-excision | | | | | |
| S0390 | Smooth muscle, control; | Smooth muscle | Pulmanary | Cell Line | | Uni-ZAP XR |
| | re-excision | | artery | | | |
| S0392 | Salivary Gland | Salivary gland; normal | | | | pSport1 |
| S0394 | Stomach; normal | Stomach; normal | | | | pSport1 |
| S0398 | Testis; normal | Testis; normal | | | | pSport1 |
| S0404 | Rectum normal | Rectum, normal | | | | pSport1 |
| S0406 | Rectum tumour | Rectum tumour | | | | pSport1 |
| S0408 | Colon, normal | Colon, normal | | | | pSport1 |

Description of Table 5

[0167] Table 5 provides a key to the OMIM reference identification numbers disclosed in Table 1B.1 OMIM reference identification numbers (Column 1) were derived from Online Mendelian Inheritance in Man (Online Mendelian Inheritance in Man, OMIM. McKusick-Nathans Institute of Genetic Medicine, Johns Hopkins University (Baltimore, Md.) and National Center For Biotechnology Information, National Library of Medicine, (Bethesda, Md.) 2000. World Wide Web URL: http://www.ncbi.nlm.nih.gov/omim/). Column 2 provides diseases associated with the cytologic band disclosed in Table 1B.1, as determined using the Morbid Map database.

TABLE 5

| OMIM | |
|---|---|
| Reference | Description |
| 100710 | Myasthenic syndrome, slow-channel congenital, 601462 |
| 102200 | Somatotrophinoma |
| 102700 | Severe combined immunodeficiency due to ADA deficiency |
| 102700 | Hemolytic anemia due to ADA excess |
| 102770 | Myoadenylate deaminase deficiency |
| 103050 | Autism, succinylpurinemic |
| 103050 | Adenylosuccinase deficiency |
| 103581 | Albright hereditary osteodystrophy-2 |
| 103600 | [Dysalbuminemic hyperthyroxinemia] |
| 103600 | [Dysalbuminemic hyperzincemia], 194470 |
| 103600 | Analbuminemia |
| 103950 | Emphysema due to alpha-2-macroglobulin deficiency |
| 104150 | [AFP deficiency, congenital] |
| 104150 | [Hereditary persistence of alpha-fetoprotein] |
| 104500 | Amelogenesis imperfecta-2, hypoplastic local type |
| 106100 | Angioedema, hereditary |
| 106150 | Hypertension, essential, susceptibility to |
| 106150 | Preeclampsia, susceptibility to |
| 106165 | Hypertension, essential, 145500 |
| 106180 | Myocardial infarction, susceptibility to |
| 107250 | Anterior segment mesenchymal dysgenesis |
| 107300 | Antithrombin III deficiency |
| 107777 | Diabetes insipidus, nephrogenic, autosomal recessive, 222000 |
| 108725 | Atherosclerosis, susceptibility to |
| 108985 | Atrophia areata |
| 110100 | Blepharophimosis, epicanthus inversus, and ptosis, type 1 |
| 112410 | Hypertension with brachydactyly |
| 114240 | Muscular dystrophy, limb-girdle, type 2A, 253600 |
| 116806 | Colorectal cancer |
| 116860 | Cavernous angiomatous malformations |
| 117700 | [Hypoceruloplasminemia, hereditary] |
| 117700 | Hemosiderosis, systemic, due to aceruloplasminemia |
| 118210 | Charcot-Marie-Tooth neuropathy-2A |
| 120070 | Alport syndrome, autosomal recessive, 203780 |
| 120120 | Epidermolysis bullosa dystrophica, dominant, 131750 |
| 120120 | Epidermolysis bullosa dystrophica, recessive, 226600 |
| 120120 | Epidermolysis bullosa, pretibial, 131850 |
| 120131 | Alport syndrome, autosomal recessive, 203780 |
| 120131 | Hematuria, familial benign |
| 120140 | Osteoarthrosis, precocious |
| 120140 | SED congenita |
| 120140 | SMED Strudwick type |
| 120140 | Stickler syndrome, type I |
| 120140 | Wagner syndrome, type II |
| 120140 | Achondrogenesis-hypochondrogenesis, type II |
| 120140 | Kniest dysplasia |
| 120260 | Epiphyseal dysplasia, multiple, type 2, 600204 |
| 120436 | Muir-Torre family cancer syndrome, 158320 |
| 120436 | Turcot syndrome with glioblastoma, 276300 |
| 120436 | Colorectal cancer, hereditary nonpolyposis, type 2 |
| 120550 | C1q deficiency, type A |
| 120570 | C1q deficiency, type B |
| 120575 | C1q deficiency, type C |
| 120700 | C3 deficiency |
| 121800 | Corneal dystrophy, crystalline, Schnyder |
| 123000 | Craniometaphyseal dysplasia |
| 123620 | Cataract, cerulean, type 2, 601547 |
| 123940 | White sponge nevus, 193900 |
| 124030 | Parkinsonism, susceptibility to |
| 124030 | Debrisoquine sensitivity |
| 125852 | Insulin-dependent diabetes mellitus-2 |
| 126337 | Myxoid liposarcoma |
| 126451 | Schizophrenia, susceptibility to |
| 126452 | Autonomic nervous system dysfunction |
| 126452 | [Novelty seeking personality] |
| 126650 | Chloride diarrhea, congenital, Finnish type, 214700 |
| 126650 | Colon cancer |
| 129900 | EEC syndrome-1 |
| 130500 | Elliptocytosis-1 |
| 130650 | Beckwith-Wiedemann syndrome |
| 131100 | Multiple endocrine neoplasia I |
| 131100 | Prolactinoma, hyperparathyroidism, carcinoid syndrome |
| 131100 | Carcinoid tumor of lung |
| 131210 | Atherosclerosis, susceptibility to |
| 133171 | [Erythrocytosis, familial], 133100 |
| 133200 | Erythrokeratodermia variabilis |
| 133450 | Neuroepithelioma |
| 133450 | Ewing sarcoma |
| 133780 | Vitreoretinopathy, exudative, familial |
| 134790 | Hyperferritinemia-cataract syndrome, 600886 |
| 134820 | Dysfibrinogenemia, alpha type, causing bleeding diathesis |
| 134820 | Dysfibrinogenemia, alpha type, causing recurrent thrombosis |
| 134820 | Amyloidosis, hereditary renal, 105200 |
| 134830 | Dysfibrinogenemia, beta type |
| 134850 | Dysfibrinogenemia, gamma type |
| 134850 | Hypofibrinogenemia, gamma type |
| 135700 | Fibrosis of extraocular muscles, congenital, 1 |
| 136132 | [Fish-odor syndrome], 602079 |
| 136836 | Fucosyltransferase-6 deficiency |
| 138030 | [Hyperproglucagonemia] |
| 138140 | Glucose transport defect, blood-brain barrier |
| 138190 | Diabetes mellitus, noninsulin-dependent |
| 138300 | Hemolytic anemia due to glutathione reductase deficiency |
| 138320 | Hemolytic anemia due to glutathione peroxidase deficiency |
| 138700 | [Apolipoprotein H deficiency] |
| 120436 | Muir-Torre family cancer syndrome, 158320 |
| 120436 | Turcot syndrome with glioblastoma, 276300 |
| 120436 | Colorectal cancer, hereditary nonpolyposis, type 2 |
| 120550 | C1q deficiency, type A |
| 120570 | C1q deficiency, type B |
| 120575 | C1q deficiency, type C |
| 120700 | C3 deficiency |
| 121800 | Corneal dystrophy, crystalline, Schnyder |
| 123000 | Craniometaphyseal dysplasia |
| 123620 | Cataract, cerulean, type 2, 601547 |
| 123940 | White sponge nevus, 193900 |
| 124030 | Parkinsonism, susceptibility to |
| 124030 | Debrisoquine sensitivity |
| 125852 | Insulin-dependent diabetes mellitus-2 |
| 126337 | Myxoid liposarcoma |
| 126451 | Schizophrenia, susceptibility to |
| 126452 | Autonomic nervous system dysfunction |
| 126452 | [Novelty seeking personality] |
| 126650 | Chloride diarrhea, congenital, Finnish type, 214700 |
| 126650 | Colon cancer |
| 129900 | EEC syndrome-1 |
| 130500 | Elliptocytosis-1 |
| 130650 | Beckwith-Wiedemann syndrome |
| 131100 | Multiple endocrine neoplasia I |
| 131100 | Prolactinoma, hyperparathyroidism, carcinoid syndrome |
| 131100 | Carcinoid tumor of lung |
| 131210 | Atherosclerosis, susceptibility to |
| 133171 | [Erythrocytosis, familial], 133100 |
| 133200 | Erythrokeratodermia variabilis |
| 133450 | Neuroepithelioma |
| 133450 | Ewing sarcoma |
| 133780 | Vitreoretinopathy, exudative, familial |
| 134790 | Hyperferritinemia-cataract syndrome, 600886 |
| 134820 | Dysfibrinogenemia, alpha type, causing bleeding diathesis |
| 134820 | Dysfibrinogenemia, alpha type, causing recurrent thrombosis |
| 134820 | Amyloidosis, hereditary renal, 105200 |
| 134830 | Dysfibrinogenemia, beta type |
| 134850 | Dysfibrinogenemia, gamma type |
| 134850 | Hypofibrinogenemia, gamma type |
| 135700 | Fibrosis of extraocular muscles, congenital, 1 |
| 136132 | [Fish-odor syndrome], 602079 |
| 136836 | Fucosyltransferase-6 deficiency |
| 138030 | [Hyperproglucagonemia] |
| 138140 | Glucose transport defect, blood-brain barrier |
| 138190 | Diabetes mellitus, noninsulin-dependent |
| 138300 | Hemolytic anemia due to glutathione reductase deficiency |
| 138320 | Hemolytic anemia due to glutathione peroxidase deficiency |
| 138700 | [Apolipoprotein H deficiency] |
| 138720 | Bernard-Soulier syndrome, type B |
| 138981 | Pulmonary alveolar proteinosis, 265120 |
| 139250 | Isolated growth hormone deficiency, Illig type with absent GH and |
| | Kowarski type with bioinactive GH |
| 139350 | Epidermolytic hyperkeratosis, 113800 |
| 139350 | Keratoderma, palmoplantar, nonepidermolytic |
| 141750 | Alpha-thalassemia/mental retardation syndrome, type 1 |
| 141800 | Methemoglobinemias, alpha- |
| 141800 | Thalassemias, alpha- |
| 141800 | Erythremias, alpha- |
| 141800 | Heinz body anemias, alpha- |
| 141850 | Thalassemia, alpha- |
| 141850 | Erythrocytosis |
| 141850 | Heinz body anemia |
| 141850 | Hemoglobin H disease |
| 141850 | Hypochromic microcytic anemia |
| 141900 | Methemoglobinemias, beta- |
| 141900 | Sickle cell anemia |
| 141900 | Thalassemias, beta- |
| 141900 | Erythremias, beta- |
| 141900 | HPFH, deletion type |
| 141900 | Heinz body anemias, beta- |
| 142000 | Thalassemia due to Hb Lepore |
| 142000 | Thalassemia, delta- |
| 142200 | HPFH, nondeletion type A |
| 142250 | HPFH, nondeletion type G |
| 142270 | Hereditary persistence of fetal hemoglobin |
| 143890 | Hypercholesterolemia, familial |
| 145001 | Hyperparathyroidism-jaw tumor syndrome |
| 145260 | Pseudohypoaldosteronism, type II |
| 145410 | Opitz G syndrome, type II |
| 145981 | Hypocalciuric hypercalcemia, type II |
| 146150 | Hypomelanosis of Ito |
| 147050 | Atopy |
| 147141 | Leukemia, acute lymphoblastic |
| 147200 | [Kappa light chain deficiency] |
| 147545 | Diabetes mellitus, noninsulin-dependent |
| 147670 | Rabson-Mendenhall syndrome |
| 147670 | Diabetes mellitus, insulin-resistant, with acanthosis nigricans |
| 147670 | Leprechaunism |
| 148040 | Epidermolysis bullosa simplex, Koebner, Dowling-Meara, and Weber- |
| | Cockayne types, 131900, 131760, 131800 |
| 148041 | Pachyonychia congenita, Jadassohn-Lewandowsky type, 167200 |
| 148043 | Meesmann corneal dystrophy, 122100 |
| 148070 | Liver disease, susceptibility to, from hepatotoxins or viruses |
| 148370 | Keratolytic winter erythema |
| 150000 | Exertional myoglobinuria due to deficiency of LDH-A |
| 150200 | [Placental lactogen deficiency] |
| 150210 | Lactoferrin-deficient neutrophils, 245480 |
| 151410 | Leukemia, chronic myeloid |
| 151440 | Leukemia, T-cell acute lymphoblastoid |
| 152760 | Hypogonadotropic hypogonadism due to GNRH deficiency, 227200 |
| 153454 | Ehlers-Danlos syndrome, type VI, 225400 |
| 153700 | Macular dystrophy, vitelliform type |
| 154275 | Malignant hyperthermia susceptibility 2 |
| 154276 | Malignant hyperthermia susceptibility 3 |
| 156850 | Cataract, congenital, with microphthalmia |
| 157147 | Abetalipoproteinemia, 200100 |
| 157640 | PEO with mitochondrial DNA deletions, type 1 |
| 160781 | Cardiomyopathy, hypertrophic, mid-left ventricular chamber type |
| 161015 | Mitochondrial complex I deficiency, 252010 |
| 162200 | Neurofibromatosis, type 1 |
| 162200 | Watson syndrome, 193520 |
| 164009 | Leukemia, acute promyelocytic, NUMA/RARA type |
| 164731 | Ovarian carcinoma, 167000 |
| 164790 | Colorectal cancer |
| 164920 | Piebaldism |
| 164920 | Mast cell leukemia |
| 164920 | Mastocytosis with associated hematologic disorder |
| 164953 | Liposarcoma |
| 168360 | Paraneoplastic sensory neuropathy |
| 168461 | Multiple myeloma, 254250 |
| 168461 | Parathyroid adenomatosis 1 |
| 168461 | Centrocytic lymphoma |
| 168468 | Metaphyseal chondrodysplasia, Murk Jansen type, 156400 |
| 168470 | Humoral hypercalcemia of malignancy |
| 169600 | Hailey—Hailey disease |
| 170650 | Periodontitis, juvenile |
| 171760 | Hypophosphatasia, adult, 146300 |
| 171760 | Hypophosphatasia, infantile, 241500 |
| 172400 | Hemolytic anemia due to glucosephosphate isomerase deficiency |
| 172400 | Hydrops fetalis, one form |
| 173360 | Thrombophilia due to excessive plasminogen activator inhibitor |
| 173360 | Hemorrhagic diathesis due to PAI1 deficiency |
| 173610 | Platelet alpha/delta storage pool deficiency |
| 173870 | Xeroderma pigmentosum |
| 173870 | Fanconi anemia |
| 174900 | Polyposis, juvenile intestinal |
| 176100 | Porphyria cutanea tarda |
| 176100 | Porphyria, hepatoerythropoietic |
| 176730 | Diabetes mellitus, rare form |
| 176730 | Hyperproinsulinemia, familial |
| 176730 | MODY, one form |
| 176830 | Obesity, adrenal insufficiency, and red hair |
| 176830 | ACTH deficiency |
| 176960 | Pituitary tumor, invasive |
| 178300 | Ptosis, hereditary congenital, 1 |
| 178640 | Pulmonary alveolar proteinosis, congenital, 265120 |
| 180100 | Retinitis pigmentosa-1 |
| 180105 | Retinitis pigmentosa-10 |
| 180380 | Night blindness, congenital stationery, rhodopsin-related |
| 180380 | Retinitis pigmentosa, autosomal recessive |
| 180380 | Retinitis pigmentosa-4, autosomal dominant |
| 180721 | Retinitis pigmentosa, digenic |
| 180840 | Susceptibility to IDDM |
| 180901 | Malignant hyperthermia susceptibility 1, 145600 |
| 180901 | Central core disease, 117000 |
| 181405 | Scapuloperoneal spinal muscular atrophy, New England type |
| 181430 | Scapuloperoneal syndrome, myopathic type |
| 181600 | Sclerotylosis |
| 182138 | Anxiety-related personality traits |
| 182279 | Prader-Willi syndrome |
| 182280 | Small-cell cancer of lung |
| 182380 | Glucose/galactose malabsorption |
| 182601 | Spastic paraplegia-4 |
| 185430 | Atherosclerosis, susceptibility to |
| 185470 | Myopathy due to succinate dehydrogenase deficiency |
| 186580 | Arthrocutaneouveal granulomatosis |
| 186921 | Leukemia, T-cell acute lymphoblastic |
| 188070 | Bleeding disorder due to defective thromboxane A2 receptor |
| 188450 | Goiter, adolescent multinodular |
| 188450 | Goiter, nonendemic, simple |
| 188450 | Hypothyroidism, hereditary congenital |
| 188826 | Sorsby fundus dystrophy, 136900 |
| 189800 | Preeclampsia/eclampsia |
| 190020 | Bladder cancer, 109800 |
| 190040 | Meningioma, SIS-related |
| 190040 | Dermatofibrosarcoma protuberans |
| 190040 | Giant-cell fibroblastoma |
| 190900 | Colorblindness, tritan |
| 191044 | Cardiomyopathy, familial hypertrophic |
| 191092 | Tuberous sclerosis-2 |
| 191170 | Colorectal cancer, 114500 |
| 191170 | Li-Fraumeni syndrome |
| 191181 | Cervical carcinoma |
| 191290 | Segawa syndrome, recessive |
| 192340 | Diabetes insipidus, neurohypophyseal, 125700 |
| 192500 | Jervell and Lange-Nielsen syndrome, 220400 |
| 192500 | Long QT syndrome-1 |
| 193100 | Hypophosphatemic rickets, autosomal dominant |
| 193235 | Vitreoretinopathy, neovascular inflammatory |
| 193400 | von Willebrand disease |
| 194071 | Wilms tumor, type 2 |
| 194071 | Adrenocortical carcinoma, hereditary, 202300 |
| 200990 | Acrocallosal syndrome |
| 203100 | Waardenburg syndrome/ocular albinism, digenic, 103470 |
| 203100 | Albinism, oculocutaneous, type IA |
| 203200 | Albinism, ocular, autosomal recessive |
| 203200 | Albinism, oculocutaneous, type II |
| 203500 | Alkaptonuria |
| 203800 | Alstrom syndrome |
| 204500 | Ceroid-lipofuscinosis, neuronal 2, classic late infantile |
| 209901 | Bardet-Biedl syndrome 1 |
| 212138 | Carnitine-acylcarnitine translocase deficiency |
| 216900 | Achromatopsia |
| 221770 | Polycystic lipomembranous osteodysplasia with sclerosing |
| | leukencephalopathy |
| 222800 | Hemolytic anemia due to bisphosphoglycerate mutase deficiency |
| 224120 | Dyserythropoietic anemia, contenital, type I |
| 227220 | [Eye color, brown] |
| 227646 | Fanconi anemia, type D |
| 229800 | [Fructosuria] |
| 230000 | Fucosidosis |
| 230350 | Galactose epimerase deficiency |
| 231550 | Achalasia-addisonianism-alacrimia syndrome |
| 231670 | Glutaricaciduria, type I |
| 231950 | Glutathioninuria |
| 232050 | Propionicacidemia, type II or pccB type |
| 232600 | McArdle disease |
| 233700 | Chronic granulomatous disease due to deficiency of NCF-1 |
| 234200 | Neurodegeneration with brain iron accumulation |
| 236730 | Urofacial syndrome |
| 238600 | Chylomicronemia syndrome, familial |
| 238600 | Combined hyperlipemia, familial |
| 238600 | Hyperlipoproteinemia I |
| 238600 | Lipoprotein lipase deficiency |
| 239100 | Van Buchem disease |
| 239500 | Hyperprolinemia, type I |
| 240400 | Scurvy |
| 245000 | Papillon-Lefevre syndrome |
| 246450 | HMG-CoA lyase deficiency |
| 246900 | Lipoamide dehydrogenase deficiency |
| 248510 | Mannosidosis, beta- |
| 248600 | Maple syrup urine disease, type Ia |
| 248611 | Maple syrup urine disease, type Ib |
| 249000 | Meckel syndrome |
| 249270 | Thiamine-responsive megaloblastic anemia |
| 253250 | Mulibrey nanism |
| 254210 | Myasthenia gravis, familial infantile |
| 255800 | Schwartz-Jampel syndrome |
| 256700 | Neuroblastoma |
| 257200 | Niemann-Pick disease, type A |
| 257200 | Niemann-Pick disease, type B |
| 259700 | Osteopetrosis, recessive |
| 259770 | Osteoporosis-pseudoglioma syndrome |
| 259900 | Hyperoxaluria, primary, type 1 |
| 261510 | Pseudo-Zellweger syndrome |
| 262000 | Bjornstad syndrome |
| 266150 | Pyruvate carboxylase deficiency |
| 266300 | [Hair color, red] |
| 271900 | Canavan disease |
| 274180 | Thromboxane synthase deficiency |
| 275350 | Transcobalamin II deficiency |
| 276901 | Usher syndrome, type 2 |
| 276902 | Usher syndrome, type 3 |
| 276903 | Usher syndrome, type 1B |
| 276903 | Deafness, autosomal dominant 11, neurosensory, 601317 |
| 276903 | Deafness, autosomal recessive 2, neurosensory, 600060 |
| 300046 | Mental retardation, X-linked 23, nonspecific |
| 300088 | Epilepsy, female restricted, with mental retardation |
| 300123 | Mental retardation with isolated growth hormone deficiency |
| 300300 | XLA and isolated growth hormone deficiency, 307200 |
| 300300 | Agammaglobulinemia, type 1, X-linked |
| 301201 | Amelogenesis imperfecta-3, hypoplastic type |
| 301500 | Fabry disease |
| 301590 | Anophthalmos-1 |
| 301835 | Arts syndrome |
| 301845 | Bazex syndrome |
| 301900 | Borjeson-Forssman-Lehmann syndrome |
| 303400 | Cleft palate, X-linked |
| 303630 | Alport syndrome, 301050 |
| 303630 | Leiomyomatosis-nephropathy syndrome, 308940 |
| 303631 | Leiomyomatosis, diffuse, with Alport syndrome |
| 304340 | Mental retardation, X-linked, syndromic-5, with Dandy-Walker |
| | malformation, basal ganglia disease, and seizures |
| 304500 | Deafness, X-linked 2, perceptive congenital |
| 304700 | Mohr-Tranebjaerg syndrome |
| 304700 | Deafness, X-linked 1, progressive |
| 304700 | Jensen syndrome, 311150 |
| 305450 | FG syndrome |
| 306900 | Hemophilia B |
| 307150 | Hypertrichosis, congenital generalized |
| 307700 | Hypoparathyroidism, X-linked |
| 308000 | HPRT-related gout |
| 308000 | Lesch-Nyhan syndrome |
| 309000 | Lowe syndrome |
| 309300 | Megalocornea, X-linked |
| 309605 | Mental retardation, X-linked, syndromic-4, with congenital contractures and |
| | low fingertip arches |
| 310490 | Cowchock syndrome |
| 311850 | Phosphoribosyl pyrophosphate synthetase-related gout |
| 312080 | Pelizaeus-Merzbacher disease |
| 312080 | Spastic paraplegia-2, 312920 |
| 313850 | Thoracoabdominal syndrome |
| 600040 | Colorectal cancer |
| 600045 | Xeroderma pigmentosum, group E, subtype 2 |
| 600079 | Colon cancer |
| 600138 | Retinitis pigmentosa-11 |
| 600140 | Rubenstein-Taybi syndrome, 180849 |
| 600143 | Epilepsy, progressive, with mental retardation |
| 600163 | Long QT syndrome-3 |
| 600179 | Leber congenital amaurosis, type I, 204000 |
| 600194 | Ichthyosis bullosa of Siemens, 146800 |
| 600231 | Palmoplantar keratoderma, Bothnia type |
| 600273 | Polycystic kidney disease, infantile severe, with tuberous sclerosis |
| 600276 | Cerebral arteriopathy with subcortical infarcts and leukoencephalopathy, |
| | 125310 |
| 600319 | Diabetes mellitus, insulin-dependent, 4 |
| 600332 | Rippling muscle disease-1 |
| 600512 | Epilepsy, partial |
| 600528 | CPT deficiency, hepatic, type I, 255120 |
| 600536 | Myopathy, congenital |
| 600698 | Salivary adenoma |
| 600698 | Uterine leiomyoma |
| 600698 | Lipoma |
| 600698 | Lipomatosis, mutiple, 151900 |
| 600759 | Alzheimer disease-4 |
| 600808 | Enuresis, nocturnal, 2 |
| 600839 | Bartter syndrome, 241200 |
| 600850 | Schizophrenia disorder-4 |
| 600856 | Beckwith-Wiedemann syndrome, 130650 |
| 600881 | Cataract, congenital, zonular, with sutural opacities |
| 600882 | Charcot-Marie-Tooth neuropathy-2B |
| 600900 | Muscular dystrophy, limb-girdle, type 2E |
| 600918 | Cystinuria, type III |
| 600956 | Persistent Mullerian duct syndrome, type II, 261550 |
| 600957 | Persistent Mullerian duct syndrome, type I, 261550 |
| 600977 | Cone dystrophy, progressive |
| 600983 | Pseudohypoaldosteronism type I, autosomal dominant, 177735 |
| 600996 | Arrhythmogenic right ventricular dysplasia-2 |
| 601154 | Cardiomyopathy, dilated, 1E |
| 601199 | Neonatal hyperparathyroidism, 239200 |
| 601199 | Hypocalcemia, autosomal dominant, 601198 |
| 601199 | Hypocalciuric hypercalcemia, type I, 145980 |
| 601202 | Cataract, anterior polar-2 |
| 601238 | Cerebellar ataxia, Cayman type |
| 601284 | Hereditary hemorrhagic telangiectasia-2, 600376 |
| 601313 | Polycystic kidney disease, adult type I, 173900 |
| 601385 | Prostate cancer |
| 601414 | Retinitis pigmentosa-18 |
| 601458 | Inflammatory bowel disease-2 |
| 601471 | Moebius syndrome-2 |
| 601623 | Angelman syndrome |
| 601652 | Glaucoma 1A, primary open angle, juvenile-onset, 137750 |
| 601669 | Hirschsprung disease, one form |
| 601680 | Distal arthrogryposis, type 2B |
| 601682 | Glaucoma 1C, primary open angle |
| 601691 | Retinitis pigmentosa-19, 601718 |
| 601691 | Stargardt disease-1, 248200 |
| 601691 | Cone-rod dystrophy 3 |
| 601691 | Fundus flavimaculatus with macular dystrophy, 248200 |
| 601718 | Retinitis pigmentosa-19 |
| 601744 | Systemic lupus erythematosus, susceptibility to, 1 |
| 601769 | Osteoporosis, involutional |
| 601769 | Rickets, vitamin D-resistant, 277440 |
| 601777 | Cone dystrophy, progressive |
| 601785 | Carbohydrate-deficient glycoprotein syndrome, type I, 212065 |
| 601800 | [Hair color, brown] |
| 601843 | Hypothyroidism, congenital, 274400 |
| 601846 | Muscular dystrophy with rimmed vacuoles |
| 601884 | [High bone mass] |
| 601889 | Lymphoma, diffuse large cell |
| 601928 | Monilethrix, 158000 |
| 601954 | Muscular dystrophy, limb-girdle, type 2G |
| 601975 | Ectodermal dysplasia/skin fragility syndrome |
| 602025 | Obesity/hyperinsulinism, susceptibility to |
| 602092 | Deafness, autosomal recessive 18 |
| 602094 | Lipodystrophy, familial partial |
| 602099 | Amytrophic lateral sclerosis-5 |
| 602116 | Glioma |
| 602117 | Prader-Willi syndrome |
| 602134 | Tremor, familial essential, 2 |
| 602136 | Refsum disease, infantile, 266510 |
| 602136 | Zellweger syndrome-1, 214100 |
| 602136 | Adrenoleukodystrophy, neonatal, 202370 |
| 602153 | Monilethrix, 158000 |
| 602216 | Peutz-Jeghers syndrome, 175200 |
| 602403 | Alzheimer disease, susceptibility to |
| 602447 | Coronary artery disease, susceptibility to |
| 602477 | Febrile convulsions, familial, 2 |
| 602568 | Homocystinuria-megaloblastic anemia, cbl E type, 236270 |
| 602574 | Deafness, autosomal dominant 12, 601842 |
| 602574 | Deafness, autosomal dominant 8, 601543 |
| 602629 | Dystonia-6, torsion |
| 602631 | Rhabdomyosarcoma, 268210 |
| 602631 | Breast Cancer |
| 602716 | Nephrosis-1, congenital, Finnish type, 256300 |
| 602771 | Muscular dystrophy, congenital, with early spine rigidity |
| 601744 | Systemic lupus erythematosus, susceptibility to, 1 |
| 601769 | Osteoporosis, involutional |
| 601769 | Rickets, vitamin D-resistant, 277440 |
| 601777 | Cone dystrophy, progressive |
| 601785 | Carbohydrate-deficient glycoprotein syndrome, type I, 212065 |
| 601800 | [Hair color, brown] |
| 601843 | Hypothyroidism, congenital, 274400 |
| 601846 | Muscular dystrophy with rimmed vacuoles |
| 601884 | [High bone mass] |
| 601889 | Lymphoma, diffuse large cell |
| 601928 | Monilethrix, 158000 |
| 601954 | Muscular dystrophy, limb-girdle, type 2G |
| 601975 | Ectodermal dysplasia/skin fragility syndrome |
| 602025 | Obesity/hyperinsulinism, susceptibility to |
| 602092 | Deafness, autosomal recessive 18 |
| 602094 | Lipodystrophy, familial partial |
| 602099 | Amytrophic lateral sclerosis-5 |
| 602116 | Glioma |
| 602117 | Prader-Willi syndrome |
| 602134 | Tremor, familial essential, 2 |
| 602136 | Refsum disease, infantile, 266510 |
| 602136 | Zellweger syndrome-1, 214100 |
| 602136 | Adrenoleukodystrophy, neonatal, 202370 |
| 602153 | Monilethrix, 158000 |
| 602216 | Peutz-Jeghers syndrome, 175200 |
| 602403 | Alzheimer disease, susceptibility to |
| 602447 | Coronary artery disease, susceptibility to |
| 602477 | Febrile convulsions, familial, 2 |
| 602568 | Homocystinuria-megaloblastic anemia, cbl E type, 236270 |
| 602574 | Deafness, autosomal dominant 12, 601842 |
| 602574 | Deafness, autosomal dominant 8, 601543 |
| 602629 | Dystonia-6, torsion |
| 602631 | Rhabdomyosarcoma, 268210 |
| 602631 | Breast Cancer |
| 602716 | Nephrosis-1, congenital, Finnish type, 256300 |
| 602771 | Muscular dystrophy, congenital, with early spine rigidity |

Mature Polypeptides

[0168] The present invention also encompasses mature forms of a polypeptide having the amino acid sequence of SEQ ID NO:Y and/or the amino acid sequence encoded by the cDNA in a deposited clone. Polynucleotides encoding the mature forms (such as, for example, the polynucleotide sequence in SEQ ID NO:X and/or the polynucleotide sequence contained in the cDNA of a deposited clone) are also encompassed by the invention. Moreover, fragments or varients of these polypeptides (such as, fragments as described herein, polypeptides at least 80%, 85%, 90%, 95%, 96%, 97%, 98%, 99%, or 100% identical to these polypeptides, or polypeptides encoded by a polynucleotide that hybridizes under stringent conditions to the complementary strand of the polynucleotide encoding these polypeptides) are also encompassed by the invention. In preferred embodiments, these fragments or variants retain one or more functional acitivities of the full-length or mature form of the polypeptide (e.g., biological activity (such as, for example, activity useful in detecting, preventing, diagnosing, prognosticating, treating, and/or ameliorating cardiovascular disorders), antigenicity (ability to bind, or compete with a polypeptide of the invention for binding, to an anti-polypeptide of the invention antibody), immunogenicity (ability to generate antibody which binds to a specific polypeptide of the invention), ability to form multimers with polypeptides of the invention, and ability to bind to a receptor or ligand for a polypeptide of the invention). Antibodies that bind the polypeptides of the invention, and polynucleotides encoding these polypeptides are also encompassed by the invention.

[0169] According to the signal hypothesis, proteins secreted by mammalian cells have a signal or secretary leader sequence which is cleaved from the mature protein once export of the growing protein chain across the rough endoplasmic reticulum has been initiated. Most mammalian cells and even insect cells cleave secreted proteins with the same specificity. However, in some cases, cleavage of a secreted protein is not entirely uniform, which results in two or more mature species of the protein. Further, it has long been known that cleavage specificity of a secreted protein is ultimately determined by the primary structure of the complete protein, that is, it is inherent in the amino acid sequence of the polypeptide.

[0170] Methods for predicting whether a protein has a signal sequence, as well as the cleavage point for that sequence, are available. For instance, the method of McGeoch, Virus Res. 3:271-286 (1985), uses the information from a short N-terminal charged region and a subsequent uncharged region of the complete (uncleaved) protein. The method of von Heinje, Nucleic Acids Res. 14:46834690 (1986) uses the information from the residues surrounding the cleavage site, typically residues −13 to +2, where +1 indicates the amino terminus of the secreted protein. The accuracy of predicting the cleavage points of known mammalian secretory proteins for each of these methods is in the range of 75-80%. (von Heinje, supra.) However, the two methods do not always produce the same predicted cleavage point(s) for a given protein.

[0171] In the present case, the deduced amino acid sequence of the secreted polypeptide was analyzed by a computer program called SignalP (Henrik Nielsen et al., Protein Engineering 10: 1-6 (1997)), which predicts the cellular location of a protein based on the amino acid sequence. As part of this computational prediction of localization, the methods of McGeoch and von Heinje are incorporated. The analysis of the amino acid sequences of the secreted proteins described herein by this program provided the results shown in Table 1A.

[0172] In specific embodiments, polypeptides of the invention comprise, or alternatively consist of, the predicted mature form of the polypeptide as delineated in columns 14 and 15 of Table 1A. Moreover, fragments or variants of these polypeptides (such as, fragments as described herein, polypeptides at least 80%, 85%, 90%, 95%, 96%, 97%, 98%, 99%, or 100% identical to these polypeptides, or polypeptides encoded by a polynucleotide that hybridizes under stringent conditions to the complementary strand of the polynucleotide encoding these polypeptides) are also encompassed by the invention. In preferred embodiments, these fragments or variants retain one or more functional acitivities of the full-length or mature form of the polypeptide (e.g., biological activity (such as, for example, activity useful in detecting, preventing, diagnosing, prognosticating, treating, and/or ameliorating cardiovascular disorders), antigenicity (ability to bind, or compete with a polypeptide of the invention for binding, to an anti-polypeptide of the invention antibody), immunogenicity (ability to generate antibody which binds to a specific polypeptide of the invention), ability to form multimers with polypeptides of the invention, and ability to bind to a receptor or ligand for a polypeptide of the invention). Antibodies that bind the polypeptides of the invention, and polynucleotides encoding these polypeptides are also encompassed by the invention.

[0173] Polynucleotides encoding proteins comprising, or consisting of, the predicted mature form of polypeptides of the invention (e.g., polynucleotides having the sequence of SEQ ID NO: X (Table 1A, column 4), the sequence delineated in columns 7 and 8 of Table 1A, and a sequence encoding the mature polypeptide delineated in columns 14 and 15 of Table 1A (e.g., the sequence of SEQ ID NO:X encoding the mature polypeptide delineated in columns 14 and 15 of Table 1)) are also encompassed by the invention, as are fragments or variants of these polynucleotides (such as, fragments as described herein, polynucleotides at least 80%, 85%, 90%, 95%, 96%, 97%, 98%, 99%, or 100% identical to these polynucleotides, and nucleic acids which hybridizes under stringent conditions to the complementary strand of the polynucleotide).

[0174] As one of ordinary skill would appreciate, however, cleavage sites sometimes vary from organism to organism and cannot be predicted with absolute certainty. Accordingly, the present invention provides secreted polypeptides having a sequence shown in SEQ ID NO:Y which have an N-terminus beginning within 15 residues of the predicted cleavage point (i.e., having 1, 2, 3, 4, 5, 6, 7, 8, 9, 10, 11, 12, 13, 14, or 15 more or less contiguous residues of SEQ ID NO:Y at the N-terminus when compared to the predicted mature form of the polypeptide (e.g., the mature polypeptide delineated in columns 14 and 15 of Table 1). Similarly, it is also recognized that in some cases, cleavage of the signal sequence from a secreted protein is not entirely uniform, resulting in more than one secreted species. These polypeptides, and the polynucleotides encoding such polypeptides, are contemplated by the present invention.

[0175] Moreover, the signal sequence identified by the above analysis may not necessarily predict the naturally occurring signal sequence. For example, the naturally occurring signal sequence may be further upstream from the predicted signal sequence. However, it is likely that the predicted signal sequence will be capable of directing the secreted protein to the ER. Nonetheless, the present invention provides the mature protein produced by expression of the polynucleotide sequence of SEQ ID NO:X and/or the polynucleotide sequence contained in the cDNA of a deposited clone, in a mammalian cell (e.g., COS cells, as described below). These polypeptides, and the polynucleotides encoding such polypeptides, are contemplated by the present invention.

Polynucleotide and Polypeptide Variants

[0176] The present invention is also directed to variants of the polynucleotide sequence disclosed in SEQ ID NO:X or the complementary strand thereto, nucleotide sequences encoding the polypeptide of SEQ ID NO:Y, the nucleotide sequence of SEQ ID NO:X that encodes the polypeptide sequence as defined in columns 13 and 14 of Table 1A, nucleotide sequences encoding the polypeptide sequence as defined in columns 13 and 14 of Table 1A, the nucleotide sequence of SEQ ID NO:X encoding the polypeptide sequence as defined in column 7 of Table 1B.1, nucleotide sequences encoding the polypeptide as defined in Table 1B.1, the nucleotide sequence as defined in columns 8 and 9 of Table 2, nucleotide sequences encoding the polypeptide encoded by the nucleotide sequence as defined in columns 8 and 9 of Table 2, the nucleotide sequence as defined in column 6 of Table 1C, nucleotide sequences encoding the polypeptide encoded by the nucleotide sequence as defined in column 6 of Table 1C, the cDNA sequence contained in ATCC Deposit No:Z, nucleotide sequences encoding the polypeptide encoded by the cDNA sequence contained in ATCC Deposit No:Z, and/or nucleotide sequences encoding a mature (secreted) polypeptide encoded by the cDNA sequence contained in ATCC Deposit No:Z.

[0177] The present invention also encompasses variants of the polypeptide sequence disclosed in SEQ ID NO:Y, the polypeptide as defined in columns 13 and 14 of Table 1A, the polypeptide sequence as defined in Table 1B.1, a polypeptide sequence encoded by the polynucleotide sequence in SEQ ID NO:X, a polypeptide sequence encoded by the nucleotide sequence as defined in columns 8 and 9 of Table 2, a polypeptide sequence encoded by the nucleotide sequence as defined in column 6 of Table 1C, a polypeptide sequence encoded by the complement of the polynucleotide sequence in SEQ ID NO:X, the polypeptide sequence encoded by the cDNA sequence contained in ATCC Deposit No:Z and/or a mature (secreted) polypeptide encoded by the cDNA sequence contained in ATCC Deposit No:Z.

[0178] “Variant” refers to a polynucleotide or polypeptide differing from the polynucleotide or polypeptide, of the present invention, but retaining essential properties thereof. Generally, variants are overall closely similar, and, in many regions, identical to the polynucleotide or polypeptide of the present invention.

[0179] Thus, one aspect of the invention provides an isolated nucleic acid molecule comprising, or alternatively consisting of, a polynucleotide having a nucleotide sequence selected from the group consisting of: (a) a nucleotide sequence described in SEQ ID NO:X or contained in the cDNA sequence of ATCC Deposit No:Z; (b) a nucleotide sequence in SEQ ID NO:X or the cDNA in ATCC Deposit No:Z which encodes the complete amino acid sequence of SEQ ID NO:Y or the complete amino acid sequence encoded by the cDNA in ATCC Deposit No:Z; (c) a nucleotide sequence in SEQ ID NO:X or the cDNA in ATCC Deposit No:Z which encodes a mature polypeptide (i.e., a secreted polypeptide (e.g., as delineated in columns 14 and 15 of Table 1A)); (d) a nucleotide sequence in SEQ ID NO:X or the cDNA sequence of ATCC Deposit No:Z, which encodes a biologically active fragment of a polypeptide; (e) a nucleotide sequence in SEQ ID NO:X or the cDNA sequence of ATCC Deposit No:Z, which encodes an antigenic fragment of a polypeptide; (f) a nucleotide sequence encoding a polypeptide comprising the complete amino acid sequence of SEQ ID NO:Y or the complete amino acid sequence encoded by the cDNA in ATCC Deposit No:Z; (g) a nucleotide sequence encoding a mature polypeptide of the amino acid sequence of SEQ ID NO:Y (i.e., a secreted polypeptide (e.g., as delineated in columns 14 and 15 of Table 1A)) or a mature polypeptide of the amino acid sequence encoded by the cDNA in ATCC Deposit No:Z; (h) a nucleotide sequence encoding a biologically active fragment of a polypeptide having the complete amino acid sequence of SEQ ID NO:Y or the complete amino acid sequence encoded by the cDNA in ATCC Deposit No:Z; (i) a nucleotide sequence encoding an antigenic fragment of a polypeptide having the complete amino acid sequence of SEQ ID NO:Y or the complete amino acid sequence encoded by the cDNA in ATCC Deposit No:Z; and (O) a nucleotide sequence complementary to any of the nucleotide sequences in (a), (b), (c), (d), (e), (f), (g), (h), or (i) above.

[0180] The present invention is also directed to nucleic acid molecules which comprise, or alternatively consist of, a nucleotide sequence which is at least 80%, 85%, 90%, 95%, 96%, 97%, 98%, 99% or 100%, identical to, for example, any of the nucleotide sequences in (a), (b), (c), (d), (e), (f), (g), (h), (i), or (j) above, the nucleotide coding sequence in SEQ ID NO:X or the complementary strand thereto, the nucleotide coding sequence of the cDNA contained in ATCC Deposit No:Z or the complementary strand thereto, a nucleotide sequence encoding the polypeptide of SEQ ID NO:Y, a nucleotide sequence encoding a polypeptide sequence encoded by the nucleotide sequence in SEQ ID NO:X, a polypeptide sequence encoded by the complement of the polynucleotide sequence in SEQ ID NO:X, a nucleotide sequence encoding the polypeptide encoded by the cDNA contained in ATCC Deposit No:Z, the nucleotide coding sequence in SEQ ID NO:X as defined in columns 8 and 9 of Table 2 or the complementary strand thereto, a nucleotide sequence encoding the polypeptide encoded by the nucleotide sequence in SEQ ID NO:X as defined in columns 8 and 9 of Table 2 or the complementary strand thereto, the nucleotide coding sequence in SEQ ID NO:B as defined in column 6 of Table 1C or the complementary strand thereto, a nucleotide sequence encoding the polypeptide encoded by the nucleotide sequence in SEQ ID NO:B as defined in column 6 of Table 1C or the complementary strand thereto, the nucleotide sequence in SEQ ID NO:X encoding the polypeptide sequence as defined in Table 1B.1 or the complementary strand thereto, nucleotide sequences encoding the polypeptide as defined in Table 1B.1 or the complementary strand thereto, and/or polynucleotide fragments of any of these nucleic acid molecules (e.g., those fragments described herein). Polynucleotides which hybridize to the complement of these nucleic acid molecules under stringent hybridization conditions or alternatively, under lower stringency conditions, are also encompassed by the invention, as are polypeptides encoded by these polynucleotides and nucleic acids.

[0181] In a preferred embodiment, the invention encompasses nucleic acid molecules which comprise, or alternatively, consist of a polynucleotide which hybridizes under stringent hybridization conditions, or alternatively, under lower stringency conditions, to a polynucleotide in (a), (b), (c), (d), (e), (f), (g), (h), or (i), above, as are polypeptides encoded by these polynucleotides. In another preferred embodiment, polynucleotides which hybridize to the complement of these nucleic acid molecules under stringent hybridization conditions, or alternatively, under lower stringency conditions, are also encompassed by the invention, as are polypeptides encoded by these polynucleotides.

[0182] In another embodiment, the invention provides a purified protein comprising, or alternatively consisting of, a polypeptide having an amino acid sequence selected from the group consisting of: (a) the complete amino acid sequence of SEQ ID NO:Y or the complete amino acid sequence encoded by the cDNA in ATCC Deposit No:Z; (b) the amino acid sequence of a mature (secreted) form of a polypeptide having the amino acid sequence of SEQ ID NO:Y (e.g., as delineated in columns 14 and 15 of Table 1A) or a mature form of the amino acid sequence encoded by the cDNA in ATCC Deposit No:Z mature; (c) the amino acid sequence of a biologically active fragment of a polypeptide having the complete amino acid sequence of SEQ ID NO:Y or the complete amino acid sequence encoded by the cDNA in ATCC Deposit No:Z; and (d) the amino acid sequence of an antigenic fragment of a polypeptide having the complete amino acid sequence of SEQ ID NO:Y or the complete amino acid sequence encoded by the cDNA in ATCC Deposit No:Z.

[0183] The present invention is also directed to proteins which comprise, or alternatively consist of, an amino acid sequence which is at least 80%, 85%, 90%, 95%, 96%, 97%, 98%, 99% or 100%, identical to, for example, any of the amino acid sequences in (a), (b), (c), or (d), above, the amino acid sequence shown in SEQ ID NO:Y, the amino acid sequence encoded by the cDNA contained in ATCC Deposit No:Z, the amino acid sequence of the polypeptide encoded by the nucleotide sequence in SEQ ID NO:X as defined in columns 8 and 9 of Table 2, the amino acid sequence of the polypeptide encoded by the nucleotide sequence in SEQ ID NO:B as defined in column 6 of Table 1C, the amino acid sequence as defined in Table 1B.1, an amino acid sequence encoded by the nucleotide sequence in SEQ ID NO:X, and an amino acid sequence encoded by the complement of the polynucleotide sequence in SEQ ID NO:X. Fragments of these polypeptides are also provided (e.g., those fragments described herein). Further proteins encoded by polynucleotides which hybridize to the complement of the nucleic acid molecules encoding these amino acid sequences under stringent hybridization conditions or alternatively, under lower stringency conditions, are also encompassed by the invention, as are the polynucleotides encoding these proteins.

[0184] By a nucleic acid having a nucleotide sequence at least, for example, 95% “identical” to a reference nucleotide sequence of the present invention, it is intended that the nucleotide sequence of the nucleic acid is identical to the reference sequence except that the nucleotide sequence may include up to five point mutations per each 100 nucleotides of the reference nucleotide sequence encoding the polypeptide. In other words, to obtain a nucleic acid having a nucleotide sequence at least 95% identical to a reference nucleotide sequence, up to 5% of the nucleotides in the reference sequence may be deleted or substituted with another nucleotide, or a number of nucleotides up to 5% of the total nucleotides in the reference sequence may be inserted into the reference sequence. The query sequence may be an entire sequence referred to in Table 1B. 1 or Table 2 as the ORF (open reading frame), or any fragment specified as described herein.

[0185] As a practical matter, whether any particular nucleic acid molecule or polypeptide is at least 80%, 85%, 90%, 95%, 96%, 97%, 98% or 99% identical to a nucleotide sequence of the present invention can be determined conventionally using known computer programs. A preferred method for determining the best overall match between a query sequence (a sequence of the present invention) and a subject sequence, also referred to as a global sequence alignment, can be determined using the FASTDB computer program based on the algorithm of Brutlag et al. (Comp. App. Biosci. 6:237-245 (1990)). In a sequence alignment the query and subject sequences are both DNA sequences. An RNA sequence can be compared by converting U's to T's. The result of said global sequence alignment is expressed as percent identity. Preferred parameters used in a FASTDB alignment of DNA sequences to calculate percent identity are: Matdix=Unitary, k-tuple=4, Mismatch Penalty=1, Joining Penalty=30, Randomization Group Length=0, Cutoff Score=1, Gap Penalty=5, Gap Size Penalty 0.05, Window Size=500 or the length of the subject nucleotide sequence, whichever is shorter.

[0186] If the subject sequence is shorter than the query sequence because of 5′ or 3′ deletions, not because of internal deletions, a manual correction must be made to the results. This is because the FASTDB program does not account for 5′ and 3′ truncations of the subject sequence when calculating percent identity. For subject sequences truncated at the 5′ or 3′ ends, relative to the query sequence, the percent identity is corrected by calculating the number of bases of the query sequence that are 5′ and 3′ of the subject sequence, which are not matched/aligned, as a percent of the total bases of the query sequence. Whether a nucleotide is matched/aligned is determined by results of the FASTDB sequence alignment. This percentage is then subtracted from the percent identity, calculated by the above FASTDB program using the specified parameters, to arrive at a final percent identity score. This corrected score is what is used for the purposes of the present invention. Only bases outside the 5′ and 3′ bases of the subject sequence, as displayed by the FASTDB alignment, which are not matched/aligned with the query sequence, are calculated for the purposes of manually adjusting the percent identity score.

[0187] For example, a 90 base subject sequence is aligned to a 100 base query sequence to determine percent identity. The deletions occur at the 5′ end of the subject sequence and therefore, the FASTDB alignment does not show a matched/alignment of the first 10 bases at 5′ end. The 10 unpaired bases represent 10% of the sequence (number of bases at the 5′ and 3′ ends not matched/total number of bases in the query sequence) so 10% is subtracted from the percent identity score calculated by the FASTDB program. If the remaining 90 bases were perfectly matched the final percent identity would be 90%. In another example, a 90 base subject sequence is compared with a 100 base query sequence. This time the deletions are internal deletions so that there are no bases on the 5′ or 3′ of the subject sequence which are not matched/aligned with the query. In this case the percent identity calculated by FASTDB is not manually corrected. Once again, only bases 5′ and 3′ of the subject sequence which are not matched/aligned with the query sequence are manually corrected for. No other manual corrections are to be made for the purposes of the present invention.

[0188] By a polypeptide having an amino acid sequence at least, for example, 95% “identical” to a query amino acid sequence of the present invention, it is intended that the amino acid sequence of the subject polypeptide is identical to the query sequence except that the subject, polypeptide sequence may include up to five amino acid alterations per each 100 amino acids of the query amino acid sequence. In other words, to obtain a polypeptide having an amino acid sequence at least 95% identical to a query amino acid sequence, up to 5% of the amino acid residues in the subject sequence may be inserted, deleted, (indels) or substituted with another amino acid. These alterations of the reference sequence may occur at the amino or carboxy terminal positions of the reference amino acid sequence or anywhere between those terminal positions, interspersed either individually among residues in the reference sequence or in one or more contiguous groups within the reference sequence.

[0189] As a practical matter, whether any particular polypeptide is at least 80%, 85%, 90%, 95%, 96%, 97%, 98% or 99% identical to, for instance, the amino acid sequence of a polypeptide referred to in Table 1A (e.g., the amino acid sequence delineated in columns 14 and 15) or a fragment thereof, Table 1B (e.g., the amino acid sequence identified in column 6) or a fragment thereof, Table 2 (e.g., the amino acid sequence of the polypeptide encoded by the polynucleotide sequence defined in columns 8 and 9 of Table 2) or a fragment thereof, the amino acid sequence of the polypeptide encoded by the polynucleotide sequence in SEQ ID NO:B as defined in column 6 of Table 1C or a fragment thereof, the amino acid sequence of the polypeptide encoded by the nucleotide sequence in SEQ ID NO:X or a fragment thereof, or the amino acid sequence of the polypeptide encoded by cDNA contained in ATCC Deposit No:Z, or a fragment thereof, the amino acid sequence of a mature (secreted) polypeptide encoded by cDNA contained in ATCC Deposit No:Z, or a fragment thereof, can be determined conventionally using known computer programs. A preferred method for determining the best overall match between a query sequence (a sequence of the present invention) and a subject sequence, also referred to as a global sequence alignment, can be determined using the FASTDB computer program based on the algorithm of Brutlag et al. (Comp. App. Biosci.6:237-245 (1990)). In a sequence alignment the query and subject sequences are either both nucleotide sequences or both amino acid sequences. The result of said global sequence alignment is expressed as percent identity. Preferred parameters used in a FASTDB amino acid alignment are: Matrix=PAM 0, k-tuple=2, Mismatch Penalty=1, Joining Penalty=20, Randomization Group Length=0, Cutoff Score=1, Window Size=sequence length, Gap Penalty=5, Gap Size Penalty=0.05, Window Size=500 or the length of the subject amino acid sequence, whichever is shorter.

[0190] If the subject sequence is shorter than the query sequence due to N- or C-terminal deletions, not because of internal deletions, a manual correction must be made to the results. This is because the FASTDB program does not account for N- and C-terminal truncations of the subject sequence when calculating global percent identity. For subject sequences truncated at the N- and C-termini, relative to the query sequence, the percent identity is corrected by calculating the number of residues of the query sequence that are N- and C-terminal of the subject sequence, which are not matched/aligned with a corresponding subject residue, as a percent of the total bases of the query sequence. Whether a residue is matched/aligned is determined by results of the FASTDB sequence alignment. This percentage is then subtracted from the percent identity, calculated by the above FASTDB program using the specified parameters, to arrive at a final percent identity score. This final percent identity score is what is used for the purposes of the present invention. Only residues to the N- and C-termini of the subject sequence, which are not matched/aligned with the query sequence, are considered for the purposes of manually adjusting the percent identity score. That is, only query residue positions outside the farthest N- and C-terminal residues of the subject sequence.

[0191] For example, a 90 amino acid residue subject sequence is aligned with a 100 residue query sequence to determine percent identity. The deletion occurs at the N-terminus of the subject sequence and therefore, the FASTDB alignment does not show a matching/alignment of the first 10 residues at the N-terminus. The 10 unpaired residues represent 10% of the sequence (number of residues at the N- and C-termini not matched/total number of residues in the query sequence) so 10% is subtracted from the percent identity score calculated by the FASTDB program. If the remaining 90 residues were perfectly matched the final percent identity would be 90%. In another example, a 90 residue subject sequence is compared with a 100 residue query sequence. This time the deletions are internal deletions so there are no residues at the N- or C-termini of the subject sequence which are not matched/aligned with the query. In this case the percent identity calculated by FASTDB is not manually corrected. Once again, only residue positions outside the N- and C-terminal ends of the subject sequence, as displayed in the FASTDB alignment, which are not matched/aligned with the query sequnce are manually corrected for. No other manual corrections are to made for the purposes of the present invention.

[0192] The polynucleotide variants of the invention may contain alterations in the coding regions, non-coding regions, or both. Especially preferred are polynucleotide variants containing alterations which produce silent substitutions, additions, or deletions, but do not alter the properties or activities of the encoded polypeptide. Nucleotide variants produced by silent substitutions due to the degeneracy of the genetic code are preferred. Moreover, polypeptide variants in which less than 50, less than 40, less than 30, less than 20, less than 10, or 5-50, 5-25, 5-10, 1-5, or 1-2 amino acids are substituted, deleted, or added in any combination are also preferred. Polynucleotide variants can be produced for a variety of reasons, e.g., to optimize codon expression for a particular host (change codons in the human mRNA to those preferred by a bacterial host such as E. coli).

[0193] Naturally occurring variants are called “allelic variants,” and refer to one of several alternate forms of a gene occupying a given locus on a chromosome of an organism. (Genes II, Lewin, B., ed., John Wiley & Sons, New York (1985)). These allelic variants can vary at either the polynucleotide and/or polypeptide level and are included in the present invention. Alternatively, non-naturally occurring variants may be produced by mutagenesis techniques or by direct synthesis.

[0194] Using known methods of protein engineering and recombinant DNA technology, variants may be generated to improve or alter the characteristics of the polypeptides of the present invention. For instance, one or more amino acids can be deleted from the N-terminus or C-terminus of the polypeptide of the present invention without substantial loss of biological function. As an example, Ron et al. (J. Biol. Chen. 268: 2984-2988 (1993)) reported variant KGF proteins having heparin binding activity even after deleting 3, 8, or 27 amino-terminal amino acid residues. Similarly, Interferon gamma exhibited up to ten times higher activity after deleting 8-10 amino acid residues from the carboxy terminus of this protein. (Dobeli et al., J. Biotechnology 7:199-216 (1988).)

[0195] Moreover, ample evidence demonstrates that variants often retain a biological activity similar to that of the naturally occurring protein. For example, Gayle and coworkers (J. Biol. Chem. 268:22105-22111 (1993)) conducted extensive mutational analysis of human cytokine IL-la. They used random mutagenesis to generate over 3,500 individual IL-1a mutants that averaged 2.5 amino acid changes per variant over the entire length of the molecule. Multiple mutations were examined at every possible amino acid position. The investigators found that “[m]ost of the molecule could be altered with little effect on either [binding or biological activity].” In fact, only 23 unique amino acid sequences, out of more than 3,500 nucleotide sequences examined, produced a protein that significantly differed in activity from wild-type.

[0196] Furthermore, even if deleting one or more amino acids from the N-terminus or C-terminus of a polypeptide results in modification or loss of one or more biological functions, other biological activities may still be retained. For example, the ability of a deletion variant to induce and/or to bind antibodies which recognize the secreted form will likely be retained when less than the majority of the residues of the secreted form are removed from the N-terminus or C-terminus. Whether a particular polypeptide lacking N- or C-terminal residues of a protein retains such immunogenic activities can readily be determined by routine methods described herein and otherwise known in the art.

[0197] Thus, the invention further includes polypeptide variants which show a biological or functional activity of the polypeptides of the invention (such as, for example, activity useful in detecting, preventing, diagnosing, prognosticating, treating, and/or ameliorating cardiovascular disorders). Such variants include deletions, insertions, inversions, repeats, and substitutions selected according to general rules known in the art so as have little effect on activity.

[0198] The present application is directed to nucleic acid molecules at least 80%, 85%, 90%, 95%, 96%, 97%, 98%, 99% or 100% identical to the nucleic acid sequences disclosed herein, (e.g., encoding a polypeptide having the amino acid sequence of an N and/or C terminal deletion), irrespective of whether they encode a polypeptide having functional activity. This is because even where a particular nucleic acid molecule does not encode a polypeptide having functional activity, one of skill in the art would still know how to use the nucleic acid molecule, for instance, as a hybridization probe or a polymerase chain reaction (PCR) primer. Uses of the nucleic acid molecules of the present invention that do not encode a polypeptide having functional activity include, inter alia, (1) isolating a gene or allelic or splice variants thereof in a cDNA library; (2) in situ hybridization (e.g., “FISH”) to metaphase chromosomal spreads to provide precise chromosomal location of the gene, as described in Verma et al., Human Chromosomes: A Manual of Basic Techniques, Pergamon Press, New York (1988); (3) Northern Blot analysis for detecting mRNA expression in specific tissues (e.g., normal or diseased tissues); and (4) in situ hybridization (e.g., histochemistry) for detecting mRNA expression in specific tissues (e.g., normal or diseased tissues).

[0199] Preferred, however, are nucleic acid molecules having sequences at least 80%, 85%, 90%, 95%, 96%, 97%, 98%, 99% or 100% identical to the nucleic acid sequences disclosed herein, which do, in fact, encode a polypeptide having functional activity. By a polypeptide having “functional activity” is meant, a polypeptide capable of displaying one or more known functional activities associated with a full-length (complete) protein and/or a mature (secreted) protein of the invention. Such functional activities include, but are not limited to, biological activity (such as, for example, activity useful in detecting, preventing, diagnosing, prognosticating, treating, and/or ameliorating cardiovascular diseases and disorders), antigenicity (ability to bind, or compete with a polypeptide of the invention for binding, to an anti-polypeptide of the invention antibody), immunogenicity (ability to generate antibody which binds to a specific polypeptide of the invention), ability to form multimers with polypeptides of the invention, and ability to bind to a receptor or ligand for a polypeptide of the invention.

[0200] The functional activity of the polypeptides, and fragments, variants and derivatives of the invention, can be assayed by various methods.

[0201] For example, in one embodiment where one is assaying for the ability to bind or compete with a full-length polypeptide of the present invention for binding to an anti-polypeptide antibody, various immunoassays known in the art can be used, including but not limited to, competitive and non-competitive assay systems using techniques such as radioimmunoassays, ELISA (enzyme linked immunosorbent assay), “sandwich” immunoassays, immunoradiometric assays, gel diffusion precipitation reactions, immunodiffusion assays, in situ immunoassays (using colloidal gold, enzyme or radioisotope labels, for example), western blots, precipitation reactions, agglutination assays (e.g., gel agglutination assays, hemagglutination assays), complement fixation assays, immunofluorescence assays, protein A assays, and immunoelectrophoresis assays, etc. In one embodiment, antibody binding is detected by detecting a label on the primary antibody. In another embodiment, the primary antibody is detected by detecting binding of a secondary antibody or reagent to the primary antibody. In a further embodiment, the secondary antibody is labeled. Many means are known in the art for detecting binding in an immunoassay and are within the scope of the present invention.

[0202] In another embodiment, where a ligand is identified, or the ability of a polypeptide fragment, variant or derivative of the invention to multimerize is being evaluated, binding can be assayed, e.g., by means well-known in the art, such as, for example, reducing and non-reducing gel chromatography, protein affinity chromatography, and affinity blotting. See generally, Phizicky et al., Microbiol. Rev. 59:94-123 (1995). In another embodiment, the ability of physiological correlates of a polypeptide of the present invention to bind to a substrate(s) of the polypeptide of the invention can be routinely assayed using techniques known in the art.

[0203] In addition, assays described herein (see Examples) and otherwise known in the art may routinely be applied to measure the ability of polypeptides of the present invention and fragments, variants and derivatives thereof to elicit polypeptide related biological activity (either in vitro or in vivo). Other methods will be known to the skilled artisan and are within the scope of the invention.

[0204] Of course, due to the degeneracy of the genetic code, one of ordinary skill in the art will immediately recognize that a large number of the nucleic acid molecules having a sequence at least 80%, 85%, 90%, 95%, 96%, 97%, 98%, 99%, or 100% identical to, for example, the nucleic acid sequence of the cDNA contained in ATCC Deposit No:Z, the nucleic acid sequence referred to in Table 1B (SEQ ID NO:X), the nucleic acid sequence disclosed in Table 1A (e.g., the nucleic acid sequence delineated in columns 7 and 8), the nucleic acid sequence disclosed in Table 2 (e.g., the nucleic acid sequence delineated in columns 8 and 9) or fragments thereof, will encode polypeptides “having functional activity.” In fact, since degenerate variants of any of these nucleotide sequences all encode the same polypeptide, in many instances, this will be clear to the skilled artisan even without performing the above described comparison assay. It will be further recognized in the art that, for such nucleic acid molecules that are not degenerate variants, a reasonable number will also encode a polypeptide having functional activity. This is because the skilled artisan is fully aware of amino acid substitutions that are either less likely or not likely to significantly effect protein function (e.g., replacing one aliphatic amino acid with a second aliphatic amino acid), as further described below.

[0205] For example, guidance concerning how to make phenotypically silent amino acid substitutions is provided in Bowie et al., “Deciphering the Message in Protein Sequences: Tolerance to Amino Acid Substitutions,” Science 247:1306-1310 (1990), wherein the authors indicate that there are two main strategies for studying the tolerance of an amino acid sequence to change.

[0206] The first strategy exploits the tolerance of amino acid substitutions by natural selection during the process of evolution. By comparing amino acid sequences in different species, conserved amino acids can be identified. These conserved amino acids are likely important for protein function. In contrast, the amino acid positions where substitutions have been tolerated by natural selection indicates that these positions are not critical for protein function. Thus, positions tolerating amino acid substitution could be modified while still maintaining biological activity of the protein.

[0207] The second strategy uses genetic engineering to introduce amino acid changes at specific positions of a cloned gene to identify regions critical for protein function. For example, site directed mutagenesis or alanine-scanning mutagenesis (introduction of single alanine mutations at every residue in the molecule) can be used. See Cunningham and Wells, Science 244:1081-1085(0.1989). The resulting mutant molecules can then be tested for biological activity.

[0208] As the authors state, these two strategies have revealed that proteins are surprisingly tolerant of amino acid substitutions. The authors further indicate which amino acid changes are likely to be permissive at certain amino acid positions in the protein. For example, most buried (within the tertiary structure of the protein) amino acid residues require nonpolar side chains, whereas few features of surface side chains are generally conserved. Moreover, tolerated conservative amino acid substitutions involve replacement of the aliphatic or hydrophobic amino acids Ala, Val, Leu and Ile; replacement of the hydroxyl residues Ser and Thr; replacement of the acidic residues Asp and Glu; replacement of the amide residues Asn and Gln, replacement of the basic residues Lys, Arg, and His; replacement of the aromatic residues Phe, Tyr, and Trp, and replacement of the small-sized amino acids Ala, Ser, Thr, Met, and Gly.

[0209] Besides conservative amino acid substitution, variants of the present invention include (i) substitutions with one or more of the non-conserved amino acid residues, where the substituted amino acid residues may or may not be one encoded by the genetic code, or (ii) substitutions with one or more of the amino acid residues having a substituent group, or (iii) fusion of the mature polypeptide with another compound, such as a compound to increase the stability and/or solubility of the polypeptide (for example, polyethylene glycol), (iv) fusion of the polypeptide with additional amino acids, such as, for example, an IgG Fc fusion region peptide, serum albumin (preferably human serum albumin) or a fragment thereof, or leader or secretory sequence, or a sequence facilitating purification, or (v) fusion of the polypeptide with another compound, such as albumin (including but not limited to recombinant albumin (see, e.g., U.S. Pat. No. 5,876,969, issued Mar. 2, 1999, EP Patent 0 413 622, and U.S. Pat. No. 5,766,883, issued Jun. 16, 1998, herein incorporated by reference in their entirety)). Such variant polypeptides are deemed to be within the scope of those skilled in the art from the teachings herein.

[0210] For example, polypeptide variants containing amino acid substitutions of charged amino acids with other charged or neutral amino acids may produce proteins with improved characteristics, such as less aggregation. Aggregation of pharmaceutical formulations both reduces activity and increases clearance due to the aggregate's immunogenic activity. See Pinckard et al., Clin. Exp. Immunol. 2:331-340 (1967); Robbins et al., Diabetes 36: 838-845 (1987); Cleland et al., Crit. Rev. Therapeutic Drug Carrier Systems 10:307-377 (1993).

[0211] A further embodiment of the invention relates to polypeptides which comprise the amino acid sequence of a polypeptide having an amino acid sequence which contains at least one amino acid substitution, but not more than 50 amino acid substitutions, even more preferably, not more than 40 amino acid substitutions, still more preferably, not more than 30 amino acid substitutions, and still even more preferably, not more than 20 amino acid substitutions from a polypeptide sequence disclosed herein. Of course it is highly preferable for a polypeptide to have an amino acid sequence which, for example, comprises the amino acid sequence of a polypeptide of SEQ ID NO:Y, the amino acid sequence of the mature (e.g., secreted) polypeptide of SEQ ID NO:Y, an amino acid sequence encoded by SEQ ID NO:X, an amino acid sequence encoded by the portion of SEQ ID NO:X as defined in columns 8 and 9 of Table 2, an amino acid sequence encoded by the complement of SEQ ID NO:X, an amino acid sequence encoded by cDNA contained in ATCC Deposit No:Z, and/or the amino acid sequence of a mature (secreted) polypeptide encoded by cDNA contained in ATCC Deposit No:Z, or a fragment thereof, which contains, in order of ever-increasing preference, at least one, but not more than 10, 9, 8, 7, 6, 5, 4, 3, 2 or 1 amino acid substitutions.

[0212] In specific embodiments, the polypeptides of the invention comprise, or alternatively, consist of, fragments or variants of a reference amino acid sequence selected from: (a) the amino acid sequence of SEQ ID NO:Y or fragments thereof (e.g., the mature formand/or other fragments described herein); (b) the amino acid sequence encoded by SEQ ID NO:X or fragments thereof; (c) the amino acid sequence encoded by the complement of SEQ ID NO:X or fragments thereof; (d) the amino acid sequence encoded by the portion of SEQ ID NO:X as defined in columns 8 and 9 of Table 2 or fragments thereof; and (e) the amino acid sequence encoded by cDNA contained in ATCC Deposit No:Z or fragments thereof; wherein the fragments or variants have 1-5,5-10, 5-25, 5-50, 10-50 or 50-150, amino acid residue additions, substitutions, and/or deletions when compared to the reference amino acid sequence. In preferred embodiments, the amino acid substitutions are conservative. Polynucleotides encoding these polypeptides are also encompassed by the invention.

Polynucleotide and Polypeptide Fragments

[0213] The present invention is also directed to polynucleotide fragments of the polynucleotides (nucleic acids) of the invention. In the present invention, a “polynucleotide fragment” refers to a polynucleotide having a nucleic acid sequence which, for example: is a portion of the cDNA contained in ATCC Deposit No:Z or, the complementary strand thereto; is a portion of the polynucleotide sequence encoding the polypeptide encoded by the cDNA contained in ATCC Deposit No:Z or the complementary strand thereto; is a portion of the polynucleotide sequence encoding the mature (secreted) polypeptide encoded by the cDNA contained in ATCC Deposit No:Z or the complementary strand thereto; is a portion of a polynucleotide sequence encoding the mature amino acid sequence as defined in columns 14 and 15 of Table 1A or the complementary strand thereto; is a portion of a polynucleotide sequence encoding the amino acid sequence encoded by the region of SEQ ID NO:X as defined in columns 8 and 9 of Table 2 or the complementary strand thereto; is a portion of the polynucleotide sequence of SEQ ID NO:X as defined in columns 8 and 9 of Table 2 or the complementary strand thereto; is a portion of the polynucleotide sequence in SEQ ID NO:X or the complementary strand thereto; is a polynucleotide sequence encoding a portion of the polypeptide of SEQ ID NO:Y; is a polynucleotide sequence encoding a portion of a polypeptide encoded by SEQ ID NO:X; is a polynucleotide sequence encoding a portion of a polypeptide encoded by the complement of the polynucleotide sequence in SEQ ID NO:X; is a portion of a polynucleotide sequence encoding the amino acid sequence encoded by the region of SEQ ID NO:B as defined in column 6 of Table 1C or the complementary strand thereto; or is a portion of the polynucleotide sequence of SEQ ID NO:B as defined in column 6 of Table 1C or the complementary strand thereto.

[0214] The polynucleotide fragments of the invention are preferably at least about 15 nt, and more preferably at least about 20 nt, still more preferably at least about 30 nt, and even more preferably, at least about 40 nt, at least about 50 nt, at least about 75 nt, or at least about 150 nt in length. A fragment “at least 20 nt in length,” for example, is intended to include 20 or more contiguous bases from the cDNA sequence contained in ATCC Deposit No:Z, or the nucleotide sequence shown in SEQ ID NO:X or the complementary stand thereto. In this context “about” includes the particularly recited value or a value larger or smaller by several (5, 4, 3, 2, or 1) nucleotides, at either terminus or at both termini. These nucleotide fragments have uses that include, but are not limited to, as diagnostic probes and primers as discussed herein. Of course, larger fragments (e.g., at least 160, 170, 180, 190, 200, 250, 500, 600, 1000, or 2000 nucleotides in length) are also encompassed by the invention.

[0215] Moreover, representative examples of polynucleotide fragments of the invention comprise, or alternatively consist of, a sequence from about nucleotide number 1-50, 51-100, 101-150, 151-200, 201-250, 251-300, 301-350, 351-400, 401-450, 451-500, 501-550, 551-600, 601-650, 651-700, 701-750, 751-800, 801-850, 851-900, 901-950, 951-1000, 1001-1050, 1051-1100, 1101-1150, 1151-1200, 1201-1250, 1251-1300, 1301-1350, 1351-1400, 1401-1450, 1451-1500, 1501-1550, 1551-1600, 1601-1650, 1651-1700, 1701-1750, 1751-1800, 1801-1850, 1851-1900, 1901-1950, 1951-2000, 2001-2050, 2051-2100, 2101-2150, 2151-2200, 2201-2250, 2251-2300, 2301-2350, 2351-2400, 2401-2450, 2451-2500, 2501-2550, 2551-2600, 2601-2650, 2651-2700, 2701-2750, 2751-2800, 2801-2.850, 2851-2900, 2901-2950, 2951-3000, 3001-3050, 3051-3100, 3101-3150, 3151-3200, 3201-3250, 3251-3300, 3301-3350, 3351-3400, 3401-3450, 3451-3500, 3501-3550, 3551-3600, 3601-3650, 3651-3700, 3701-3750, 3751-3800, 3801-3850, 3851-3900, 3901-3950, 3951-4000, 4001-4050, 4051-4100, 4101-4150, 41514200, 42014250, 4251-4300, 4301-4350, 4351-4400, 4401-4450, 4451-4500, 4501-4550, 4551-4600, 4601-4650, 4651-4700, 4701-4750, 4751-4800, 4801-4850, 4851-4900, 4901-4950, 4951-5000, 5001-5050, 5051-5100, 5101-5150, 5151-5200, 5201-5250, 5251-5300, 5301-5350, 5351-5400, 5401-5450, 5451-5500, 5501-5550, 5551-5600, 5601-5650, 5651-5700, 5701-5750, 5751-5800, 5801-5850, 5851-5900, 5901-5950, 5951-6000, 6001-6050, 6051-6100, 6101-6150, 6151-6200, 6201-6250, 6251-6300, 6301-6350, 6351-6400, 6401-6450, 6451-6500, 6501-6550, 6551-6600, 6601-6650, 6651-6700, 6701-6750, 6751-6800, 6801-6850, 6851-6900, 6901-6950, 6951-7000, 7001-7050, 7051-7100, 7101-7150, 7151-7200, 7201-7250, 7251-7300 or 7301 to the end of SEQ ID NO:X, or the complementary strand thereto. In this context “about” includes the particularly recited range or a range larger or smaller by several (5, 4, 3, 2, or 1) nucleotides, at either terminus or at both termini. Preferably, these fragments encode a polypeptide which has a functional activity (e.g., biological activity; such as, for example, activity useful in detecting, preventing, diagnosing, prognosticating, treating, and/or ameliorating cardiovascular diseases and disorders). More preferably, these polynucleotides can be used as probes or primers as discussed herein. Polynucleotides which hybridize to one or more of these polynucleotides under stringent hybridization conditions or alternatively, under lower stringency conditions are also encompassed by the invention, as are polypeptides encoded by these polynucleotides.

[0216] Further representative examples of polynucleotide fragments of the invention comprise, or alternatively consist of, a sequence from about nucleotide number 1-50, 51-100, 101-150, 151-200, 201-250, 251-300, 301-350, 351-400, 401-450, 451-500, 501-550, 551-600, 601-650, 651-700, 701-750, 751-800, 801-850, 851-900, 901-950, 951-1000, 1001-1050, 1051-1100, 1101-1150, 1151-1200, 1201-1250, 1251-1300, 1301-1350, 1351-1400, 1401-1450, 1451-1500, 1501-1550, 1551-1600, 1601-1650, 1651-1700, 1701-1750, 1751-1800, 1801-1850, 1851-1900, 1901-1950, 1951-2000, 2001-2050, 2051-2100, 2101-2150, 2151-2200, 2201-2250, 2251-2300, 2301-2350, 2351-2400, 2401-2450, 2451-2500, 2501-2550, 2551-2600, 2601-2650, 2651-2700, 2701-2750, 2751-2800, 2801-2850, 2851-2900, 2901-2950, 2951-3000, 3001-3050, 3051-3100, 3101-3150, 3151-3200, 3201-3250, 3251-3300, 3301-3350, 3351-3400, 3401-3450, 3451-3500, 3501-3550, 3551-3600, 3601-3650, 3651-3700, 3701-3750, 3751-3800, 3801-3850, 3851-3900, 3901-3950, 3951-4000, 4001-4050, 4051-4100, 4101-4150, 4151-4200, 4201-4250, 4251-4300, 4301-4350, 4351-4400, 4401-4450, 4451-4500, 4501-4550, 4551-4600, 4601-4650, 4651-4700, 4701-4750, 4751-4800, 48014850, 4851-4900, 4901-4950, 4951-5000, 5001-5050, 5051-5100, 5101-5150, 5151-5200, 5201-5250, 5251-5300, 5301-5350, 5351-5400, 5401-5450, 5451-5500, 5501-5550, 5551-5600, 5601-5650, 5651-5700, 5701-5750, 5751-5800, 5801-5850, 5851-5900, 5901-5950, 5951-6000, 6001-6050, 6051-6100, 6101-6150, 6151-6200, 6201-6250, 6251-6300, 6301-6350, 6351-6400, 6401-6450, 6451-6500, 6501-6550, 6551-6600, 6601-6650, 6651-6700, 6701-6750, 6751-6800, 6801-6850, 6851-6900, 6901-6950, 6951-7000, 7001-7050, 7051-7100, 7101-7150, 7151-7200, 7201-7250, 7251-7300 or 7301 to the end of the cDNA sequence contained in ATCC Deposit No:Z, or the complementary strand thereto. In this context “about” includes the particularly recited range or a range larger or smaller by several (5, 4, 3, 2, or 1) nucleotides, at either terminus or at both termini. Preferably, these fragments encode a polypeptide which has a functional activity (e.g., biological activity). More preferably, these polynucleotides can be used as probes or primers as discussed herein. Polynucleotides which hybridize to one or more of these polynucleotides under stringent hybridization conditions or alternatively, under lower stringency conditions are also encompassed by the invention, as are polypeptides encoded by these polynucleotides.

[0217] Moreover, representative examples of polynucleotide fragments of the invention comprise, or alternatively consist of, a nucleic acid sequence comprising one, two, three, four, five, six, seven, eight, nine, ten, or more of the above described polynucleotide fragments of the invention in combination with a polynucleotide sequence delineated in Table 1C column 6. Additional, representative examples of polynucleotide fragments of the invention comprise, or alternatively consist of, a nucleic acid sequence comprising one, two, three, four, five, six, seven, eight, nine, ten, or more of the above described polynucleotide fragments of the invention in combination with a polynucleotide sequence that is the complementary strand of a sequence delineated in column 6 of Table 1C. In further embodiments, the above-described polynucleotide fragments of the invention comprise, or alternatively consist of, sequences delineated in Table 1C, column 6, and have a nucleic acid sequence which is different from that of the BAC fragment having the sequence disclosed in SEQ ID NO:B (see Table 1C, column 5). In additional embodiments, the above-described polynucleotide fragments of the invention comprise, or alternatively consist of, sequences delineated in Table 1C, column 6, and have a nucleic acid sequence which is different from that published for the BAC clone identified as BAC ID NO:A (see Table 1C, column 4). In additional embodiments, the above-described polynucleotides of the invention comprise, or alternatively consist of, sequences delineated Table 1C, column 6, and have a nucleic acid sequence which is different from that contained in the BAC clone identified as BAC ID NO:A (see Table 1C, column 4). Polypeptides encoded by these polynucleotides, other polynucleotides that encode these polypeptides, and antibodies that bind these polypeptides are also encompassed by the invention. Additionally, fragments and variants of the above-described polynucleotides and polypeptides are also encompassed by the invention.

[0218] In additional specific embodiments, polynucleotides of the invention comprise, or alternatively consist of, one, two, three, four, five, six, seven, eight, nine, ten, or more fragments of the sequences delineated in column 6 of Table 1C, and the polynucleotide sequence of SEQ ID NO:X (e.g., as defined in Table 1C, column 2) or fragments or variants thereof. Polypeptides encoded by these polynucleotides, other polynucleotides that encode these polypeptides, and antibodies that bind these polypeptides are also encompassed by the invention.

[0219] In additional specific embodiments, polynucleotides of the invention comprise, or alternatively consist of, one, two, three, four, five, six, seven, eight, nine, ten, or more fragments of the sequences delineated in column 6′ of Table 1C which correspond to the same ATCC Deposit No:Z (see Table 1C, column 1), and the polynucleotide sequence of SEQ ID NO:X (e.g., as defined in Table 1A, 1B, or 1C) or fragments or variants thereof. Polypeptides encoded by these polynucleotides, other polynucleotides that encode these polypeptides, and antibodies that bind these polypeptides are also encompassed by the invention.

[0220] In further specific embodiments, polynucleotides of the invention comprise, or alternatively consist of, one, two, three, four, five, six, seven, eight, nine, ten, or more fragments of the sequences delineated in the same row of column 6 of Table 1C, and the polynucleotide sequence of SEQ ID NO:X (e.g., as defined in Table 1A, 1B, or 1C) or fragments or variants thereof. Polypeptides encoded by these polynucleotides, other polynucleotides that encode these polypeptides, and antibodies that bind these polypeptides are also encompassed by the invention.

[0221] In additional specific embodiments, polynucleotides of the invention comprise, or alternatively consist of a polynucleotide sequence in which the 3′ 10 polynucleotides of one of the sequences delineated in column 6 of Table 1C and the 5′ 10 polynucleotides of the sequence of SEQ ID NO:X are directly contiguous. Nucleic acids which hybridize to the complement of these 20 contiguous polynucleotides under stringent hybridization conditions or alternatively, under lower stringency conditions, are also encompassed by the invention. Polypeptides encoded by these polynucleotides and/or nucleic acids, other polynucleotides and/or nucleic acids that encode these polypeptides, and antibodies that bind these polypeptides are also encompassed by the invention. Additionally, fragments and variants of the above-described polynucleotides, nucleic acids, and polypeptides are also encompassed by the invention.

[0222] In additional specific embodiments, polynucleotides of the invention comprise, or alternatively consist of a polynucleotide sequence in which the 3′ 10 polynucleotides of one of the sequences delineated in column 6 of Table 1C and the 5′ 10 polynucleotides of a fragment or variant of the sequence of SEQ ID NO:X (e.g., as described herein) are directly contiguous Nucleic acids which hybridize to the complement of these 20 contiguous polynucleotides under stringent hybridization conditions or alternatively, under lower stringency conditions, are also encompassed by the invention. Polypeptides encoded by these polynucleotides and/or nucleic acids, other polynucleotides and/or nucleic acids encoding these polypeptides, and antibodies that bind these polypeptides are also encompassed by the invention. Additionally, fragments and variants of the above-described polynucleotides, nucleic acids, and polypeptides are also encompassed by the invention.

[0223] In further specific embodiments, polynucleotides of the invention comprise, or alternatively consist of a polynucleotide sequence in which the 3′ 10 polynucleotides of a fragment or variant of the sequence of SEQ ID NO:X and the 5′ 10 polynucleotides of the sequence of one of the sequences delineated in column 6 of Table 1C are directly contiguous. Nucleic acids which hybridize to the complement of these 20 contiguous polynucleotides under stringent hybridization conditions or alternatively, under lower stringency conditions, are also encompassed by the invention. Polypeptides encoded by these polynucleotides and/or nucleic acids, other polynucleotides and/or nucleic acids encoding these polypeptides, and antibodies that bind these polypeptides are also encompassed by the invention. Additionally, fragments and variants of the above-described polynucleotides, nucleic acids, and polypeptides are also encompassed by the invention.

[0224] In specific embodiments, polynucleotides of the invention comprise, or alternatively consist of a polynucleotide sequence in which the 3′ 10 polynucleotides of one of the sequences delineated in column 6 of Table 1C and the 5′ 10 polynucleotides of another sequence in column 6 are directly contiguous. In preferred embodiments, the 3′ 10 polynucleotides of one of the sequences delineated in column 6 of Table 1C is directly contiguous with the 5′ 10 polynucleotides of the next sequential exon delineated in Table 1C, column 6. Nucleic acids which hybridize to the complement of these 20 contiguous polynucleotides under stringent hybridization conditions or alternatively, under lower stringency conditions, are also encompassed by the invention. Polypeptides encoded by these polynucleotides and/or nucleic acids, other polynucleotides and/or nucleic acids encoding these polypeptides, and antibodies that bind these polypeptides are also encompassed by the invention. Additionally, fragments and variants of the above-described polynucleotides, nucleic acids, and polypeptides are also encompassed by the invention.

[0225] In the present invention, a “polypeptide fragment” refers to an amino acid sequence which is a portion of the amino acid sequence contained in SEQ ID NO:Y, is a portion of the mature form of SEQ ID NO:Y as defined in columns 14 and 15 of Table 1A, a portion of an amino acid sequence encoded by the portion of SEQ ID NO:X as defined in columns 8 and 9 of Table 2, is a portion of an amino acid sequence encoded by the polynucleotide sequence of SEQ ID NO:X, is a portion of an amino acid sequence encoded by the complement of the polynucleotide sequence in SEQ ID NO:X, is a portion of the amino acid sequence of a mature (secreted) polypeptide encoded by the cDNA contained in ATCC Deposit No:Z, and/or is a portion of an amino acid sequence encoded by the cDNA contained in ATCC Deposit No:Z. Protein (polypeptide) fragments may be “free-standing,” or comprised within a larger polypeptide of which the fragment forms a part or region, most preferably as a single continuous region. Representative examples of polypeptide fragments of the invention, include, for example, fragments comprising, or alternatively consisting of, from about amino acid number 1-20, 21-40, 41-60, 61-80, 81-100, 101-120, 121-140, 141-160, 161-180, 181-200, 201-220, 221-240, 241-260, 261-280, 281-300, 301-320, 321-340, 341-360, 361-380, 381-400, 401-420, 421-440, 441-460, 461-480, 481-500, 501-520, 521-540, 541-560, 561-580, 581-600, 601-620, 621-640, 641-660, 661-680, 681-700, 701-720, 721-740, 741-760, 761-780, 781-800, 801-820, 821-840, 841-860, 861-880, 881-900, 901-920, 921-940, 941-960, 961-980, 981-1000, 1001-1020, 1021-1040, 1041-1060, 1061-1080, 1081-1100, 1101-1120, 1121-1140, 1141-1160, 1161-1180, 1181-1200, 1201-1220, 1221-1240, 1241-1260, 1261-1280, 1281-1300, 1301-1320, 1321-1340, 1341-1360, 1361-1380, 1381-1400, 1401-1420, 1421-1440, or 1441 to the end of the coding region of cDNA and SEQ ID NO: Y. In a preferred embodiment, polypeptide fragments of the invention include, for example, fragments comprising, or alternatively consisting of, from about amino acid number 1-20, 21-40, 41-60, 61-80, 81-100, 101-120, 121-140, 141-160, 161-180, 181-200, 201-220, 221-240, 241-260, 261-280, 281-300, 301-320, 321-340, 341-360, 361-380, 381-400, 401-420, 421-440, 441-460, 461-480, 481-500, 501-520, 521-540, 541-560, 561-580, 581-600, 601-620, 621-640, 641-660, 661-680, 681-700, 701-720, 721-740, 741-760, 761-780, 781-800, 801-820, 821-840, 841-860, 861-880, 881-900, 901-920, 921-940, 941-960, 961-980, 981-1000, 1001-1020, 1021-1040, 1041-1060, 1061-1080, 1081-1100, 1101-1120, 1121-1140, 1141-1160, 1161-1180, 1181-1200, 1201-1220, 1221-1240, 1241-1260, 1261-1280, 1281-1300, 1301-1320, 1321-1340, 1341-1360, 1361-1380, 1381-1400, 1401-1420, 1421-1440, or 1441 to the end of the coding region of SEQ ID NO:Y. Moreover, polypeptide fragments of the invention may be at least about 10, 15, 20, 25, 30, 35, 40, 45, 50, 55, 60, 65, 70, 75, 80, 85, 90, 100, 110, 120, 130, 140, or 150 amino acids in length. In this context “about” includes the particularly recited ranges or values, or ranges or values larger or smaller by several (5, 4, 3, 2, or 1) amino acids, at either extreme or at both extremes. Polynucleotides encoding these polypeptide fragments are also encompassed by the invention.

[0226] Even if deletion of one or more amino acids from the N-terminus of a protein results in modification of loss of one or more biological functions of the protein, other functional activities (e.g., biological activities; such as, for example, activity useful in detecting, preventing, diagnosing, prognosticating, treating, and/or ameliorating cardiovascular diseases and disorders; ability to multimerize; ability to bind a ligand; antigenic ability useful for production of polypeptide specific antibodies) may still be retained. For example, the ability of shortened muteins to induce and/or bind to antibodies which recognize the complete or mature forms of the polypeptides generally will be retained when less than the majority of the residues of the complete or mature polypeptide are removed from the N-terminus. Whether a particular polypeptide lacking N-terminal residues of a complete polypeptide retains such immunologic activities can readily be determined by routine methods described herein and otherwise known in the art. It is not unlikely that a mutein with a large number of deleted N-terminal amino acid residues may retain some biological or immunogenic activities. In fact, peptides composed of as few as six amino acid residues may often evoke an immune response.

[0227] Accordingly, polypeptide fragments include the secreted protein as well as the mature form. Further preferred polypeptide fragments include the secreted protein or the mature form having a continuous series of deleted residues from the amino or the carboxy terminus, or both. For example, any number of amino acids, ranging from 1-60, can be deleted from the amino terminus of either the secreted polypeptide or the mature form. Similarly, any number of amino acids, ranging from 1-30, can be deleted from the carboxy terminus of the secreted protein or mature form. Furthermore, any combination of the above amino and carboxy terminus deletions are preferred. Similarly, polynucleotides encoding these polypeptide fragments are also preferred.

[0228] The present invention further provides polypeptides having one or more residues deleted from the amino terminus of the amino acid sequence of a polypeptide disclosed herein (e.g., a polypeptide of SEQ ID NO:Y, a polypeptide as defined in columns 14 and 15 of Table 1A, a polypeptide encoded by the polynucleotide sequence contained in SEQ ID NO:X or the complement thereof, a polypeptide encoded by the portion of SEQ ID NO:X as defined in columns 8 and 9 of Table 2, a polypeptide encoded by the portion of SEQ ID NO:B as defined in column 6 of Table 1C, a polypeptide encoded by the cDNA contained in ATCC Deposit No:Z, and/or a mature polypeptide encoded by the cDNA contained in ATCC Deposit No:Z). In particular, N-terminal deletions may be described by the general formula m-q, where q is a whole integer representing the total number of amino acid residues in a polypeptide of the invention (e.g., the polypeptide disclosed in SEQ ID NO:Y, the mature (secreted) portion of SEQ ID NO:Y as defined in columns 14 and 15 of Table 1A, or the polypeptide encoded by the portion of SEQ ID NO:X as defined in columns 8 and 9 of Table 2), and m is defined as any integer ranging from 2 to q-6. Polynucleotides encoding these polypeptides are also encompassed by the invention.

[0229] The present invention further provides polypeptides having one or more residues from the carboxy terminus of the amino acid sequence of a polypeptide disclosed herein (e.g., a polypeptide of SEQ ID NO:Y, the mature (secreted) portion of SEQ ID NO:Y as defined in columns 14 and 15 of Table 1A, a polypeptide encoded by the polynucleotide sequence contained in SEQ ID NO:X, a polypeptide encoded by the portion of SEQ ID NO:X as defined in columns 8 and 9 of Table 2, a polypeptide encoded by the portion of SEQ ID NO:B as defined in column 6 of Table 1C, a polypeptide encoded by the cDNA contained in ATCC Deposit No:Z, and/or a mature polypeptide encoded by the cDNA contained in ATCC Deposit No:Z). In particular, C-terminal deletions may be described by the general formula 1-n, where n is any whole integer ranging from 6 to q-1, and where n corresponds to the position of amino acid residue in a polypeptide of the invention. Polynucleotides encoding these polypeptides are also encompassed by the invention.

[0230] In addition, any of the above described N- or C-terminal deletions can be combined to produce a N- and C-terminal deleted polypeptide. The invention also provides polypeptides having one or more amino acids deleted from both the amino and the carboxyl termini, which may be described generally as having residues m-n of a polypeptide encoded by SEQ ID NO:X (e.g., including, but not limited to, the preferred polypeptide disclosed as SEQ ID NO:Y, the mature (secreted) portion of SEQ ID NO:Y as defined in columns 14 and 15 of Table 1A, and the polypeptide encoded by the portion of SEQ ID NO:X as defined in columns 8 and 9 of Table 2), the cDNA contained in ATCC Deposit No:Z, and/or the complement thereof, where n and m are integers as described above. Polynucleotides encoding these polypeptides are also encompassed by the invention.

[0231] Also as mentioned above, even if deletion of one or more amino acids from the C-terminus of a protein results in modification of loss of one or more biological functions of the protein, other functional activities (e.g., biological activities such as, for example, activity useful in detecting, preventing, diagnosing, prognosticating, treating, and/or ameliorating cardiovascular diseases and disorders; ability to multimerize; ability to bind a ligand; antigenic ability useful for production of polypeptide specific antibodies) may still be retained. For example the ability of the shortened mutein to induce and/or bind to antibodies which recognize the complete or mature forms of the polypeptide generally will be retained when less than the majority of the residues of the complete or mature polypeptide are removed from the C-terminus. Whether a particular polypeptide lacking C-terminal residues of a complete polypeptide retains such immunologic activities can readily be determined by routine methods described herein and otherwise known in the art. It is not unlikely that a mutein with a large number of deleted C-terminal amino acid residues may retain some biological or immunogenic activities. In fact, peptides composed of as few as six amino acid residues may often evoke an immune response.

[0232] The present application is also directed to proteins containing polypeptides at least 80%, 85%, 90%, 95%, 96%, 97%, 98% or 99% identical to a polypeptide sequence set forth herein. In preferred embodiments, the application is directed to proteins containing polypeptides at least 80%, 85%, 90%, 95%, 96%, 97%, 98% or 99% identical to polypeptides having the amino acid sequence of the specific N- and C-terminal deletions. Polynucleotides encoding these polypeptides are also encompassed by the invention.

[0233] Any polypeptide sequence encoded by, for example, the polynucleotide sequences set forth as SEQ ID NO:X or the complement thereof, (presented, for example, in Tables 1A and 2), the cDNA contained in ATCC Deposit No:Z, or the polynucleotide sequence as defined in column 6 of Table 1C, may be analyzed to determine certain preferred regions of the polypeptide. For example, the amino acid sequence of a polypeptide encoded by a polynucleotide sequence of SEQ ID NO:X (e.g., the polypeptide of SEQ ID NO:Y and the polypeptide encoded by the portion of SEQ ID NO:X as defined in columns 8 and 9 of Table 2) or the cDNA contained in ATCC Deposit No:Z may be analyzed using the default parameters of the DNASTAR computer algorithm (DNASTAR, Inc., 1228 S. Park St., Madison, Wis. 53715 USA; http://www.dnastar.com/).

[0234] Polypeptide regions that may be routinely obtained using the DNASTAR computer algorithm include, but are not limited to, Garnier-Robson alpha-regions, beta-regions, turn-regions, and coil-regions; Chou-Fasman alpha-regions, beta-regions, and turn-regions; Kyte-Doolittle hydrophilic regions and hydrophobic regions; Eisenberg alpha- and beta-amphipathic regions; Karplus-Schulz flexible regions; Emini surface-forming regions; and Jameson-Wolf regions of high antigenic index. Among highly preferred polynucleotides of the invention in this regard are those that encode polypeptides comprising regions that combine several structural features, such as several (e.g., 1, 2, 3 or 4) of the features set out above.

[0235] Additionally, Kyte-Doolittle hydrophilic regions and hydrophobic regions, Emini surface-forming regions, and Jameson-Wolf regions of high antigenic index (i.e., containing four or more contiguous amino acids having an antigenic index of greater than or equal to 1.5, as identified using the default parameters of the Jameson-Wolf program) can routinely be used to determine polypeptide regions that exhibit a high degree of potential for antigenicity. Regions of high antigenicity are determined from data by DNASTAR analysis by choosing values which represent regions of the polypeptide which are likely to be exposed on the surface of the polypeptide in an environment in which antigen recognition may occur in the process of initiation of an immune response.

[0236] Preferred polypeptide fragments of the invention are fragments comprising, or alternatively, consisting of, an amino acid sequence that displays a functional activity (e.g. biological activity such as, for example, activity useful in detecting, preventing, diagnosing, prognosticating, treating, and/or ameliorating cardiovascular diseases and disorders; ability to multimerize; ability to bind a ligand; antigenic ability-useful for production of polypeptide specific antibodies) of the polypeptide sequence of which the amino acid sequence is a fragment. By a polypeptide displaying a “functional activity” is meant a polypeptide capable of one or more known functional activities associated with a full-length protein, such as, for example, biological activity, antigenicity, immunogenicity, and/or multimerization, as described herein.

[0237] Other preferred polypeptide fragments are biologically active fragments. Biologically active fragments are those exhibiting activity similar, but not necessarily identical, to an activity of the polypeptide of the present invention. The biological activity of the fragments may include an improved desired activity, or a decreased undesirable activity.

[0238] In preferred embodiments, polypeptides of the invention comprise, or alternatively consist of, one, two, three, four, five or more of the antigenic fragments of the polypeptide of SEQ D NO:Y, or portions thereof. Polynucleotides encoding these polypeptides are also encompassed by the invention.

Epitopes and Antibodies

[0239] The present invention encompasses polypeptides comprising, or alternatively consisting of, an epitope of: the polypeptide sequence shown in SEQ ID NO:Y; a polypeptide sequence encoded by SEQ ID NO:X or the complementary strand thereto; the polypeptide sequence encoded by the portion of SEQ ID NO:X as defined in columns 8 and 9 of Table 2; the polypeptide sequence encoded by the portion of SEQ D NO:B as defined in column 6 of Table 1C or the complement thereto; the polypeptide sequence encoded by the cDNA contained in ATCC Deposit No:Z; or the polypeptide sequence encoded by a polynucleotide that hybridizes to the sequence of SEQ ID NO:X, the complement of the sequence of SEQ ID NO:X, the complement of a portion of SEQ ID NO:X as defined in columns 8 and 9 of Table 2, or the cDNA sequence contained in ATCC Deposit No:Z under stringent hybridization conditions or alternatively, under lower stringency hybridization as defined supra. The present invention further encompasses polynucleotide sequences encoding an epitope of a polypeptide sequence of the invention (such as, for example, the sequence disclosed in SEQ ID NO:X, or a fragment thereof), polynucleotide sequences of the complementary strand of a polynucleotide sequence encoding an epitope of the invention, and polynucleotide sequences which hybridize to the complementary strand under stringent hybridization conditions or alternatively, under lower stringency hybridization conditions defined supra.

[0240] The term “epitopes,” as used herein, refers to portions of a polypeptide having antigenic or immunogenic activity in an animal, preferably a mammal, and most preferably in a human. In a preferred embodiment, the present invention encompasses a polypeptide comprising an epitope, as well as the polynucleotide encoding this polypeptide. An “immunogenic epitope,” as used herein, is defined as a portion of a protein that elicits an antibody response in an animal, as determined by any method known in the art, for example, by the methods for generating antibodies described infra. (See, for example, Geysen et al., Proc. Natl. Acad. Sci. USA 81:3998-4002 (1983)). The term “antigenic epitope,” as used herein, is defined as a portion of a protein to which an antibody can immunospecifically bind its antigen as determined by any method well known in the art, for example, by the immunoassays described herein. Immunospecific binding excludes non-specific binding but does not necessarily exclude cross-reactivity with other antigens. Antigenic epitopes need not necessarily be immunogenic.

[0241] Fragments which function as epitopes may be produced by any conventional means. (See, e.g., Houghten, R. A., Proc. Natl. Acad. Sci. USA 82:5131-5135 (1985) further described in U.S. Pat. No. 4,631,211.)

[0242] In the present invention, antigenic epitopes preferably contain a sequence of at least 4, at least 5, at least 6, at least 7, more preferably at least 8, at least 9, at least 10, at least 11, at least 12, at least 13, at least 14, at least 15, at least 20, at least 25, at least 30, at least 40, at least 50, and, most preferably, between about 15 to about 30 amino acids. Preferred polypeptides comprising immunogenic or antigenic epitopes are at least 10, 15, 20, 25, 30, 35, 40, 45, 50, 55, 60, 65, 70, 75, 80, 85, 90, 95, or 100 amino acid residues in length. Additional non-exclusive preferred antigenic epitopes include the antigenic epitopes disclosed herein, as well as portions thereof. Antigenic epitopes are useful, for example, to raise antibodies, including monoclonal antibodies, that specifically bind the epitope. Preferred antigenic epitopes include the antigenic epitopes disclosed herein, as well as any combination of two, three, four, five or more of these antigenic epitopes. Antigenic epitopes can be used as the target molecules in immunoassays. (See, for instance, Wilson et al., Cell 37:767-778 (1984); Sutcliffe et al., Science 219:660-666 (1983)).

[0243] Non-limiting examples of epitopes of polypeptides that can be used to generate antibodies of the invention include a polypeptide comprising, or alternatively consisting of, at least one, two, three, four, five, six or more of the portion(s) of SEQ ED NO:Y specified in Table 1B. These polypeptide fragments have been determined to bear antigenic epitopes of the proteins of the invention by the analysis of the Jameson-Wolf antigenic index which is included in the DNAStar suite of computer programs. By “comprise” it is intended that a polypeptide contains at least one, two, three, four, five, six or more of the portion(s) of SEQ ID NO:Y shown in Table 1B, but it may contain additional flanking residues on either the amino or carboxyl termini of the recited portion. Such additional flanking sequences are preferably sequences naturally found adjacent to the portion; i.e., contiguous sequence shown in SEQ ID NO:Y. The flanking sequence may, however, be sequences from a heterologous polypeptide, such as from another protein described herein or from a heterologous polypeptide not described herein. In particular embodiments, epitope portions of a polypeptide of the invention comprise one, two, three, or more of the portions of SEQ ID NO:Y shown in Table 1B.

[0244] Similarly, immunogenic epitopes can be used, for example, to induce antibodies according to methods well known in the art. See, for instance, Sutcliffe et al., supra; Wilson et al., supra; Chow et al., Proc. Natl. Acad. Sci. USA 82:910-914; and Bittle et al., J. Gen. Virol. 66:2347-2354 (1985). Preferred immunogenic epitopes include the immunogenic epitopes disclosed herein, as well as any combination of two, three, four, five or more of these immunogenic epitopes. The polypeptides comprising one or more immunogenic epitopes may be presented for eliciting an antibody response together with a carrier protein, such as an albumin, to an animal system (such as rabbit or mouse), or, if the polypeptide is of sufficient length (at least about 25 amino acids), the polypeptide may be presented without a carrier. However, immunogenic epitopes comprising as few as 8 to 10 amino acids have been shown to be sufficient to raise antibodies capable of binding to, at the very least, linear epitopes in a denatured polypeptide (e.g., in Western blotting).

[0245] Epitope-bearing polypeptides of the present invention may be used to induce antibodies according to methods well known in the art including, but not limited to, in vivo immunization, in vitro immunization, and phage display methods. See, e.g., Sutcliffe et al., supra; Wilson et al., supra, and Bittle et al., J. Gen. Virol., 66:2347-2354 (1985). If in vivo immunization is used, animals may be immunized with free peptide; however, anti-peptide antibody titer may be boosted by coupling the peptide to a macromolecular carrier, such as keyhole limpet hemacyanin (KLH) or tetanus toxoid. For instance, peptides containing cysteine residues may be coupled to a carrier using a linker such as maleimidobenzoyl-N-hydroxysuccinimide ester (MBS), while other peptides may be coupled to carriers using a more general linking agent such as glutaraldehyde. Animals such as rabbits, rats and mice are immunized with either free or carrier-coupled peptides, for instance, by intraperitoneal and/or intradermal injection of emulsions containing about 100 μg of peptide or carrier protein and Freund's adjuvant or any other adjuvant known for stimulating an immune response. Several booster injections may be needed, for instance, at intervals of about two weeks, to provide a useful titer of anti-peptide antibody which can be detected, for example, by ELISA assay using free peptide adsorbed to a solid surface. The titer of anti-peptide antibodies in serum from an immunized animal may be increased by selection of anti-peptide antibodies, for instance, by adsorption to the peptide on a solid support and elution of the selected antibodies according to methods well known in the art.

[0246] As one of skill in the art will appreciate, and as discussed above, the polypeptides of the present invention (e.g., those comprising an immunogenic or antigenic epitope) can be fused to heterologous polypeptide sequences. For example, polypeptides of the present invention (including fragments or variants thereof), may be fused with the constant domain of immunoglobulins (IgA, IgE, IgG, IgM), or portions thereof (CH1, CH2, CH3, or any combination thereof and portions thereof, resulting in chimeric polypeptides. By way of another non-limiting example, polypeptides and/or antibodies of the present invention (including fragments or variants thereof) may be fused with albumin (including but not limited to recombinant human serum albumin or fragments or variants thereof (see, e.g., U.S. Pat. No. 5,876,969, issued Mar. 2, 1999, EP Patent 0 413 622, and U.S. Pat. No. 5,766,883, issued Jun. 16, 1998, herein incorporated by reference in their entirety)). In a preferred embodiment, polypeptides and/or antibodies of the present invention (including fragments or variants thereof) are fused with the mature form of human serum albumin (i.e., amino acids 1-585 of human serum albumin as shown in FIGS. 1 and 2 of EP Patent 0 322 094) which is herein incorporated by reference in its entirety. In another preferred embodiment, polypeptides and/or antibodies of the present invention (including fragments or variants thereof) are fused with polypeptide fragments comprising, or alternatively consisting of, amino acid residues 1-z of human serum albumin, where z is an integer from 369 to 419, as described in U.S. Pat. No. 5,766,883 herein incorporated by reference in its entirety. Polypeptides and/or antibodies of the present invention (including fragments or variants thereof) may be fused to either the N- or C-terminal end of the heterologous protein (e.g., immunoglobulin Fc polypeptide or human serum albumin polypeptide). Polynucleotides encoding fusion proteins of the invention are also encompassed by the invention.

[0247] Such fusion proteins as those described above may facilitate purification and may increase half-life in vivo. This has been shown for chimeric proteins consisting of the first two domains of the human CD4-polypeptide and various domains of the constant regions of the heavy or light chains of mammalian immunoglobulins. See, e.g., EP 394,827; Traunecker et al., Nature, 331:84-86 (1988). Enhanced delivery of an antigen across the epithelial barrier to the immune system has been demonstrated for antigens (e.g., insulin) conjugated to an FcRn binding partner such as IgG or Fc fragments (see, e.g., PCT Publications WO 96/22024 and WO 99/04813). IgG fusion proteins that have a disulfide-linked dimeric structure due to the IgG portion desulfide bonds have also been found to be more efficient in binding and neutralizing other molecules than monomeric polypeptides or fragments thereof alone. See, e.g., Fountoulakis et al., J. Biochem., 270:3958-3964 (1995). Nucleic acids encoding the above epitopes can also be recombined with a gene of interest as an epitope tag (e.g., the hemagglutinin (HA) tag or flag tag) to aid in detection and purification of the expressed polypeptide. For example, a system described by Janknecht et al. allows for the ready purification of non-denatured fusion proteins expressed in human cell lines (Janknecht et al., 1991, Proc. Natl. Acad. Sci. USA 88:8972-897). In this system, the gene of interest is subcloned into a vaccinia recombination plasmid such that the open reading frame of the gene is translationally fused to an amino-terminal tag consisting of six histidine residues. The tag serves as a matrix binding domain for the fusion protein. Extracts from cells infected with the recombinant vaccinia virus are loaded onto Ni2+ nitriloacetic acid-agarose column and histidine-tagged proteins can be selectively eluted with imidazole-containing buffers.

Fusion Proteins

[0248] Any polypeptide of the present invention can be used to generate fusion proteins. For example, the polypeptide of the present invention, when fused to a second protein, can be used as an antigenic tag. Antibodies raised against the polypeptide of the present invention can be used to indirectly detect the second protein by binding to the polypeptide. Moreover, because secreted proteins target cellular locations based on trafficking signals, polypeptides of the present invention which are shown to be secreted can be used as targeting molecules once fused to other proteins.

[0249] Examples of domains that can be fused to polypeptides of the present invention include not only heterologous signal sequences, but also other heterologous functional regions. The fusion does not necessarily need to be direct, but may occur through linker sequences.

[0250] In certain preferred embodiments, proteins of the invention are fusion proteins comprising an amino acid sequence that is an N and/or C-terminal deletion of a polypeptide of the invention. In preferred embodiments, the invention is directed to a fusion protein comprising an amino acid sequence that is at least 90%, 95%, 96%, 97%, 98% or 99% identical to a polypeptide sequence of the invention. Polynucleotides encoding these proteins are also encompassed by the invention.

[0251] Moreover, fusion proteins may also be engineered to improve characteristics of the polypeptide of the present invention. For instance, a region of additional amino acids, particularly charged amino acids, may be added to the N-terminus of the polypeptide to improve stability and persistence during purification from the host cell or subsequent handling and storage. Also, peptide moieties may be added to the polypeptide to facilitate purification. Such regions may be removed prior to final preparation of the polypeptide. The addition of peptide moieties to facilitate handling of polypeptides are familiar and routine techniques in the art.

[0252] As one of skill in the art will appreciate that, as discussed above, polypeptides of the present invention, and epitope-bearing fragments thereof, can be combined with heterologous polypeptide sequences. For example, the polypeptides of the present invention may be fused with heterologous polypeptide sequences, for example, the polypeptides of the present invention may be fused with the constant domain of immunoglobulins (IgA, IgE, IgG, IgM) or portions thereof (CH1, CH2, CH3, and any combination thereof, including both entire domains and portions thereof), or albumin (including, but not limited to, native or recombinant human albumin or fragments or variants thereof (see, e.g., U.S. Pat. No. 5,876,969, issued Mar. 2, 1999, EP Patent 0 413 622, and U.S. Pat. No. 5,766,883, issued Jun. 16, 1998, herein incorporated by reference in their entirety)), resulting in chimeric polypeptides. For example, EP-A-O 464 533 (Canadian counterpart 2045869) discloses fusion proteins comprising various portions of constant region of immunoglobulin molecules together with another human protein or part thereof. In many cases, the Fc part in a fusion protein is beneficial in therapy and diagnosis, and thus can result in, for example, improved pharmacokinetic properties (EP-A 0232 262). Alternatively, deleting the Fc part after the fusion protein has been expressed, detected, and purified, would be desired. For example, the Fc portion may hinder therapy and diagnosis if the fusion protein is used as an antigen for immunizations. In drug discovery, for example, human proteins, such as hIL-5, have been fused with Fc portions for the purpose of high-throughput screening assays to identify antagonists of hIL-5. See, D. Bennett et al., J. Molecular Recognition 8:52-58 (1995); K. Johanson et al., J. Biol. Chem. 270:9459-9471 (1995).

[0253] Moreover, the polypeptides of the present invention can be fused to marker sequences, such as a polypeptide which facilitates purification of the fused polypeptide. In preferred embodiments, the marker amino acid sequence is a hexa-histidine peptide, such as the tag provided in a pQE vector (QIAGEN, Inc., 9259 Eton Avenue, Chatsworth, Calif., 91311), among others, many of which are commercially available. As described in Gentz et al., Proc. Natl. Acad. Sci. USA 86:821-824 (1989), for instance, hexa-histidine provides for convenient purification of the fusion protein. Another peptide tag useful for purification, the “HA” tag, corresponds to an epitope derived from the influenza hemagglutinin protein (Wilson et al., Cell 37:767 (1984)).

[0254] Additional fusion proteins of the invention may be generated through the techniques of gene-shuffling, motif-shuffling, exon-shuffling, and/or codon-shuffling (collectively referred to as “DNA shuffling”). DNA shuffling may be employed to modulate the activities of polypeptides of the invention, such methods can be used to generate polypeptides with altered activity, as well as agonists and antagonists of the polypeptides. See, generally, U.S. Pat. Nos. 5,605,793; 5,811,238; 5,830,721; 5,834,252; and 5,837,458, and Patten et al., Curr. Opinion Biotechnol. 8:724-33 (1997); Harayama, Trends Biotechnol. 16(2):76-82 (1998); Hansson, et al., J. Mol. Biol. 287:265-76 (1999); and Lorenzo and Blasco, Biotechniques 24(2):308-13 (1998) (each of these patents and publications are hereby incorporated by reference in its entirety). In one embodiment, alteration of polynucleotides corresponding to SEQ ID NO:X and the polypeptides encoded by these polynucleotides may be achieved by DNA shuffling. DNA shuffling involves the assembly of two or more DNA segments by homologous or site-specific recombination to generate variation in the polynucleotide sequence. In another embodiment, polynucleotides of the invention, or the encoded polypeptides, may be altered by being subjected to random mutagenesis by error-prone PCR, random nucleotide insertion or other methods prior to recombination. In another embodiment, one or more components, motifs, sections, parts, domains, fragments, etc., of a polynucleotide encoding a polypeptide of the invention may be recombined with one or more components, motifs, sections, parts, domains, fragments, etc. of one or more heterologous molecules.

[0255] Thus, any of these above fusions can be engineered using the polynucleotides or the polypeptides of the present invention.

Recombinant and Synthetic Production of Polypeptides of the Invention

[0256] The present invention also relates to vectors containing the polynucleotide of the present invention, host cells, and the production of polypeptides by synthetic and recombinant techniques. The vector may be, for example, a phage, plasmid, viral, or retroviral vector. Retroviral vectors may be replication competent or replication defective. In the latter case, viral propagation generally will occur only in complementing host cells.

[0257] The polynucleotides of the invention may be joined to a vector containing a selectable marker for propagation in a host. Generally, a plasmid vector is introduced in a precipitate, such as a calcium phosphate precipitate, or in a complex with a charged lipid. If the vector is a virus, it may be packaged in vitro using an appropriate packaging cell line and then transduced into host cells.

[0258] The polynucleotide insert should be operatively linked to an appropriate promoter, such as the phage lambda PL promoter, the E. coli lac, trp, phoA and tac promoters, the SV40 early and late promoters and promoters of retroviral LTRs, to name a few. Other suitable promoters will be known to the skilled artisan. The expression constructs will further contain sites for transcription initiation, termination, and, in the transcribed region, a ribosome binding site for translation. The coding portion of the transcripts expressed by the constructs will preferably include a translation initiating codon at the beginning and a termination codon (UAA, UGA or UAG) appropriately positioned at the end of the polypeptide to be translated.

[0259] As indicated, the expression vectors will preferably include at least one selectable marker. Such markers include dihydrofolate reductase, G418, glutamine synthase, or neomycin resistance for eukaryotic cell culture, and tetracycline, kanamycin or ampicillin resistance genes for culturing in E. coli and other bacteria. Representative examples of appropriate hosts include, but are not limited to, bacterial cells, such as E. coli, Streptomyces and Salmonella typhimurium cells; fungal cells, such as yeast cells (e.g., Saccharomyces cerevisiae or Pichia pastoris (ATCC Accession No. 201178)); insect cells such as Drosophila S2 and Spodoptera Sf9 cells; animal cells such as CHO, COS, 293, and Bowes melanoma cells; and plant cells. Appropriate culture mediums and conditions for the above-described host cells are known in the art.

[0260] Among vectors preferred for use in bacteria include pQE70, pQE60 and pQE-9, available from QIAGEN, Inc.; pBluescript vectors, Phagescript vectors, pNH8A, pNH16a, pNH18A, pNH46A, available from Stratagene Cloning Systems, Inc.; and ptrc99a, pKK223-3, pKK233-3, pDR540, pRIT5 available from Pharmacia Biotech, Inc. Among preferred eukaryotic vectors are pWLNEO, pSV2CAT, pOG44, pXT1 and pSG available from Stratagene; and pSVK3, pBPV, pMSG and pSVL available from Pharmacia. Preferred expression vectors for use in yeast systems include, but are not limited to pYES2, pYD1, pTEF1/Zeo, pYES2/GS, pPICZ, pGAPZ, pGAPZalph, pPIC9, pPIC3.5, pHIL-D2, pHIL-S1, pPIC3.5K, pPIC9K, and PAO815 (all available from Invitrogen, Carlbad, Calif.). Other suitable vectors will be readily apparent to the skilled artisan.

[0261] Vectors which use glutamine synthase (GS) or DHFR as the selectable markers can be amplified in the presence of the drugs methionine sulphoximine or methotrexate, respectively. An advantage of glutamine synthase based vectors are the availabilty of cell lines (e.g., the murine myeloma cell line, NS0) which are glutamine synthase negative. Glutamine synthase expression systems can also function in glutamine synthase expressing cells (e.g., Chinese Hamster Ovary (CHO) cells) by providing additional inhibitor to prevent the functioning of the endogenous gene. A glutamine synthase expression system and components thereof are detailed in PCT publications: WO87/04462; WO86/05807; WO89/01036; WO89/10404; and WO91/06657, which are hereby incorporated in their entireties by reference herein. Additionally, glutamine synthase expression vectors can be obtained from Lonza Biologics, Inc. (Portsmouth, N.H.). Expression and production of monoclonal antibodies using a GS expression system in murine myeloma cells is described in Bebbington et al., Bio/technology 10:169(1992) and in Biblia and Robinson Biotechnol. Prog. 11:1 (1995) which are herein incorporated by reference.

[0262] The present invention also relates to host cells containing the above-described vector constructs described herein, and additionally encompasses host cells containing nucleotide sequences of the invention that are operably associated with one or more heterologous control regions (e.g., promoter and/or enhancer) using techniques known of in the art. The host cell can be a higher eukaryotic cell, such as a mammalian cell (e.g., a human derived cell), or a lower eukaryotic cell, such as a yeast cell, or the host cell can be a prokaryotic cell, such as a bacterial cell. A host strain may be chosen which modulates the expression of the inserted gene sequences, or modifies and processes the gene product in the specific fashion desired. Expression from certain promoters can be elevated in the presence of certain inducers; thus expression of the genetically engineered polypeptide may be controlled. Furthermore, different host cells have characteristics and specific mechanisms for the translational and post-translational processing and modification (e.g., phosphorylation, cleavage) of proteins. Appropriate cell lines can be chosen to ensure the desired modifications and processing of the foreign protein expressed.

[0263] Introduction of the nucleic acids and nucleic acid constructs of the invention into the host cell can be effected by calcium phosphate transfection, DEAE-dextran mediated transfection, cationic lipid-mediated transfection, electroporation, transduction, infection, or other methods. Such methods are described in many standard laboratory manuals, such as Davis et al., Basic Methods In Molecular Biology (1986). It is specifically contemplated that the polypeptides of the present invention may in fact be expressed by a host cell lacking a recombinant vector.

[0264] In addition to encompassing host cells containing the vector constructs discussed herein, the invention also encompasses primary, secondary, and immortalized host cells of vertebrate origin, particularly mammalian origin, that have been engineered to delete or replace endogenous genetic material (e.g., the coding sequence), and/or to include genetic material (e.g., heterologous polynucleotide sequences) that is operably associated with polynucleotides of the invention, and which activates, alters, and/or amplifies endogenous polynucleotides. For example, techniques known in the art may be used to operably associate heterologous control regions (e.g., promoter and/or enhancer) and endogenous polynucleotide sequences via homologous recombination (see, e.g., U.S. Pat. No. 5,641,670, issued Jun. 24, 1997; International Publication Number WO 96/29411; International Publication Number WO 94/12650; Koller et al., Proc. Natl. Acad. Sci. USA 86:8932-8935 (1989); and Zijlstra et al., Nature 342:435-438 (1989), the disclosures of each of which are incorporated by reference in their entireties).

[0265] Polypeptides of the invention can be recovered and purified from recombinant cell cultures by well-known methods including ammonium sulfate or ethanol precipitation, acid extraction, anion or cation exchange chromatography, phosphocellulose chromatography, hydrophobic interaction chromatography, affinity chromatography, hydroxylapatite chromatography and lectin chromatography. Most preferably, high performance liquid chromatography (“HPLC”) is employed for purification.

[0266] Polypeptides of the present invention can also be recovered from: products purified from natural sources, including bodily fluids, tissues and cells, whether directly isolated or cultured; products of chemical synthetic procedures; and products produced by recombinant techniques from a prokaryotic or eukaryotic host, including, for example, bacterial, yeast, higher plant, insect, and mammalian cells. Depending upon the host employed in a recombinant production procedure, the polypeptides of the present invention may be glycosylated or may be non-glycosylated. In addition, polypeptides of the invention may also include an initial modified methionine residue, in some cases as a result of host-mediated processes. Thus, it is well known in the art that the N-terminal methionine encoded by the translation initiation codon generally is removed with high efficiency from any protein after translation in all eukaryotic cells. While the N-terminal methionine on most proteins also is efficiently removed in most prokaryotes, for some proteins, this prokaryotic removal process is inefficient, depending on the nature of the amino acid to which the N-terminal methionine is covalently linked.

[0267] In one embodiment, the yeast Pichia pastoris is used to express polypeptides of the invention in a eukaryotic system Pichia pastoris is a methylotrophic yeast which can metabolize methanol as its sole carbon source. A main step in the methanol metabolization pathway is the oxidation of methanol to formaldehyde using O₂. This reaction is catalyzed by the enzyme alcohol oxidase. In order to metabolize methanol as its sole carbon source, Pichia pastoris must generate high levels of alcohol oxidase due, in part, to the relatively low affinity of alcohol oxidase for O₂-Consequently, in a growth medium depending on methanol as a main carbon source, the promoter region of one of the two alcohol oxidase genes (AOXI) is highly active. In the presence of methanol, alcohol oxidase produced from the AOXI gene comprises up to approximately 30% of the total soluble protein in Pichia pastoris. See Ellis, S. B., et al., Mol. Cell. Biol. 5:1111-21 (1985); Koutz, P. J, et al., Yeast 5:167-77 (1989); Tschopp, J. F., et al., Nucl. Acids Res. 15:3859-76 (1987). Thus, a heterologous coding sequence, such as, for example, a polynucleotide of the present invention, under the transcriptional regulation of all or part of the AOXI regulatory sequence is expressed at exceptionally high levels in Pichia yeast grown in the presence of methanol.

[0268] In one example, the plasmid vector pPIC9K is used to express DNA encoding a polypeptide of the invention, as set forth herein, in a Pichea yeast system essentially as described in “Pichia Protocols: Methods in Molecular Biology,” D. R. Higgins and J. Cregg, eds. The Humana Press, Totowa, N.J., 1998. This expression vector allows expression and secretion of a polypeptide of the invention by virtue of the strong AOXI promoter linked to the Pichia pastoris alkaline phosphatase (PHO) secretory signal peptide (i.e., leader) located upstream of a multiple cloning site.

[0269] Many other yeast vectors could be used in place of pPIC9K, such as, pYES2, pYD1, pThF1/Zeo, pYES2/GS, pPICZ, pGAPZ, pGAPZalpha, pPIC9, pPIC3.5, pHIL-D2, pHIL-S1, pPIC3.5K, and PAO815, as one skilled in the art would readily appreciate, as long as the proposed expression construct provides appropriately located signals for transcription, translation, secretion (if desired), and the like, including an in-frame AUG as required.

[0270] In another embodiment, high-level expression of a heterologous coding sequence, such as, for example, a polynucleotide of the present invention, may be achieved by cloning the heterologous polynucleotide of the invention into an expression vector such as, for example, pGAPZ or pGAPZalpha, and growing the yeast culture in the absence of methanol.

[0271] In addition to encompassing host cells containing the vector constructs discussed herein, the invention also encompasses primary, secondary, and immortalized host cells of vertebrate origin, particularly mammalian origin, that have been engineered to delete or replace endogenous genetic material (e.g., coding sequence), and/or to include genetic material (e.g., heterologous polynucleotide sequences) that is operably associated with polynucleotides of the invention, and which activates, alters, and/or amplifies endogenous polynucleotides. For example, techniques known in the art may be used to operably associate heterologous control regions (e.g., promoter and/or enhancer) and endogenous polynucleotide sequences via homologous recombination (see, e.g., U.S. Pat. No. 5,641,670, issued Jun. 24, 1997; International Publication No. WO 96/29411, published Sep. 26, 1996; International Publication No. WO 94/12650, published Aug. 4, 1994; Koller et al., Proc. Natl. Acad. Sci. USA 86:8932-8935 (1989); and Zijlstra et al., Nature 342:435438 (1989), the disclosures of each of which are incorporated by reference in their entireties).

[0272] In addition, polypeptides of the invention can be chemically synthesized using techniques known in the art (e.g., see Creighton, 1983, Proteins: Structures and Molecular Principles, W.H. Freeman & Co., N.Y., and Hunkapiller et al., Nature, 310:105-111 (1984)). For example, a polypeptide corresponding to a fragment of a polypeptide can be synthesized by use of a peptide synthesizer. Furthermore, if desired, nonclassical amino acids or chemical amino acid analogs can be introduced as a substitution or addition into the polypeptide sequence. Non-classical amino acids include, but are not limited to, to the D-isomers of the common amino acids, 2,4-diaminobutyric acid, a-amino isobutyric acid, 4-aminobutyric acid, Abu, 2-amino butyric acid, g-Abu, e-Ahx, 6-amino hexanoic acid, Aib, 2-amino isobutyric acid, 3-amino propionic acid, ornithine, norleucine, norvaline, hydroxyproline, sarcosine, citrulline, homocitrulline, cysteic acid, t-butylglycine, t-butylalanine, phenylglycine, cyclohexylalanine, b-alanine, fluoro-amino acids, designer amino acids such as b-methyl amino acids, Ca-methyl amino acids, Na-methyl amino acids, and amino acid analogs in general. Furthermore, the amino acid can be D (dextrorotary) or L (levorotary).

[0273] The invention encompasses polypeptides of the present invention which are differentially modified during or after translation, e.g., by glycosylation, acetylation, phosphorylation, amidation, derivatization by known protecting/blocking groups, proteolytic cleavage, linkage to an antibody molecule or other cellular ligand, etc. Any of numerous chemical modifications may be carried out by known techniques, including but not limited, to specific chemical cleavage by cyanogen bromide, trypsin, chymotrypsin, papain, V8 protease, NaBH₄; acetylation, formylation, oxidation, reduction; metabolic synthesis in the presence of tunicamycin; etc.

[0274] Additional post-translational modifications encompassed by the invention include, for example, e.g., N-linked or O-linked carbohydrate chains, processing of N-terminal or C-terminal ends), attachment of chemical moieties to the amino acid backbone, chemical modifications of N-linked or O-linked carbohydrate chains, and addition or deletion of an N-terminal methionine residue as a result of procaryotic host cell expression. The polypeptides may also be modified with a detectable label, such as an enzymatic, fluorescent, isotopic or affinity label to allow for detection and isolation of the protein.

[0275] Examples of suitable enzymes include horseradish peroxidase, alkaline phosphatase, beta-galactosidase, or acetylcholinesterase; examples of suitable prosthetic group complexes include streptavidin/biotin and avidin/biotin; examples of suitable fluorescent materials include umbelliferone, fluorescein, fluorescein isothiocyanate, rhodamine, dichlorotriazinylamine fluorescein, dansyl chloride dr phycoerythrin; an example of a luminescent material includes luminol; examples of bioluminescent materials include luciferase, luciferin, and aequorin; and examples of suitable radioactive material include iodine (¹²¹I, ¹²³I, ¹²⁵I, ¹³¹I), carbon (¹⁴C), sulfur (³⁵S), tritium (³H) indium (¹¹¹In, ¹¹²In, ^{113m}In, ^{115m}In), technetium (⁹⁹Tc, ^{99m}Tc), thallium (²⁰¹Ti), gallium (⁶⁸Ga, ⁶⁷Ga), palladium (¹⁰³Pd), molybdenum (⁹⁹Mo), xenon (¹³³Xe), fluorine (¹⁸F), ¹⁵³Sm, ¹⁷⁷Lu, ¹⁵⁹Gd, ¹⁴⁹ Pm, ¹⁴⁰La, ¹⁷⁵Yb, ¹⁶⁶Ho, ⁹⁰Y, ⁴⁷Sc, ¹⁸⁶Re, ¹⁸⁸Re, ¹⁴²Pr, ¹⁰⁵Rh, and ⁹⁷RU.

[0276] In specific embodiments, a polypeptide of the present invention or fragment or variant thereof is attached to macrocyclic chelators that associate with radiometal ions, including but not limited to, ¹⁷⁷Lu, ⁹⁰Y, ¹⁶⁶Ho, and ¹⁵³Sm, to polypeptides. In a preferred embodiment, the radiometal ion associated with the macrocyclic chelators is ¹¹¹In. In another preferred embodiment, the radiometal ion associated with the macrocyclic chelator is ⁹⁰Y. In specific embodiments, the macrocyclic chelator is 1,4,7,10-tetraazacyclododecane-N,N′,N″,N′″-tetraacetic acid (DOTA). In other specific embodiments, DOTA is attached to an antibody of the invention or fragment thereof via a linker molecule. Examples of linker molecules useful for conjugating DOTA to a polypeptide are commonly known in the art—see, for example, DeNardo et al., Clin Cancer Res. 4(10):2483-90 (1998); Peterson et al., Bioconjug. Chem. 10(4):553-7 (1999); and Zimmerman et al, Nucl. Med. Biol. 26(8):943-50 (1999); which are hereby incorporated by reference in their entirety.

[0277] As mentioned, the proteins of the invention may be modified by either natural processes, such as posttranslational processing, or by chemical modification techniques which are well known in the art. It will be appreciated that the same type of modification may be present in the same or varying degrees at several sites in a given polypeptide. Polypeptides of the invention may be branched, for example, as a result of ubiquitination, and they may be cyclic, with or without branching. Cyclic, branched, and branched cyclic polypeptides may result from posttranslation natural processes or may be made by synthetic methods. Modifications include acetylation, acylation, ADP-ribosylation, amidation, covalent attachment of flavin, covalent attachment of a heme moiety, covalent attachment of a nucleotide or nucleotide derivative, covalent attachment of a lipid or lipid derivative, covalent attachment of phosphotidylinositol, cross-linking, cyclization, disulfide bond formation, demethylation, formation of covalent cross-links, formation of cysteine, formation of pyroglutamate, formylation, gamma-carboxylation, glycosylation, GPI anchor formation, hydroxylation, iodination, methylation, myristoylation, oxidation, pegylation, proteolytic processing, phosphorylation, prenylation, racemization, selenoylation, sulfation, transfer-RNA mediated addition of amino acids to proteins such as arginylation, and ubiquitination. (See, for instance, PROTEINS—STRUCTURE AND MOLECULAR PROPERTIES, 2nd Ed., T. E. Creighton, W. H. Freeman and Company, New York (1993); POSTTRANSLATIONAL COVALENT MODIFICATION OF PROTEINS, B. C. Johnson, Ed., Academic Press, New York, pgs. 1-12 (1983); Seifter et al., Meth. Enzymol. 182:626-646 (1990); Rattan et al., Ann. N.Y. Acad. Sci. 663:48-62 (1992)).

[0278] Also provided by the invention are chemically modified derivatives of the polypeptides of the invention which may provide additional advantages such as increased solubility, stability and circulating time of the polypeptide, or decreased immunogenicity (see U.S. Pat. No. 4,179,337). The chemical moieties for derivitization may be selected from water soluble polymers such as polyethylene glycol, ethylene glycol/propylene glycol copolymers, carboxymethylcellulose, dextran, polyvinyl alcohol and the like. The polypeptides may be modified at random positions within the molecule, or at predetermined positions within the molecule and may include one, two, three or more attached chemical moieties.

[0279] The polymer may be of any molecular weight, and may be branched or unbranched. For polyethylene glycol, the preferred molecular weight is between about 1 kDa and about 100 kDa (the term “about” indicating that in preparations of polyethylene glycol, some molecules will weigh more, some less, than the stated molecular weight) for ease in handling and manufacturing. Other sizes may be used, depending on the desired therapeutic profile (e.g., the duration of sustained release desired, the effects, if any on biological activity, the ease in handling, the degree or lack of antigenicity and other known effects of the polyethylene glycol to a therapeutic protein or analog). For example, the polyethylene glycol may have an average molecular weight of about 200, 500, 1000, 1500, 2000, 2500, 3000, 3500, 4000, 4500, 5000, 5500, 6000, 6500, 7000, 7500, 8000, 8500, 9000, 9500, 10,000, 10,500, 11,000, 11,500, 12,000, 12,500, 13,000, 13,500, 14,000, 14,500, 15,000, 15,500, 16,000, 16,500, 17,000, 17,500, 18,000, 18,500, 19,000, 19,500, 20,000, 25,000, 30,000, 35,000, 40,000, 45,000, 50,000, 55,000, 60,000, 65,000, 70,000, 75,000, 80,000, 85,000, 90,000, 95,000, or 100,000 kDa.

[0280] As noted above, the polyethylene glycol may have a branched structure. Branched polyethylene glycols are described, for example, in U.S. Pat. No. 5,643,575; Morpurgo et al., Appl. Biochem Biotechnol. 56:59-72 (1996); Vorobjev et al., Nucleosides Nucleotides 18:2745-2750 (1999); and Caliceti et al., Bioconjug. Chem. 10:638-646 (1999), the disclosures of each of which are incorporated herein by reference.

[0281] The polyethylene glycol molecules (or other chemical moieties) should be attached to the protein with consideration of effects on functional or antigenic domains of the protein. There are a number of attachment methods available to those skilled in the art, such as, for example, the method disclosed in EP 0 401 384 (coupling PEG to G-CSF), herein incorporated by reference; see also Malik et al., Exp. Hematol. 20:1028-1035 (1992), reporting pegylation of GM-CSF using tresyl chloride. For example, polyethylene glycol may be covalently bound through amino acid residues via a reactive group, such as a free amino or carboxyl group. Reactive groups are those to which an activated polyethylene glycol molecule may be bound. The amino acid residues having a free amino group may include lysine residues and the N-terminal amino acid residues; those having a free carboxyl group may include aspartic acid residues glutamic acid residues and the C-terminal amino acid residue. Sulfhydryl groups may also be used as a reactive group for attaching the polyethylene glycol molecules. Preferred for therapeutic purposes is attachment at an amino group, such as attachment at the N-terminus or lysine group.

[0282] As suggested above, polyethylene glycol may be attached to proteins via linkage to any of a number of amino acid residues. For example, polyethylene glycol can be linked to proteins via covalent bonds to lysine, histidine, aspartic acid, glutamic acid, or cysteine residues. One or more reaction chemistries may be employed to attach polyethylene glycol to specific amino acid residues (e.g., lysine, histidine, aspartic acid, glutamic acid, or cysteine) of the protein or to more than one type of amino acid residue (e.g., lysine, histidine, aspartic acid, glutamic acid, cysteine and combinations thereof) of the protein.

[0283] One may specifically desire proteins chemically modified at the N-terminus. Using polyethylene glycol as an illustration of the present composition, one may select from a variety of polyethylene glycol molecules (by molecular weight, branching, etc.), the proportion of polyethylene glycol molecules to protein (polypeptide) molecules in the reaction mix, the type of pegylation reaction to be performed, and the method of obtaining the selected N-terminally pegylated protein. The method of obtaining the N-terminally pegylated preparation (i.e., separating this moiety from other monopegylated moieties if necessary) may be by purification of the N-terminally pegylated material from a population of pegylated protein molecules. Selective proteins chemically modified at the N-terminus modification may be accomplished by reductive alkylation which exploits differential reactivity of different types of primary amino groups (lysine versus the N-terminal) available for derivatization in a particular protein. Under the appropriate reaction conditions, substantially selective derivatization of the protein at the N-terminus with a carbonyl group containing polymer is achieved.

[0284] As indicated above, pegylation of the proteins of the invention may be accomplished by any number of means. For example, polyethylene glycol may be attached to the protein either directly or by an intervening linker. Linkerless systems for attaching polyethylene glycol to proteins are described in Delgado et al., Crit. Rev. Thera. Drug Carrier Sys. 9:249-304 (1992); Francis et al., Intern. J. of Hematol. 68:1-18 (1998); U.S. Pat. No. 4,002,531; U.S. Pat. No. 5,349,052; WO 95/06058; and WO 98/32466, the disclosures of each of which are incorporated herein by reference.

[0285] One system for attaching polyethylene glycol directly to amino acid residues of proteins without an intervening linker employs tresylated MPEG, which is produced by the modification of monmethoxy polyethylene glycol (MPEG) using tresylchloride (ClSO₂CH₂CF₃). Upon reaction of protein with tresylated MPEG, polyethylene glycol is directly attached to amine groups of the protein. Thus, the invention includes protein-polyethylene glycol conjugates produced by reacting proteins of the invention with a polyethylene glycol molecule having a 2,2,2-trifluoreothane sulphonyl group.

[0286] Polyethylene glycol can also be attached to proteins using a number of different intervening linkers. For example, U.S. Pat. No. 5,612,460, the entire disclosure of which is incorporated herein by reference, discloses urethane linkers for connecting polyethylene glycol to proteins. Protein-polyethylene glycol conjugates wherein the polyethylene glycol is attached to the protein by a linker can also be produced by reaction of proteins with compounds such as MPEG-succininidylsuccinate, MPEG activated with 1,1′-carbonyldiinudazole, MPEG-2,4,5-trichloropenylcarbonate, MPEG-p-nitrophenolcarbonate, and various MPEG-succinate derivatives. A number of additional polyethylene glycol derivatives and reaction chemistries for attaching polyethylene glycol to proteins are described in International Publication No. WO 98/32466, the entire disclosure of which is incorporated herein by reference. Pegylated protein products produced using the reaction chemistries set out herein are included within the scope of the invention.

[0287] The number of polyethylene glycol moieties attached to each protein of the invention (i.e., the degree of substitution) may also vary. For example, the pegylated proteins of the invention may be linked, on average, to 1, 2, 3, 4, 5, 6, 7, 8, 9, 10, 12, 15, 17, 20, or more polyethylene glycol molecules. Similarly, the average degree of substitution within ranges such as 1-3,2-4, 3-5,4-6, 5-7,6-8, 7-9,8-10, 9-11, 10-12, 11-13, 12-14, 13-15, 14-16, 15-17, 16-18, 17-19, or 18-20 polyethylene glycol moieties per protein molecule. Methods for determining the degree of substitution are discussed, for example, in Delgado et al., Crit. Rev. Thera. Drug Carrier Sys. 9:249-304 (1992).

[0288] The polypeptides of the invention can be recovered and purified from chemical synthesis and recombinant cell cultures by standard methods which include, but are not limited to, ammonium sulfate or ethanol precipitation, acid extraction, anion or cation exchange chromatography, phosphocellulose chromatography, hydrophobic interaction chromatography, affinity chromatography, hydroxylapatite chromatography and lectin chromatography. Most preferably, high performance liquid chromatography (“HPLC”) is employed for purification. Well known techniques for refolding protein may be employed to regenerate active conformation when the polypeptide is denatured during isolation and/or purification.

[0289] The polypeptides of the invention may be in monomers or multimers (i.e., dimers, trimers, tetramers and higher multimers). Accordingly, the present invention relates to monomers and multimers of the polypeptides of the invention, their preparation, and compositions (preferably, Therapeutics) containing them. In specific embodiments, the polypeptides of the invention are monomers, dimers, trimers or tetramers. In additional embodiments, the multimers of the invention are at least dimers, at least trimers, or at least tetramers.

[0290] Multimers encompassed by the invention may be homomers or heteromers. As used herein, the term homomer refers to a multimer containing only polypeptides corresponding to a protein of the invention (e.g., the amino acid sequence of SEQ ID NO:Y, an amino acid sequence encoded by SEQ ID NO:X or the complement of SEQ ID NO:X, the amino acid sequence encoded by the portion of SEQ ID NO:X as defined in columns 8 and 9 of Table 2, and/or an amino acid sequence encoded by cDNA contained in ATCC Deposit No:Z (including fragments, variants, splice variants, and fusion proteins, corresponding to these as described herein)). These homomers may contain polypeptides having identical or different amino acid sequences. In a specific embodiment, a homomer of the invention is a multimer containing only polypeptides having an identical amino acid sequence. In another specific embodiment, a homomer of the invention is a multimer containing polypeptides having different amino acid sequences. In specific embodiments, the multimer of the invention is a homodimer (e.g., containing two polypeptides having identical or different amino acid sequences) or a homotrimer (e.g., containing three polypeptides having identical and/or different amino acid sequences). In additional embodiments, the homomeric multimer of the invention is at least a homodimer, at least a homotrimer, or at least a homotetramer.

[0291] As used herein, the term heteromer refers to a multimer containing one or more heterologous polypeptides (i.e., polypeptides of different proteins) in addition to the polypeptides of the invention. In a specific embodiment, the multimer of the invention is a heterodimer, a heterotrimer, or a heterotetramer. In additional embodiments, the heteromeric multimer of the invention is at least a heterodimer, at least a heterotrimer, or at least a heterotetramer.

[0292] Multimers of the invention may be the result of hydrophobic, hydrophilic, ionic and/or covalent associations and/or may be indirectly linked by, for example, liposome formation. Thus, in one embodiment, multimers of the invention, such as, for example, homodimers or homotrimers, are formed when polypeptides of the invention contact one another in solution. In another embodiment, heteromultimers of the invention, such as, for example, heterotrimers or heterotetramers, are formed when polypeptides of the invention contact antibodies to the polypeptides of the invention (including antibodies to the heterologous polypeptide sequence in a fusion protein of the invention) in solution. In other embodiments, multimers of the invention are formed by covalent associations with and/or between the polypeptides of the invention. Such covalent associations may involve one or more amino acid residues contained in the polypeptide sequence (e.g., that recited in SEQ ID NO:Y, encoded by the portion of SEQ ID NO:X as defined in columns 8 and 9 of Table 2, and/or encoded by the cDNA contained in ATCC Deposit No:Z). In one instance, the covalent associations are cross-linking between cysteine residues located within the polypeptide sequences which interact in the native (i.e., naturally occurring) polypeptide. In another instance, the covalent associations are the consequence of chemical or recombinant manipulation. Alternatively, such covalent associations may involve one or more amino acid residues contained in the heterologous polypeptide sequence in a fusion protein. In one example, covalent associations are between the heterologous sequence contained in a fusion protein of the invention (see, e.g., U.S. Pat. No. 5,478,925). In a specific example, the covalent associations are between the heterologous sequence contained in a Fc fusion protein of the invention (as described herein). In another specific example, covalent associations of fusion proteins of the invention are between heterologous polypeptide sequence from another protein that is capable of forming covalently associated multimers, such as for example, osteoprotegerin (see, e.g., International Publication NO: WO 98/49305, the contents of which are herein incorporated by reference in its entirety). In another embodiment, two or more polypeptides of the invention are joined through peptide linkers. Examples include those peptide linkers described in U.S. Pat. No. 5,073,627 (hereby incorporated by reference). Proteins comprising multiple polypeptides of the invention separated by peptide linkers may be produced using conventional recombinant DNA technology.

[0293] Another method for preparing multimer polypeptides of the invention involves use of polypeptides of the invention fused to a leucine zipper or isoleucine zipper polypeptide sequence. Leucine zipper and isoleucine zipper domains are polypeptides that promote multimerization of the proteins in which they are found. Leucine zippers were originally identified in several DNA-binding proteins (Landschulz et al., Science 240:1759, (1988)), and have since been found in a variety of different proteins. Among the known leucine zippers are naturally occurring peptides and derivatives thereof that dimerize or trimerize. Examples of leucine zipper domains suitable for producing soluble multimeric proteins of the invention are those described in PCT application WO 94/10308, hereby incorporated by reference. Recombinant fusion proteins comprising a polypeptide of the invention fused to a polypeptide sequence that dimerizes or trimerizes in solution are expressed in suitable host cells, and the resulting soluble multimeric fusion protein is recovered from the culture supernatant using techniques known in the art.

[0294] Trimeric polypeptides of the invention may offer the advantage of enhanced biological activity. Preferred leucine zipper moieties and isoleucine moieties are those that preferentially form trimers. One example is a leucine zipper derived from lung surfactant protein D (SPD), as described in Hoppe et al. (FEBS Letters 344:191, (1994)) and in U.S. patent application Ser. No. 08/446,922, hereby incorporated by reference. Other peptides derived from naturally occurring trimeric proteins may be employed in preparing trimeric polypeptides of the invention.

[0295] In another example, proteins of the invention are associated by interactions between Flag® polypeptide sequence contained in fusion proteins of the invention containing Flag® polypeptide sequence. In a further embodiment, proteins of the invention are associated by interactions between heterologous polypeptide sequence contained in Flag® fusion proteins of the invention and anti-Flag® antibody.

[0296] The multimers of the invention may be generated using chemical techniques known in the art. For example, polypeptides desired to be contained in the multimers of the invention may be chemically cross-linked using linker molecules and linker molecule length optimization techniques known in the art (see, e.g., U.S. Pat. No. 5,478,925, which is herein incorporated by reference in its entirety). Additionally, multimers of the invention may be generated using techniques known in the art to form one or more inter-molecule cross-links between the cysteine residues located within the sequence of the polypeptides desired to be contained in the multimer (see, e.g., U.S. Pat. No. 5,478,925, which is herein incorporated by reference in its entirety). Further, polypeptides of the invention may be routinely modified by the addition of cysteine or biotin to the C-terminus or N-terminus of the polypeptide and techniques known in the art may be applied to generate multimers containing one or more of these modified polypeptides (see, e.g., U.S. Pat. No. 5,478,925, which is herein incorporated by reference in its entirety). Additionally, techniques known in the art may be applied to generate liposomes containing the polypeptide components desired to be contained in the multimer of the invention (see, e.g., U.S. Pat. No. 5,478,925, which is herein incorporated by reference in its entirety).

[0297] Alternatively, multimers of the invention may be generated using genetic engineering techniques known in the art. In one embodiment, polypeptides contained in multimers of the invention are produced recombinantly using fusion protein technology described herein or otherwise known in the art (see, e.g., U.S. Pat. No. 5,478,925, which is herein incorporated by reference in its entirety). In a specific embodiment, polynucleotides coding for a homodimer of the invention are generated by ligating a polynucleotide sequence encoding a polypeptide of the invention to a sequence encoding a linker polypeptide and then further to a synthetic polynucleotide encoding the translated product of the polypeptide in the reverse orientation from the original C-terminus to the N-terminus (lacking the leader sequence) (see, e.g., U.S. Pat. No. 5,478,925, which is herein incorporated by reference in its entirety). In another embodiment, recombinant techniques described herein or otherwise known in the art are applied to generate recombinant polypeptides of the invention which contain a transmembrane domain (or hydrophobic or signal peptide) and which can be incorporated by membrane reconstitution techniques into liposomes (see, e.g., U.S. Pat. No. 5,478,925, which is herein incorporated by reference in its entirety).

Antibodies

[0298] Further polypeptides of the invention relate to antibodies and T-cell antigen receptors (TCR) which immunospecifically bind a polypeptide, polypeptide fragment, or variant of the invention (e.g., a polypeptide or fragment or variant of the amino acid sequence of SEQ ID NO:Y or a polypeptide encoded by the cDNA contained in ATCC Deposit No:Z, and/or an epitope, of the present invention) as determined by immunoassays well known in the art for assaying specific antibody-antigen binding. Antibodies of the invention include, but are not limited to, polyclonal, monoclonal, multispecific, human, humanized or chimeric antibodies, single chain antibodies, Fab fragments, F(ab′) fragments, fragments produced by a Fab expression library, anti-idiotypic (anti-Id) antibodies (including, e.g., anti-Id antibodies to antibodies of the invention), intracellularly-made antibodies (i.e., intrabodies), and epitope-binding fragments of any of the above. The term “antibody,” as used herein, refers to immunoglobulin molecules and immunologically active portions of immunoglobulin molecules, i.e., molecules that contain an antigen binding site that immunospecifically binds an antigen. The immunoglobulin molecules of the invention can be of any type (e.g., IgG, IgE, IgM, IgD, IgA and IgY), class (e.g., IgG1, IgG2, IgG3, IgG4, IgA1 and IgA2) or subclass of immunoglobulin molecule. In preferred embodiments, the immunoglobulin molecules of the invention are IgG1. In other preferred embodiments, the immunoglobulin molecules of the invention are IgG4.

[0299] Most preferably the antibodies are human antigen-binding antibody fragments of the present invention and include, but are not limited to, Fab, Fab′ and F(ab′)2, Fd, single-chain Fvs (scFv), single-chain antibodies, disulfide-linked Fvs (sdFv) and fragments comprising either a VL or VH domain. Antigen-binding antibody fragments, including single-chain antibodies, may comprise the variable region(s) alone or in combination with the entirety or a portion of the following: hinge region, CH1, CH2, and CH3 domains. Also included in the invention are antigen-binding fragments also comprising any combination of variable region(s) with a hinge region, CH1, CH2, and CH3 domains. The antibodies of the invention may be from any animal origin including birds and mammals. Preferably, the antibodies are human, murine (e.g., mouse and rat), donkey, ship rabbit, goat, guinea pig, camel, horse, or chicken. As used herein, “human” antibodies include antibodies having the amino acid sequence of a human immunoglobulin and include antibodies isolated from human immunoglobulin libraries or from animals transgenic for one or more human immunoglobulin and that do not express endogenous immunoglobulins, as described infra and, for example in, U.S. Pat. No. 5,939,598 by Kucherlapati et al.

[0300] The antibodies of the present invention may be monospecific, bispecific, trispecific or of greater multispecificity. Multispecific antibodies may be specific for different epitopes of a polypeptide of the present invention or may be specific for both a polypeptide of the present invention as well as for a heterologous epitope, such as a heterologous polypeptide or solid support material. See, e.g., PCT publications WO 93/17715; WO 92/08802; WO 91/00360; WO 92/05793; Tutt, et al., J. Immunol. 147:60-69 (1991); U.S. Pat. Nos. 4,474,893; 4,714,681; 4,925,648; 5,573,920; 5,601,819; Kostelny et al., J. Immunol. 148:1547-1553 (1992).

[0301] Antibodies of the present invention may be described or specified in terms of the epitope(s) or portion(s) of a polypeptide of the present invention which they recognize or specifically bind. The epitope(s) or polypeptide portion(s) may be specified as described herein, e.g., by N-terminal and C-terminal positions, or by size in contiguous amino acid residues, or listed in the Tables and Figures. Preferred epitopes of the invention include the predicted epitopes shown in Table 1B, as well as polynucleotides that encode these epitopes. Antibodies which specifically bind any epitope or polypeptide of the present invention may also be excluded. Therefore, the present invention includes antibodies that specifically bind polypeptides of the present invention, and allows for the exclusion of the same.

[0302] Antibodies of the present invention may also be described or specified in terms of their cross-reactivity. Antibodies that do not bind any other analog, ortholog, or homolog of a polypeptide of the present invention are included. Antibodies that bind polypeptides with at least 95%, at least 90%, at least 85%, at least 80%, at least 75%, at least 70%, at least 65%, at least 60%, at least 55%, and at least 50% identity (as calculated using methods known in the art and described herein) to a polypeptide of the present invention are also included in the present invention. In specific embodiments, antibodies of the present invention cross-react with murine, rat and/or rabbit homologs of human proteins and the corresponding epitopes thereof. Antibodies that do not bind polypeptides with less than 95%, less than 90%, less than 85%, less than 80%, less than 75%, less than 70%, less than 65%, less than 60%, less than 55%, and less than 50% identity (as calculated using methods known in the art and described herein) to a polypeptide of the present invention are also included in the present invention. In a specific embodiment, the above-described cross-reactivity is with respect to any single specific antigenic or immunogenic polypeptide, or combination(s) of 2, 3, 4, 5, or more of the specific antigenic and/or immunogenic polypeptides disclosed herein. Further included in the present invention are antibodies which bind polypeptides encoded by polynucleotides which hybridize to a polynucleotide of the present invention under stringent hybridization conditions (as described herein). Antibodies of the present invention may also be described or specified in terms of their binding affinity to a polypeptide of the invention. Preferred binding affinities include those with a dissociation constant or K_{d} less than 5×10⁻² M, 10⁻² M, 5×10⁻³M, 10⁻³M, 5×10⁻⁴ M, 10⁻⁴M, 5×10⁻⁵M, 10⁻⁵M, 5×10⁻⁶M, 10⁻⁶ M, 5×10⁻⁷ M, 5×10⁻⁸ M, 10⁻⁸ M, 5×10⁻⁹ M, 10⁻⁹ M, 5×10⁻¹⁰ M, 10⁻¹⁰ M, 5×10⁻¹¹ M, 10⁻¹¹ M, 5×10⁻¹² M, 10⁻¹² M, 5×10⁻¹³ M, 10⁻¹³ M, 5×10⁻¹⁴ M, 10⁻¹⁴ M, 5×10⁻¹⁵ M, or 10⁻¹⁵ M.

[0303] The invention also provides antibodies that competitively inhibit binding of an antibody to an epitope of the invention as determined by any method known in the art for determining competitive binding, for example, the immunoassays described herein. In preferred embodiments, the antibody competitively inhibits binding to the epitope by at least 95%, at least 90%, at least 85%, at least 80%, at least 75%, at least 70%, at least 60%, or at least 50%.

[0304] Antibodies of the present invention may act as agonists or antagonists of the polypeptides of the present invention. For example, the present invention includes antibodies which disrupt the receptor/ligand interactions with the polypeptides of the invention either partially or fully. Preferably, antibodies of the present invention bind an antigenic epitope disclosed herein, or a portion thereof. The invention features both receptor-specific antibodies and ligand-specific antibodies. The invention also features receptor-specific antibodies which do not prevent ligand binding but prevent receptor activation. Receptor activation (i.e., signaling) may be determined by techniques described herein or otherwise known in the art. For example, receptor activation can be determined by detecting the phosphorylation (e.g., tyrosine or serine/threonine) of the receptor or its substrate by immunoprecipitation followed by western blot analysis (for example, as described supra). In specific embodiments, antibodies are provided that inhibit ligand activity or receptor activity by at least 95%, at least 90%, at least 85%, at least 80%, at least 75%, at least 70%, at least 60%, or at least 50% of the activity in absence of the antibody.

[0305] The invention also features receptor-specific antibodies which both prevent ligand binding and receptor activation as well as antibodies that recognize the receptor-ligand complex, and, preferably, do not specifically recognize the unbound receptor or the unbound ligand. Likewise, included in the invention are neutralizing antibodies which bind the ligand and prevent binding of the ligand to the receptor, as well as antibodies which bind the ligand, thereby preventing receptor activation, but do not prevent the ligand from binding the receptor. Further included in the invention are antibodies which activate the receptor. These antibodies may act as receptor agonists, i.e., potentiate or activate either all or a subset of the biological activities of the ligand-mediated receptor activation, for example, by inducing dimerization of the receptor. The antibodies may be specified as agonists, antagonists or inverse agonists for biological activities comprising the specific biological activities of the peptides of the invention disclosed herein. The above antibody agonists can be made using methods known in the art. See, e.g., PCT publication WO 96/40281; U.S. Pat. No. 5,811,097; Deng et al., Blood 92(6):1981-1988 (1998); Chen et al., Cancer Res. 58(16):3668-3678 (1998); Harrop et al., J. Immunol. 161(4):1786-1794 (1998); Zhu et al., Cancer Res. 58(15):3209-3214 (1998); Yoon et al., J. Immunol. 160(7):3170-3179 (1998); Prat et al., J. Cell. Sci. 111(Pt2):237-247 (1998); Pitard et al., J. Immunol. Methods 205(2):177-190 (1997); Liautard et al., Cytokine 9(4):233-241 (1997); Carlson et al., J. Biol. Chem. 272(17):11295-11301 (1997); Taryman et al., Neuron 14(4):755-762 (1995); Muller et al., Structure 6(9):1153-1167 (1998); Bartunek et al., Cytokine 8(1):14-20 (1996) (which are all incorporated by reference herein in their entireties).

[0306] Antibodies of the present invention may be used, for example, to purify, detect, and target the polypeptides of the present invention, including both in vitro and in vivo diagnostic and therapeutic methods. For example, the antibodies have utility in immunoassays for qualitatively and quantitatively measuring levels of the polypeptides of the present invention in biological samples. See, e.g., Harlow et al., Antibodies: A Laboratory Manual, (Cold Spring Harbor Laboratory Press, 2nd ed. 1988); incorporated by reference herein in its entirety.

[0307] As discussed in more detail below, the antibodies of the present invention may be used either alone or in combination with other compositions. The antibodies may further be recombinantly fused to a heterologous polypeptide at the N- or C-terminus or chemically conjugated (including covalent and non-covalent conjugations) to polypeptides or other compositions. For example, antibodies of the present invention may be recombinantly fused or conjugated to molecules useful as labels in detection assays and effector molecules such as heterologous polypeptides, drugs, radionuclides, or toxins. See, e.g., PCT publications WO 92/08495; WO 91/14438; WO 89/12624; U.S. Pat. No. 5,314,995; and EP 396,387; the disclosures of which are incorporated herein by reference in their entireties.

[0308] The antibodies of the invention include derivatives that are modified, i.e, by the covalent attachment of any type of molecule to the antibody such that covalent attachment does not prevent the antibody from generating an anti-idiotypic response. For example, but not by way of limitation, the antibody derivatives include antibodies that have been modified, e.g., by glycosylation, acetylation, pegylation, phosphylation, amidation, derivatization by known protecting/blocking groups, proteolytic cleavage, linkage to a cellular ligand or other protein, etc. Any of numerous chemical modifications may be carried out by known techniques, including, but not limited to specific chemical cleavage, acetylation, formylation, metabolic synthesis of tunicamycin, etc. Additionally, the derivative may contain one or more non-classical amino acids.

[0309] The antibodies of the present invention may be generated by any suitable method known in the art. Polyclonal antibodies to an antigen-of-interest can be produced by various procedures well known in the art. For example, a polypeptide of the invention can be administered to various host animals including, but not limited to, rabbits, mice, rats, etc. to induce the production of sera containing polyclonal antibodies specific for the antigen. Various adjuvants may be used to increase the immunological response, depending on the host species, and include but are not limited to, Freund's (complete and incomplete), mineral gels such as aluminum hydroxide, surface active substances such as lysolecithin, pluronic polyols, polyanions, peptides, oil emulsions, keyhole limpet hemocyanins, dinitrophenol, and potentially useful human adjuvants such as BCG (bacilue Calmette-Guerin) and corynebacterium parvum. Such adjuvants are also well known in the art.

[0310] Monoclonal antibodies can be prepared using a wide variety of techniques known in the art including the use of hybridoma, recombinant, and phage display technologies, or a combination thereof. For example, monoclonal antibodies can be produced using hybridoma techniques including those known in the art and taught, for example, in Harlow et al., Antibodies: A Laboratory Manual, (Cold Spring Harbor Laboratory Press, 2nd ed. 1988); Hammerling, et al., in: Monoclonal Antibodies and T-Cell Hybridomas 563-681 (Elsevier, N.Y., 1981) (said references incorporated by reference in their entireties). The term “monoclonal antibody” as used herein is not limited to antibodies produced through hybridoma technology. The term “monoclonal antibody” refers to an antibody that is derived from a single clone, including any eukaryotic, prokaryotic, or phage clone, and not the method by which it is produced.

[0311] Methods for producing and screening for specific antibodies using hybridoma technology are routine and well known in the art and are discussed in detail in the Examples. In a non-limiting example, mice can be immunized with a polypeptide of the invention or a cell expressing such peptide. Once an immune response is detected, e.g., antibodies specific for the antigen are detected in the mouse serum, the mouse spleen is harvested and splenocytes isolated. The splenocytes are then fused by well known techniques to any suitable myeloma cells, for example cells from cell line SP20 available from the ATCC. Hybridomas are selected and cloned by limited dilution. The hybridoma clones are then assayed by methods known in the art for cells that secrete antibodies capable of binding a polypeptide of the invention. Ascites fluid, which generally contains high levels of antibodies, can be generated by immunizing mice with positive hybridoma clones.

[0312] Accordingly, the present invention provides methods of generating monoclonal antibodies as well as antibodies produced by the method comprising culturing a hybridoma cell secreting an antibody of the invention wherein, preferably, the hybridoma is generated by fusing splenocytes isolated from a mouse immunized with an antigen of the invention with myeloma cells and then screening the hybridomas resulting from the fusion for hybridoma clones that secrete an antibody able to bind a polypeptide of the invention.

[0313] Another well known method for producing both polyclonal and monoclonal human B cell lines is transformation using Epstein Barr Virus (EBV). Protocols for generating EBV-transformed B cell lines are commonly known in the art, such as, for example, the protocol outlined in Chapter 7.22 of Current Protocols in Immunology, Coligan et al., Eds., 1994, John Wiley & Sons, NY, which is hereby incorporated in its entirety by reference. The source of B cells for transformation is commonly human peripheral blood, but B cells for transformation may also be derived from other sources including, but not limited to, lymph nodes, tonsil, spleen, tumor tissue, and infected tissues. Tissues are generally made into single cell suspensions prior to EBV transformation. Additionally, steps may be taken to either physically remove or inactivate T cells (e.g., by treatment with cyclosporin A) in B cell-containing samples, because T cells from individuals seropositive for anti-EBV antibodies can suppress B cell immortalization by EBV.

[0314] In general, the sample containing human B cells is innoculated with EBV, and cultured for 3-4 weeks. A typical source of EBV is the culture supernatant of the B95-8 cell line (ATCC #VR-1492). Physical signs of EBV transformation can generally be seen towards the end of the 3-4 week culture period. By phase-contrast microscopy, transformed cells may appear large, clear, hairy and tend to aggregate in tight clusters of cells. Initially, EBV lines are generally polyclonal. However, over prolonged periods of cell cultures, EBV lines may become monoclonal or polyclonal as a result of the selective outgrowth of particular B cell clones. Alternatively, polyclonal EBV transformed lines may be subcloned (e.g., by limiting dilution culture) or fused with a suitable fusion partner and plated at limiting dilution to obtain monoclonal B cell lines. Suitable fusion partners for EBV transformed cell lines include mouse myeloma cell lines (e.g., SP2/0, X63-Ag8.653), heteromyeloma cell lines (human x mouse; e.g, SPAM-8, SBC-H20, and CB-F7), and human cell lines (e.g., GM 1500, SKO-007, RPMI 8226, and KR-4). Thus, the present invention also provides a method of generating polyclonal or monoclonal human antibodies against polypeptides of the invention or fragments thereof, comprising EBV-transformation of human B cells.

[0315] Antibody fragments which recognize specific epitopes may be generated by known techniques. For example, Fab and F(ab′)2 fragments of the invention may be produced by proteolytic cleavage of immunoglobulin molecules, using enzymes such as papain (to produce Fab fragments) or pepsin (to produce F(ab′)2 fragments). F(ab′)2 fragments contain the variable region, the light chain constant region and the CH1 domain of the heavy chain.

[0316] For example, the antibodies of the present invention can also be generated using various phage display methods known in the art. In phage display methods, functional antibody domains are displayed on the surface of phage particles which carry the polynucleotide sequences encoding them. In a particular embodiment, such phage can be utilized to display antigen binding domains expressed from a repertoire or combinatorial antibody library (e.g., human or murine). Phage expressing an antigen binding domain that binds the antigen of interest can be selected or identified with antigen, e.g., using labeled antigen or antigen bound or captured to a solid surface or bead. Phage used in these methods are typically filamentous phage including fd and M13 binding domains expressed from phage with Fab, Fv or disulfide stabilized Fv antibody domains recombinantly fused to either the phage gene m or gene VIII protein. Examples of phage display methods that can be used to make the antibodies of the present invention include those disclosed in Brinkman et al., J. Immunol. Methods 182:41-50 (1995); Ames et al., J. Immunol. Methods 184:177-186 (1995); Kettleborough et al., Eur. J. Immunol. 24:952-958 (1994); Persic et al., Gene 187 9-18 (1997); Burton et al., Advances in Immunology 57:191-280 (1994); PCT application No. PCT/GB91/01134; PCT publications WO 90/02809; WO 91/10737; WO 92/01047; WO 92/18619; WO 93/11236; WO 95/15982; WO 95/20401; and U.S. Pat. Nos. 5,698,426; 5,223,409; 5,403,484; 5,580,717; 5,427,908; 5,750,753; 5,821,047; 5,571,698; 5,427,908; 5,516,637; 5,780,225; 5,658,727; 5,733,743 and 5,969,108; each of which is incorporated herein by reference in its entirety.

[0317] As described in the above references, after phage selection, the antibody coding regions from the phage can be isolated and used to generate whole antibodies, including human antibodies, or any other desired antigen binding fragment, and expressed in any desired host, including mammalian cells, insect cells, plant cells, yeast, and bacteria, e.g., as described in detail below. For example, techniques to recombinantly produce Fab, Fab′ and F(ab′)₂ fragments can also be employed using methods known in the art such as those disclosed in PCT publication WO 92/22324; Mullinax et al., BioTechniques 12(6):864-869 (1992); and Sawai et al., AJRI34:26-34 (1995); and Better et al., Science 240:1041-1043 (1988) (said references incorporated by reference in their entireties).

[0318] Examples of techniques which can be used to produce single-chain Fvs and antibodies include those described in U.S. Pat. Nos. 4,946,778 and 5,258,498; Huston et al., Methods in Enzymology 203:46-88 (1991); Shu et al., PNAS 90:7995-7999 (1993); and Skerra et al., Science 240:1038-1040 (1988). For some uses, including in vivo use of antibodies in humans and in vitro detection assays, it may be preferable to use chimeric, humanized, or human antibodies. A chimeric antibody is a molecule in which different portions of the antibody are derived from different animal species, such as antibodies having a variable region derived from a murine monoclonal antibody and a human immunoglobulin constant region. Methods for producing chimeric antibodies are known in the art. See e.g., Morrison, Science 229:1202 (1985); Oi et al., BioTechniques 4:214 (1986); Gillies et al., (1989) J. Immunol. Methods 125:191-202; U.S. Pat. Nos. 5,807,715; 4,816,567; and 4,816397, which are incorporated herein by reference in their entirety. Humanized antibodies are antibody molecules from non-human species antibody that binds the desired antigen having one or more complementarity determining regions (CDRs) from the non-human species and a framework regions from a human immunoglobulin molecule. Often, framework residues in the human framework regions will be substituted with the corresponding residue from the CDR donor antibody to alter, preferably improve, antigen binding. These framework substitutions are identified by methods well known in the art, e.g., by modeling of the interactions of the CDR and framework residues to identify framework residues important for antigen binding and sequence comparison to identify unusual framework residues at particular positions. (See, e.g., Queen et al., U.S. Pat. No. 5,585,089; Riechmann et al., Nature 332:323 (1988), which are incorporated herein by reference in their entireties.) Antibodies can be humanized using a variety of techniques known in the art including, for example, CDR-grafting 5,585,089), veneering or resurfacing (EP 592,106; EP 519,596; Padlan, Molecular Immunology 28(4/5):489498 (1991); Studnicka et al., Protein Engineering 7(6):805-814 (1994); Roguska. et al., PNAS 91:969-973 (1994)), and chain shuffling (U.S. Pat. No. 5,565,332).

[0319] Completely human antibodies are particularly desirable for therapeutic treatment of human patients. Human antibodies can be made by a variety of methods known in the art including phage display methods described above using antibody libraries derived from human immunoglobulin sequences. See also, U.S. Pat. Nos. 4,444,887 and 4,716,111; and PCr publications WO 98/46645, WO 98/50433, WO 98/24893, WO 98/16654, WO 96/34096, WO 96/33735, and WO 91/10741; each of which is incorporated herein by reference in its entirety.

[0320] Human antibodies can also be produced using transgenic mice which are incapable of expressing functional endogenous immunoglobulins, but which can express human immunoglobulin genes. For example, the human heavy and light chain immunoglobulin gene complexes may be introduced randomly or by homologous recombination into mouse embryonic stem cells. Alternatively, the human variable region, constant region, and diversity region may be introduced into mouse embryonic stem cells in addition to the human heavy and light chain genes. The mouse heavy and light chain immunoglobulin genes may be rendered non-functional separately or simultaneously with the introduction of human immunoglobulin loci by homologous recombination. In particular, homozygous deletion of the JH region prevents endogenous antibody production. The modified embryonic stem cells are expanded and microinjected into blastocysts to produce chimeric mice. The chimeric mice are then bred to produce homozygous offspring which express human antibodies. The transgenic mice are immunized in the normal fashion with a selected antigen, e.g., all or a portion of a polypeptide of the invention. Monoclonal antibodies directed against the antigen can be obtained from the immunized, transgenic mice using conventional hybridoma technology. The human immunoglobulin transgenes harbored by the transgenic mice rearrange during B cell differentiation, and subsequently undergo class switching and somatic mutation. Thus, using such a technique, it is possible to produce therapeutically useful IgG, IgA, IgM and IgE antibodies. For an overview of this technology for producing human antibodies, see Lonberg and Huszar, Int. Rev. Immunol. 13:65-93 (1995). For a detailed discussion of this technology for producing human antibodies and human monoclonal antibodies and protocols for producing such antibodies, see, e.g., PCT publications WO 98/24893; WO 92/01047; WO 96/34096; WO 96/33735; European Patent No. 0 598 877; U.S. Pat. Nos. 5,413,923; 5,625,126; 5,633,425; 5,569,825; 5,661,016; 5,545,806; 5,814,318; 5,885,793; 5,916,771; 5,939,598; 6,075,181; and 6,114,598, which are incorporated by reference herein in their entirety. In addition, companies such as Abgenix, Inc. (Freemont, Calif.) and Genpharm (San Jose, Calif.) can be engaged to provide human antibodies directed against a selected antigen using technology similar to that described above.

[0321] Completely human antibodies which recognize a selected epitope can be generated using a technique referred to as “guided selection.” In this approach a selected non-human monoclonal antibody, e.g., a mouse antibody, is used to guide the selection of a completely human antibody recognizing the same epitope. (Jespers et al., Bio/technology 12:899-903 (1988)).

[0322] Further, antibodies to the polypeptides of the invention can, in turn, be utilized to generate anti-idiotype antibodies that “mimic” polypeptides of the invention using techniques well known to those skilled in the art. (See, e.g., Greenspan & Bona, FASEB J. 7(5):437444; (1989) and Nissinoff, J. Immunol. 147(8):2429-2438 (1991)). For example, antibodies which bind to and competitively inhibit polypeptide multimerization and/or binding of a polypeptide of the invention to a ligand can be used to generate anti-idiotypes that “mimic” the polypeptide multimerization and/or binding domain and, as a consequence, bind to and neutralize polypeptide and/or its ligand. Such neutralizing anti-idiotypes or Fab fragments of such anti-idiotypes can be used in therapeutic regimens to neutralize polypeptide ligand(s)/receptor(s). For example, such anti-idiotypic antibodies can be used to bind a polypeptide of the invention and/or to bind its ligand(s)/receptor(s), and thereby block its biological activity. Alternatively, antibodies which bind to and enhance polypeptide multimerization and/or binding, and/or receptor/ligand multimerization, binding and/or signaling can be used to generate anti-idiotypes that function as agonists of a polypeptide of the invention and/or its ligand/receptor. Such agonistic anti-idiotypes or Fab fragments of such anti-idiotypes can be used in therapeutic regimens as agonists of the polypeptides of the invention or its ligand(s)/receptor(s). For example, such anti-idiotypic antibodies can be used to bind a polypeptide of the invention and/or to bind its ligand(s)/receptor(s), and thereby promote or enhance its biological activity.

[0323] Intrabodies of the invention can be produced using methods known in the art, such as those disclosed and reviewed in Chen et al., Hum Gene Ther. 5:595-601 (1994); Marasco, W. A., Gene Ther. 4:11-15 (1997); Rondon and Marasco, Annu. Rev. Microbiol. 51:257-283 (1997); Proba et al., J. Mol. Biol. 275:245-253 (1998); Cohen et al., Oncogene 17:2445-2456 (1998); Ohage and Steipe, J. Mol. Biol. 291:1119-1128 (1999); Ohage et al., J. Mol. Biol. 291:1129-1134 (1999); Wirtz and Steipe, Protein Sci. 8:2245-2250 (1999); Zhu et al., J. Immunol. Methods 231:207-222 (1999); and references cited therein.

Polynucleotides Encoding Antibodies

[0324] The invention further provides polynucleotides comprising a nucleotide sequence encoding an antibody of the invention and fragments thereof. The invention also encompasses polynucleotides that hybridize under stringent or alternatively, under lower stringency hybridization conditions, e.g., as defined supra, to polynucleotides that encode an antibody, preferably, that specifically binds to a polypeptide of the invention, preferably, an antibody that binds to a polypeptide having the amino acid sequence of SEQ ID NO:Y, to a polypeptide encoded by a portion of SEQ ID NO:X as defined in columns 8 and 9 of Table 2, and/or to a polypeptide encoded by the cDNA contained in ATCC Deposit No:Z.

[0325] The polynucleotides may be obtained, and the nucleotide sequence of the polynucleotides determined, by any method known in the art. For example, if the nucleotide sequence of the antibody is known, a polynucleotide encoding the antibody may be assembled from chemically synthesized oligonucleotides (e.g., as described in Kutmeier et al., BioTechniques 17:242 (1994)), which, briefly, involves the synthesis of overlapping oligonucleotides containing portions of the sequence encoding the antibody, annealing and ligating of those oligonucleotides, and then amplification of the ligated oligonucleotides by PCR.

[0326] Alternatively, a polynucleotide encoding an antibody may be generated from nucleic acid from a suitable source. If a clone containing a nucleic acid encoding a particular antibody is not available, but the sequence of the antibody molecule is known, a nucleic acid encoding the immunoglobulin may be chemically synthesized or obtained from a suitable source (e.g., an antibody cDNA library, or a cDNA library generated from, or nucleic acid, preferably poly A+ RNA, isolated from, any tissue or cells expressing the antibody, such as hybridoma cells selected to express an antibody of the invention) by PCR amplification using synthetic primers hybridizable to the 3′ and 5′ ends of the sequence or by cloning using an oligonucleotide probe specific for the particular gene sequence to identify, e.g., a cDNA clone from a cDNA library that encodes the antibody. Amplified nucleic acids generated by PCR may then be cloned into replicable cloning vectors using any method well known in the art.

[0327] Once the nucleotide sequence and corresponding amino acid sequence of the antibody is determined, the nucleotide sequence of the antibody may be manipulated using methods well known in the art for the manipulation of nucleotide sequences, e.g., recombinant DNA techniques, site directed mutagenesis, PCR, etc. (see, for example, the techniques described in Sambrook et al., 1990, Molecular Cloning, A Laboratory Manual, 2d Ed., Cold Spring Harbor Laboratory, Cold Spring Harbor, N.Y. and Ausubel et al., eds., 1998, Current Protocols in Molecular Biology, John Wiley & Sons, NY, which are both incorporated by reference herein in their entireties), to generate antibodies having a different amino acid sequence, for example to create amino acid substitutions, deletions, and/or insertions.

[0328] In a specific embodiment, the amino acid sequence of the heavy and/or light chain variable domains may be inspected to identify the sequences of the complementarity determining regions (CDRs) by methods that are well know in the art, e.g., by comparison to known amino acid sequences of other heavy and light chain variable regions to determine the regions of sequence hypervariability. Using routine recombinant DNA techniques, one or more of the CDRs may be inserted within framework regions, e.g., into human framework regions to humanize a non-human antibody, as described supra. The framework regions may be naturally occurring or consensus framework regions, and preferably human framework regions (see, e.g., Chothia et al., J. Mol. Biol. 278: 457-479 (1998) for a listing of human framework regions). Preferably, the polynucleotide generated by the combination of the framework regions and CDRs encodes an antibody that specifically binds a polypeptide of the invention. Preferably, as discussed supra, one or more amino acid substitutions may be made within the framework regions, and, preferably, the amino acid substitutions improve binding of the antibody to its antigen. Additionally, such methods may be used to make amino acid substitutions or deletions of one or more variable region cysteine residues participating in an intrachain disulfide bond to generate antibody molecules lacking one or more intrachain disulfide bonds. Other alterations to the polynucleotide are encompassed by the present invention and within the skill of the art.

[0329] In addition, techniques developed for the production of “chimeric antibodies” (Morrison et al., Proc. Natl. Acad. Sci. 81:851-855 (1984); Neuberger et al., Nature 312:604-608 (1984); Takeda et al., Nature 314:452454 (1985)) by splicing genes from a mouse antibody molecule of appropriate antigen specificity together with genes from a human antibody molecule of appropriate biological activity can be used. As described supra, a chimeric antibody is a molecule in which different portions are derived from different animal species, such as those having a variable region derived from a murine mAb and a human immunoglobulin constant region, e.g., humanized antibodies.

[0330] Alternatively, techniques described for the production of single chain antibodies (U.S. Pat. No. 4,946,778; Bird, Science 242:423-42 (1988); Huston et al., Proc. Natl. Acad. Sci. USA 85:5879-5883 (1988); and Ward et al., Nature 334:544-54 (1989)) can be adapted to produce single chain antibodies. Single chain antibodies are formed by linking the heavy and light chain fragments of the Fv region via an amino acid bridge, resulting in a single chain polypeptide. Techniques for the assembly of functional Fv fragments in E. coli may also be used (Skerra et al., Science 242:1038-1041 (1988)).

Methods of Producing Antibodies

[0331] The antibodies of the invention can be produced by any method known in the art for the synthesis of antibodies, in particular, by chemical synthesis or preferably, by recombinant expression techniques. Methods of producing antibodies include, but are not limited to, hybridoma technology, EBV transformation, and other methods discussed herein as well as through the use recombinant DNA technology, as discussed below.

[0332] Recombinant expression of an antibody of the invention, or fragment, derivative or analog thereof, (e.g., a heavy or light chain of an antibody of the invention or a single chain antibody of the invention), requires construction of an expression vector containing a polynucleotide that encodes the antibody. Once a polynucleotide encoding an antibody molecule or a heavy or light chain of an antibody, or portion thereof (preferably containing the heavy or light chain variable domain), of the invention has been obtained, the vector for the production of the antibody molecule may be produced by recombinant DNA technology using techniques well known in the art. Thus, methods for preparing a protein by expressing a polynucleotide containing an antibody encoding nucleotide sequence are described herein. Methods which are well known to those skilled in the art can be used to construct expression vectors containing antibody coding sequences and appropriate transcriptional and translational control signals. These methods include, for example, in vitro recombinant DNA techniques, synthetic techniques, and in vivo genetic recombination. The invention, thus, provides replicable vectors comprising a nucleotide sequence encoding an antibody molecule of the invention, or a heavy or light chain thereof, or a heavy or light chain variable domain, operably linked to a promoter. Such vectors may include the nucleotide sequence encoding the constant region of the antibody molecule (see, e.g., PCT Publication WO 86/05807; PCT Publication WO 89/01036; and U.S. Pat. No. 5,122,464) and the variable domain of the antibody may be cloned into such a vector for expression of the entire heavy or light chain.

[0333] The expression vector is transferred to a host cell by conventional techniques and the transfected cells are then cultured by conventional techniques to produce an antibody of the invention. Thus, the invention includes host cells containing a polynucleotide encoding an antibody of the invention, or a heavy or light chain thereof, or a single chain antibody of the invention, operably linked to a heterologous promoter. In preferred embodiments for the expression of double-chained antibodies, vectors encoding both the heavy and light chains may be co-expressed in the host cell for expression of the entire immunoglobulin molecule, as detailed below.

[0334] A variety of host-expression vector systems may be utilized to express the antibody molecules of the invention. Such host-expression systems represent vehicles by which the coding sequences of interest may be produced and subsequently purified, but also represent cells which may, when transformed or transfected with the appropriate nucleotide coding sequences, express an antibody molecule of the invention in situ. These include but are not limited to microorganisms such as bacteria (e.g., E. coli, B. subtilis) transformed with recombinant bacteriophage DNA, plasmid DNA or cosmid DNA expression vectors containing antibody coding sequences; yeast (e.g., Saccharomyces, Pichia) transformed with recombinant yeast expression vectors containing antibody coding sequences; insect cell systems infected with recombinant virus expression vectors (e.g., baculovirus) containing antibody coding sequences; plant cell systems infected with recombinant virus expression vectors (e.g., cauliflower mosaic virus, CaMV; tobacco mosaic virus, TMV) or transformed with recombinant plasmid expression vectors (e.g., Ti plasmid) containing antibody coding sequences; or mammalian cell systems (e.g., COS, CHO, BHK, 293, 3T3 cells) harboring recombinant expression constructs containing promoters derived from the genome of mammalian cells (e.g., metallothionein promoter) or from mammalian viruses (e.g., the adenovirus late promoter; the vaccinia virus 7.5K promoter). Preferably, bacterial cells such as Escherichia coli, and more preferably, eukaryotic cells, especially for the expression of whole recombinant antibody molecule, are used for the expression of a recombinant antibody molecule. For example, mammalian cells such as Chinese hamster ovary cells (CHO), in conjunction with a vector such as the major intermediate early gene promoter element from human cytomegalovirus is an effective expression system for antibodies (Foecking et al., Gene 45:101 (1986); Cockett et al., Bio/Technology 8:2 (1990)).

[0335] In bacterial systems, a number of expression vectors may be advantageously selected depending upon the use intended for the antibody molecule being expressed. For example, when a large quantity of such a protein is to be produced, for the generation of pharmaceutical compositions of an antibody molecule, vectors which direct the expression of high levels of fusion protein products that are readily purified may be desirable. Such vectors include, but are not limited, to the E. coli expression vector pUR278 (Ruther et al., EMBO J. 2:1791 (1983)), in which the antibody coding sequence may be ligated individually into the vector in frame with the lac Z coding region so that a fusion protein is produced; pIN vectors (Inouye & Inouye, Nucleic Acids Res. 13:3101-3109 (1985); Van Heeke & Schuster, J. Biol. Chem. 24:5503-5509 (1989)); and the like. pGEX vectors may also be used to express foreign polypeptides as fusion proteins with glutathione S-transferase (GST). In general, such fusion proteins are soluble and can easily be purified from lysed cells by adsorption and binding to matrix glutathione-agarose beads followed by elution in the presence of free glutathione. The pGEX vectors are designed to include thrombin or factor Xa protease cleavage sites so that the cloned target gene product can be released from the GST moiety.

[0336] In an insect system, Autographa californica nuclear polyhedrosis virus (AcNPV) is used as a vector to express foreign genes. The virus grows in Spodoptera frugiperda cells. The antibody coding sequence may be cloned individually into non-essential regions (for example the polyhedrin gene) of the virus and placed under control of an AcNPV promoter (for example the polyhedrin promoter).

[0337] In mammalian host cells, a number of viral-based expression systems may be utilized. In cases where an adenovirus is used as an expression vector, the antibody coding sequence of interest may be ligated to an adenovirus transcription/translation control complex, e.g., the late promoter and tripartite leader sequence. This chimeric gene may then be inserted in the adenovirus genome by in vitro or in vivo recombination. Insertion in a non-essential region of the viral genome (e.g., region E1 or E3) will result in a recombinant virus that is viable and capable of expressing the antibody molecule in infected hosts. (e.g., see Logan & Shenk, Proc. Natl. Acad. Sci. USA 81:355-359 (1984)). Specific initiation signals may also be required for efficient translation of inserted antibody coding sequences. These signals include the ATG initiation codon and adjacent sequences. Furthermore, the initiation codon must be in phase with the reading frame of the desired coding sequence to ensure translation of the entire insert. These exogenous translational control signals and initiation codons can be of a variety of origins, both natural and synthetic. The efficiency of expression may be enhanced by the inclusion of appropriate transcription enhancer elements, transcription terminators, etc. (see Bittner et al., Methods in Enzymol. 153:51-544 (1987)).

[0338] In addition, a host cell strain may be chosen which modulates the expression of the inserted sequences, or modifies and processes the gene product in the specific fashion desired. Such modifications (e.g., glycosylation) and processing (e.g., cleavage) of protein products may be important for the function of the protein. Different host cells have characteristic and specific mechanisms for the post-translational processing and modification of proteins and gene products. Appropriate cell lines or host systems can be chosen to ensure the correct modification and processing of the foreign protein expressed. To this end, eukaryotic host cells which possess the cellular machinery for proper processing of the primary transcript, glycosylation, and phosphorylation of the gene product may be used. Such mammalian host cells include but are not limited to CHO, VERY, BHK, Hela, COS, MDCK, 293, 3T3, WI38, and in particular, breast cancer cell lines such as, for example, BT483, Hs578T, HTB2, BT20 and T47D, and normal mammary gland cell line such as, for example, CRL7030 and Hs578Bst.

[0339] For long-term, high-yield production of recombinant proteins, stable expression is preferred. For example, cell lines which stably express the antibody molecule may be engineered. Rather than using expression vectors which contain viral origins of replication, host cells can be transformed with DNA controlled by appropriate expression control elements (e.g., promoter, enhancer, sequences, transcription terminators, polyadenylation sites, etc.), and a selectable marker. Following the introduction of the foreign DNA, engineered cells may be allowed to grow for 1-2 days in an enriched media, and then are switched to a selective media. The selectable marker in the recombinant plasmid confers resistance to the selection and allows cells to stably integrate the plasmid into their chromosomes and grow to form foci which in turn can be cloned and expanded into cell lines. This method may advantageously be used to engineer cell lines which express the antibody molecule. Such engineered cell lines may be particularly useful in screening and evaluation of compounds that interact directly or indirectly with the antibody molecule.

[0340] A number of selection systems may be used, including but not limited to the herpes simplex virus thymidine kinase (Wigler et al., Cell 11:223 (1977)), hypoxanthine-guanine phosphoribosyltransferase (Szybalska & Szybalski, Proc. Natl. Acad. Sci. USA 48:202 (1992)), and adenine phosphoribosyltransferase (Lowy et al., Cell 22:817 (1980)) genes can be employed in tk-, hgprt- or aprt- cells, respectively. Also, antimetabolite resistance can be used as the basis of selection for the following genes: dhfr, which confers resistance to methotrexate (Wigler et al., Natl. Acad. Sci. USA 77:357 (1980); O'Hare et al., Proc. Natl. Acad. Sci. USA 78:1527 (1981)); gpt, which confers resistance to mycophenolic acid (Mulligan & Berg, Proc. Natl. Acad. Sci. USA 78:2072 (1981)); neo, which confers resistance to the aminoglycoside G-418 Clinical Pharmacy 12:488-505; Wu and Wu, Biotherapy 3:87-95 (1991); Tolstoshev, Ann. Rev. Pharmacol. Toxicol. 32:573-596 (1993); Mulligan, Science 260:926-932 (1993); and Morgan and Anderson, Ann. Rev. Biochem. 62:191-217 (1993); May, 1993, TIB TECH 11(5):155-215 (1993)); and hygro, which confers resistance to hygromycin (Santerre et al., Gene 30:147 (1984)). Methods commonly known in the art of recombinant DNA technology may be routinely applied to select the desired recombinant clone, and such methods are described, for example, in Ausubel et al. (eds.), Current Protocols in Molecular Biology, John Wiley & Sons, NY (1993); Kriegler, Gene Transfer and Expression, A Laboratory Manual, Stockton Press, NY (1990); and in Chapters 12 and 13, Dracopoli et al. (eds), Current Protocols in Human Genetics, John Wiley & Sons, NY (1994); Colberre-Garapin et al., J. Mol. Biol. 150:1 (1981), which are incorporated by reference herein in their entireties.

[0341] The expression levels of an antibody molecule can be increased by vector amplification (for a review, see Bebbington and Hentschel, The use of vectors based on gene amplification for the expression of cloned genes in mammalian cells in DNA cloning, Vol.3. (Academic Press, New York, 1987)). When a marker in the vector system expressing antibody is amplifiable, increase in the level of inhibitor present in culture of host cell will increase the number of copies of the marker gene. Since the amplified region is associated with the antibody gene, production of the antibody will also increase (Crouse et al., Mol. Cell. Biol. 3:257 (1983)).

[0342] Vectors which use glutamine synthase (GS) or DHFR as the selectable markers can be amplified in the presence of the drugs methionine sulphoximine or methotrexate, respectively. An advantage of glutamine synthase based vectors are the availabilty of cell lines (e.g., the murine myeloma cell line, NSO) which are glutamine synthase negative. Glutamine synthase expression systems can also function in glutamine synthase expressing cells (e.g. Chinese Hamster Ovary (CHO) cells) by providing additional inhibitor to prevent the functioning of the endogenous gene. A glutamine synthase expression system and components thereof are detailed in PCT publications: WO87/04462; WO86/05807; WO89/01036; WO89/10404; and WO91/06657 which are incorporated in their entireties by reference herein. Additionally, glutamine synthase expression vectors that may be used according to the present invention are commercially available from suppliers, including, for example Lonza Biologics, Inc. (Portsmouth, N.Mex. Expression and production of monoclonal antibodies using a GS expression system in murine myeloma cells is described in Bebbington et al., Bio/technology 10:169(1992) and in Biblia and Robinson Biotechnol. Prog. 11:1 (1995) which are incorporated in their entirities by reference herein.

[0343] The host cell may be co-transfected with two expression vectors of the invention, the first vector encoding a heavy chain derived polypeptide and the second vector encoding a light chain derived polypeptide. The two vectors may contain identical selectable markers which enable equal expression of heavy and light chain polypeptides. Alternatively, a single vector may be used which encodes, and is capable of expressing, both heavy and light chain polypeptides. In such situations, the light chain should be placed before the heavy chain to avoid an excess of toxic free heavy chain (Proudfoot, Nature 322:52 (1986); Kohler, Proc. Natl. Acad. Sci. USA 77:2197 (1980)). The coding sequences for the heavy and light chains may comprise cDNA or genomic DNA.

[0344] Once an antibody molecule of the invention has been produced by an animal, chemically synthesized, or recombinantly expressed, it may be purified by any method known in the art for purification of an immunoglobulin molecule, for example, by chromatography (e.g., ion exchange, affinity, particularly by affinity for the specific antigen after Protein A, and sizing column chromatography), centrifugation, differential solubility, or by any other standard technique for the purification of proteins. In addition, the antibodies of the present invention or fragments thereof can be fused to heterologous polypeptide sequences described herein or otherwise known in the art, to facilitate purification.

[0345] The present invention encompasses antibodies recombinantly fused or chemically conjugated (including both covalently and non-covalently conjugations) to a polypeptide (or portion thereof, preferably at least 10, 20, 30, 40, 50, 60, 70, 80, 90 or 100 amino acids of the polypeptide) of the present invention to generate fusion proteins. The fusion does not necessarily need to be direct, but may occur through linker sequences. The antibodies may be specific for antigens other than polypeptides (or portion thereof, preferably at least 10, 20, 30, 40, 50, 60, 70, 80, 90 or 100 amino acids of the polypeptide) of the present invention. For example, antibodies may be used to target the polypeptides of the present invention to particular cell types, either in vitro or in vivo, by fusing or conjugating the polypeptides of the present invention to antibodies specific for particular cell surface receptors. Antibodies fused or conjugated to the polypeptides of the present invention may also be used in in vitro immunoassays and purification methods using methods known in the art. See e.g., Harbor et al., supra, and PCT publication WO 93/21232; EP 439,095; Naramura et al., Immunol. Lett. 39:91-99 (1994); U.S. Pat. No. 5,474,981; Gillies et al., PNAS 89:1428-1432 (1992); Fell et al., J. Immunol. 146:2446-2452 (1991), which are incorporated by reference in their entireties.

[0346] The present invention further includes compositions comprising the polypeptides of the present invention fused or conjugated to antibody domains other than the variable regions. For example, the polypeptides of the present invention may be fused or conjugated to an antibody Fc region, or portion thereof. The antibody portion fused to a polypeptide of the present invention may comprise the constant region, hinge region, CH1 domain, CH2 domain, and CH3 domain or any combination of whole domains or portions thereof. The polypeptides may also be fused or conjugated to the above antibody portions to form multimers. For example, Fc portions fused to the polypeptides of the present invention can form dimers through disulfide bonding between the Fc portions. Higher multimeric forms can be made by fusing the polypeptides to portions of IgA and IgM. Methods for fusing or conjugating the polypeptides of the present invention to antibody portions are known in the art. See, e.g., U.S. Pat. Nos. 5,336,603; 5,622,929; 5,359,046; 5,349,053; 5,447,851; 5,112,946; EP 307,434; EP 367,166; PCT publications WO 96/04388; WO 91/06570; Ashkenazi et al., Proc. Natl. Acad. Sci. USA 88:10535-10539 (1991); Zheng et al., J. Immunol. 154:5590-5600 (1995); and Vil et al., Proc. Natl. Acad. Sci. USA 89:11337-11341 (1992) (said references incorporated by reference in their entireties).

[0347] As discussed, supra, the polypeptides corresponding to a polypeptide, polypeptide fragment, or a variant of SEQ ID NO:Y may be fused or conjugated to the above antibody portions to increase the in vivo half life of the polypeptides or for use in immunoassays using methods known in the art. Further, the polypeptides corresponding to SEQ ID NO:Y may be fused or conjugated to the above antibody portions to facilitate purification. One reported example describes chimeric proteins consisting of the first two domains of the human CD4-polypeptide and various domains of the constant regions of the heavy or light chains of mammalian immunoglobulins. See EP 394,827; and Traunecker et al., Nature 331:84-86 (1988). The polypeptides of the present invention fused or conjugated to an antibody having disulfide-linked dimeric structures (due to the IgG) may also be more efficient in binding and neutralizing other molecules, than the monomeric secreted protein or protein fragment alone. See, for example, Fountoulakis et al., J. Biochem. 270:3958-3964 (1995). In many cases, the Fc part in a fusion protein is beneficial in therapy and diagnosis, and thus can result in, for example, improved pharmacokinetic properties. See, for example, EP A 232,262. Alternatively, deleting the fc part after the fusion protein has been expressed, detected, and purified, would be desired. For example, the Fc portion may hinder therapy and diagnosis if the fusion protein is used as an antigen for immunizations. In drug discovery, for example, human proteins, such as hIL-5, have been fused with Fc portions for the purpose of high-throughput screening assays to identify antagonists of hiL-5. (See, Bennett et al., J. Molecular Recognition 8:52-58 (1995); Johanson et al., J. Biol. Chem. 270:9459-9471 (1995)).

[0348] Moreover, the antibodies or fragments thereof of the present invention can be fused to marker sequences, such as a peptide to facilitate purification. In preferred embodiments, the marker amino acid sequence is a hexa-histidine peptide, such as the tag provided in a pQE vector (QIAGEN, Inc., 9259 Eton Avenue, Chatsworth, Calif., 91311), among others, many of which are commercially available. As described in Gentz et al., Proc. Natl. Acad. Sci. USA 86:821-824 (1989), for instance, hexa-histidine provides for convenient purification of the fusion protein. Other peptide tags useful for purification include, but are not limited to, the “MA” tag, which corresponds to an epitope derived from the influenza hemagglutinin protein (Wilson et al., Cell 37:767 (1984)) and the “flag” tag.

[0349] The present invention further encompasses antibodies or fragments thereof conjugated to a diagnostic or therapeutic agent. The antibodies can be used diagnostically to, for example, monitor the development or progression of a tumor as part of a clinical testing procedure to, e.g., determine the efficacy of a given treatment regimen. Detection can be facilitated by coupling the antibody to a detectable substance. Examples of detectable substances include various enzymes, prosthetic groups, fluorescent materials, luminescent materials, bioluminescent materials, radioactive materials, positron emitting metals using various positron emission tomographies, and nonradioactive paramagnetic metal ions. The detectable substance may be coupled or conjugated either directly to the antibody (or fragment thereof) or indirectly, through an intermediate (such as, for example, a linker known in the art) using techniques known in the art. See, for example, U.S. Pat. No. 4,741,900 for metal ions which can be conjugated to antibodies for use as diagnostics according to the present invention. Examples of suitable enzymes include horseradish peroxidase, alkaline phosphatase, beta-galactosidase, or acetylcholinesterase; examples of suitable prosthetic group complexes include streptavidin/biotin and avidin/biotin; examples of suitable fluorescent materials include umbelliferone, fluorescein, fluorescein isothiocyanate, rhodamine, dichlorotriazinylamine fluorescein, dansyl chloride or phycoerythrin; an example of a luminescent material includes luminol; examples of bioluminescent materials include luciferase, luciferin, and aequorin; and examples of suitable radioactive material include 125I, 131I, 111In or 99Tc.

[0350] Further, an antibody or fragment thereof may be conjugated to a therapeutic moiety such as a cytotoxin, e.g., a cytostatic or cytocidal agent, a therapeutic agent or a radioactive metal ion, e.g., alpha-emitters such as, for example, 213Bi. A cytotoxin or cytotoxic agent includes any agent that is detrimental to cells. Examples include paclitaxol, cytochalasin B, gramicidin D, ethidium bromide, emetine, mitomycin, etoposide, tenoposide, vincristine, vinblastine, colchicin, doxorubicin, daunorubicin, dihydroxy anthracin dione, mitoxantrone, mithramycin, actinomycin D, 1-dehydrotestosterone, glucocorticoids, procaine, tetracaine, lidocaine, propranolol, and puromycin and analogs or homologs thereof. Therapeutic agents include, but are not limited to, antimetabolites (e.g., methotrexate, 6-mercaptopurine, 6-thioguanine, cytarabine, 5-fluorouracil decarbazine), alkylating agents (e.g., mechlorethamine, thioepa chlorambucil, melphalan, carmustine (BSNU) and lomustine (CCNU), cyclothosphamide, busulfan, dibromomannitol, streptozotocin, mitomycin C, and cis-dichlorodiamine platinum (II) (DDP)cisplatin), anthracyclines (e.g., daunorubicin (formerly daunomycin) and doxorubicin), antibiotics (e.g., dactinomycin (formerly actinomycin), bleomycin, mithramycin, and anthramycin (AMC)), and anti-mitotic agents (e.g., vincristine and vinblastine).

[0351] The conjugates of the invention can be used for modifying a given biological response, the therapeutic agent or drug moiety is not to be construed as limited to classical chemical therapeutic agents. For example, the drug moiety may be a protein or polypeptide possessing a desired biological activity. Such proteins may include, for example, a toxin such as abrin, ricin A, pseudomonas exotoxin, or diphtheria toxin; a protein such as tumor necrosis factor, α-interferon, β-interferon, nerve growth factor, platelet derived growth factor, tissue plasminogen activator, an apoptotic agent, e.g., TNF-alpha, TNF-beta, AIM I (See, International Publication No. WO 97/33899), AIM II (See, International Publication No. WO 97/34911), Fas Ligand (Takahashi et al., Int. Immunol., 6:1567-1574 (1994)), VEGI (See, International Publication No. WO 99/23105), a thrombotic agent or an anti-angiogenic agent, e.g., angiostatin or endostatin; or, biological response modifiers such as, for example, lymphokines, interleukin-1 (“IL-1”), interleukin-2 (“IL-2”), interleukin-6 (“IL-6”), granulocyte macrophage colony stimulating factor (“GM-CSF”), granulocyte colony stimulating factor (“G-CSF”), or other growth factors.

[0352] Antibodies may also be attached to solid supports, which are particularly useful for immunoassays or purification of the target antigen. Such solid supports include, but are not limited to, glass, cellulose, polyacrylaride, nylon, polystyrene, polyvinyl chloride or polypropylene.

[0353] Techniques for conjugating such therapeutic moiety to antibodies are well known. See, for example, Arnon et al., “Monoclonal Antibodies For Immunotargeting Of Drugs In Cancer Therapy”, in Monoclonal Antibodies And Cancer Therapy, Reisfeld et al. (eds.), pp. 243-56 (Alan R. Liss, Inc. 1985); Hellstrom et al., “Antibodies For Drug Delivery”, in Controlled Drug Delivery (2nd Ed.), Robinson et al. (eds.), pp. 623-53 (Marcel Dekker, Inc. 1987); Thorpe, “Antibody Carriers Of Cytotoxic Agents In Cancer Therapy: A Review”, in Monoclonal Antibodies '84: Biological And Clinical Applications, Pinchera et al. (eds.), pp. 475-506 (1985); “Analysis, Results, And Future Prospective Of The Therapeutic Use Of Radiolabeled Antibody In Cancer Therapy”, in Monoclonal Antibodies For Cancer Detection And Therapy, Baldwin et al. (eds.), pp. 303-16 (Academic Press 1985), and Thorpe et al., “The Preparation And Cytotoxic Properties Of Antibody-Toxin Conjugates”, Immunol. Rev. 62:119-58 (1982).

[0354] Alternatively, an antibody can be conjugated to a second antibody to form an antibody heteroconjugate as described by Segal in U.S. Pat. No. 4,676,980, which is incorporated herein by reference in its entirety.

[0355] An antibody, with or without a therapeutic moiety conjugated to it, administered alone or in combination with cytotoxic factor(s) and/or cytokine(s) can be used as a therapeutic.

Immunophenotyping

[0356] The antibodies of the invention may be utilized for immunophenotyping of cell lines and biological samples. Translation products of the gene of the present invention may be useful as cell-specific markers, or more specifically as cellular markers that are differentially expressed at various stages of differentiation and/or maturation of particular cell types. Monoclonal antibodies directed against a specific epitope, or combination of epitopes, will allow for the screening of cellular populations expressing the marker. Various techniques can be utilized using monoclonal antibodies to screen for cellular populations expressing the marker(s), and include magnetic separation using antibody-coated magnetic beads, “panning” with antibody attached to a solid matrix (i.e., plate), and flow cytometry (See, e.g., U.S. Pat. No. 5,985,660; and Morrison et al., Cell, 96:737-49 (1999)).

[0357] These techniques allow for the screening of particular populations of cells, such as might be found with hematological malignancies (i.e. minimal residual disease (MRD) in acute leukemic patients) and “non-self” cells in transplantations to prevent Graft-versus-Host Disease (GVHD). Alternatively, these techniques allow for the screening of hematopoietic stem and progenitor cells capable of undergoing proliferation and/or differentiation, as might be found in human umbilical cord blood.

Assays For Antibody Binding

[0358] The antibodies of the invention may be assayed for immunospecific binding by any method known in the art. The immunoassays which can be used include but are not limited to competitive and non-competitive assay systems using techniques such as western blots, radioimmunoassays, ELISA (enzyme linked immunosorbent assay), “sandwich” immunoassays, immunoprecipitation assays, precipitin reactions, gel diffusion precipitin reactions, immunodiffusion assays, agglutination assays, complement-fixation assays, immunoradiometric assays, fluorescent immunoassays, and protein A immunoassays, to name but a few. Such assays are routine and well known in the art (see, e.g., Ausubel et al, eds, 1994, Current Protocols in Molecular Biology, Vol. 1, John Wiley & Sons, Inc., New York, which is incorporated by reference herein in its entirety). Exemplary immunoassays are described briefly below (but are not intended by way of limitation).

[0359] Immunoprecipitation protocols generally comprise lysing a population of cells in a lysis buffer such as RIPA buffer (1% NP40 or Triton X-100, 1% sodium deoxycholate, 0.1% SDS, 0.15 M NaCl, 0.01 M sodium phosphate at pH 7.2, 1% Trasylol) supplemented with protein phosphatase and/or protease inhibitors (e.g., EDTA, PMSF, aprotinin, sodium vanadate), adding the antibody of interest to the cell lysate, incubating for a period of time (e.g., 1-4, hours) at 4° C., adding protein A and/or protein G sepharose beads to the cell lysate, incubating for about an hour or more at 4° C., washing the beads in lysis buffer and resuspending the beads in SDS/sample buffer. The ability of the antibody of interest to immunoprecipitate a particular antigen can be assessed by, e.g., western blot analysis. One of skill in the art would be knowledgeable as to the parameters that can be modified to increase the binding of the antibody to an antigen and decrease the background (e.g., pre-clearing the cell lysate with sepharose beads). For further discussion regarding immunoprecipitation protocols see, e.g., Ausubel et al., eds., (1994), Current Protocols in Molecular Biology, Vol. 1, John Wiley & Sons, Inc., New York, section 10.16.1.

[0360] Western blot analysis generally comprises preparing protein samples, electrophoresis of the protein samples in a polyacrylamide gel (e.g., 8%-20% SDS-PAGE depending on the molecular weight of the antigen), transferring the protein sample from the polyacrylamide gel to a membrane such as nitrocellulose, PVDF or nylon, blocking the membrane in blocking solution (e.g., PBS with 3% BSA or non-fat milk), washing the membrane in washing buffer (e.g., PBS-Tween 20), blocking the membrane with primary antibody (the antibody of interest) diluted in blocking buffer, washing the membrane in washing buffer, blocking the membrane with a secondary antibody (which recognizes the primary antibody, e.g., an anti-human antibody) conjugated to an enzymatic substrate (e.g., horseradish peroxidase or alkaline phosphatase) or radioactive molecule (e.g., 32P or 125I) diluted in blocking buffer, washing the membrane in wash buffer, and detecting the presence of the antigen. One of skill in the art would be knowledgeable as to the parameters that can be modified to increase the signal detected and to reduce the background noise. For further discussion regarding western blot protocols see, e.g., Ausubel et al, eds, (1994), Current Protocols in Molecular Biology, Vol. 1, John Wiley & Sons, Inc., New York, section 10.8.1.

[0361] ELISAs comprise preparing antigen, coating the well of a 96 well microtiter plate with the antigen, adding the antibody of interest conjugated to a detectable compound such as an enzymatic substrate (e.g., horseradish peroxidase or alkaline phosphatase) to the well and incubating for a period of time, and detecting the presence of the antigen. In ELISAs the antibody of interest does not have to be conjugated to a detectable compound; instead, a second antibody (which recognizes the antibody of interest) conjugated to a detectable compound may be added to the well. Further, instead of coating the well with the antigen, the antibody may be coated to the well. In this case, a second antibody conjugated to a detectable compound may be added following the addition of the antigen of interest to the coated well. One of skill in the art would be knowledgeable as to the parameters that can be modified to increase the signal detected as well as other variations of ELISAs known in the art. For further discussion regarding ELISAs see, e.g., Ausubel et al, eds, (1994), Current Protocols in Molecular Biology, Vol. 1, John Wiley & Sons, Inc., New York, section 11.2.1.

[0362] The binding affinity of an antibody to an antigen and the off-rate of an antibody-antigen interaction can be determined by competitive binding assays. One example of a competitive binding assay is a radioimmunoassay comprising the incubation of labeled antigen (e.g., 3H or 125I) with the antibody of interest in the presence of increasing amounts of unlabeled antigen, and the detection of the antibody bound to the labeled antigen. The affinity of the antibody of interest for a particular antigen and the binding off-rates can be determined from the data by scatchard plot analysis. Competition with a second antibody can also be determined using radioimmunoassays. In this case, the antigen is incubated with antibody of interest conjugated to a labeled compound (e.g., 3H or 125I) in the presence of increasing amounts of an unlabeled second antibody.

[0363] Antibodies of the invention may be characterized using immunocytochemistry methods on cells (e.g., mammalian cells, such as CHO cells) transfected with a vector enabling the expression of an antigen or with vector alone using techniques commonly known in the art. Antibodies that bind antigen transfected cells, but not vector-only transfected cells, are antigen specific.

Therapeutic Uses

[0364] Table 1D also provides information regarding biological activities and preferred therapeutic uses (i.e. see, “Preferred Indications” column) for polynucleotides and polypeptides of the invention (including antibodies, agonists, and/or antagonists thereof). Table 1D also provides information regarding assays which may be used to test polynucleotides and polypeptides of the invention (including antibodies, agonists, and/or antagonists thereof) for the corresponding biological activities. The first column (“Gene No.”) provides the gene number in the application for each clone identifier. The second column (“cDNA ATCC Deposit No:Z”) provides the unique clone identifier for each clone as previously described and indicated in Table 1A, Table 1B, and Table 1C. The third column (“AA SEQ ID NO:Y”) indicates the Sequence Listing SEQ ID Number for polypeptide sequences encoded by the corresponding cDNA clones (also as indicated in Table 1A, Table 1B, and Table 2). The fourth column (“Biological Activity”) indicates a biological activity corresponding to the indicated polypeptides (or polynucleotides encoding said polypeptides). The fifth column (“Exemplary Activity Assay”) further describes the corresponding biological activity and also provides information pertaining to the various types of assays which may be performed to test, demonstrate, or quantify the corresponding biological activity.

[0365] The present invention is further directed to antibody-based therapies which involve administering antibodies of the invention to an animal, preferably a mammal, and most preferably a human, patient for treating one or more of the disclosed diseases, disorders, or conditions. Therapeutic compounds of the invention include, but are not limited to, antibodies of the invention (including fragments, analogs and derivatives thereof as described herein) and nucleic acids encoding antibodies of the invention (including fragments, analogs and derivatives thereof and anti-idiotypic antibodies as described herein). The antibodies of the invention can be used to detect, prevent, diagnose, prognosticate, treat, and/or ameliorate diseases, disorders or conditions associated with aberrant expression and/or activity of a polypeptide of the invention, including, but not limited to, cardiovascular diseases and disorders. The treatment and/or prevention of cardiovascular diseases and disorders associated with aberrant expression and/or activity of a polypeptide of the invention includes, but is not limited to, alleviating symptoms associated with cardiovascular diseases and disorders. Antibodies of the invention may be provided in pharmaceutically acceptable compositions as known in the art or as described herein.

[0366] In a specific and preferred embodiment, the present invention is directed to antibody-based therapies which involve administering antibodies of the invention to an animal, preferably a mammal, and most preferably a human, patient for treating cardiovascular diseases and disorders. Therapeutic compounds of the invention include, but are not limited to, antibodies of the invention (e.g., antibodies directed to the full length protein expressed on the cell surface of a mammalian cell; antibodies directed to an epitope of a polypeptide of the invention (such as, for example, a predicted linear epitope shown in Table 1B; or a conformational epitope, including fragments, analogs and derivatives thereof as described herein) and nucleic acids encoding antibodies of the invention (including fragments, analogs and derivatives thereof and anti-idiotypic antibodies as described herein). The antibodies of the invention can be used to detect, diagnose, prevent, treat, prognosticate, and/or ameliorate cardiovascular diseases, disorders or conditions associated with aberrant expression and/or activity of a polypeptide of the invention. The treatment and/or prevention of cardiovascular diseases, disorders, or conditions associated with aberrant expression and/or activity of a polypeptide of the invention includes, but is not limited to, alleviating symptoms associated with those diseases, disorders or conditions. Antibodies of the invention may be provided in pharmaceutically acceptable compositions as known in the art or as described herein.

[0367] A summary of the ways in which the antibodies of the present invention may be used therapeutically includes binding polynucleotides or polypeptides of the present invention locally or systemically in the body or by direct cytotoxicity of the antibody, e.g. as mediated by complement (CDC) or by effector cells (ADCC). Some of these approaches are described in more detail below. Armed with the teachings provided herein, one of ordinary skill in the art will know how to use the antibodies of the present invention for diagnostic, monitoring or therapeutic purposes without undue experimentation.

[0368] The antibodies of this invention may be advantageously utilized in combination with other monoclonal or chimeric antibodies, or with lymphokines or hematopoietic growth factors (such as, e.g., IL-2, IL-3 and IL-7), for example, which serve to increase the number or activity of effector cells which interact with the antibodies.

[0369] The antibodies of the invention may be administered alone or in combination with other types of treatments (e.g., radiation therapy, chemotherapy, hormonal therapy, immunotherapy and anti-tumor agents). Generally, administration of products of a species origin or species reactivity (in the case of antibodies) that is the same species as that of the patient is preferred. Thus, in a preferred embodiment, human antibodies, fragments derivatives, analogs, or nucleic acids, are administered to a human patient for therapy or prophylaxis.

[0370] It is preferred to use high affinity and/or potent in vivo inhibiting and/or neutralizing antibodies against polypeptides or polynucleotides of the present invention, fragments or regions thereof, for both immunoassays directed to and therapy of cardiovascular diseases and disorders related to polynucleotides or polypeptides, including fragments thereof, of the present invention. Such antibodies, fragments, or regions, will preferably have an affinity for polynucleotides or polypeptides of the invention, including fragments thereof. Preferred binding affinities include those with a dissociation constant or Kd less than 5×10⁻² M, 10⁻² M, 5×10⁻³ M, 10⁻³ M, 5×10⁻⁴ M, 10⁻⁴M, 5×10⁻⁵M, 10⁻⁵M, 5×10⁻⁶M, 10⁻⁶M, 5×10⁻⁷M, 10⁻⁷M, 5×10⁻⁸ M, 10⁻⁸M, 5×10⁻⁹ M, 10⁻⁹ M, 5×10⁻¹⁰ M, 10⁻¹⁰ M, 5×10⁻¹¹ M, 10⁻¹¹ M, 5×10⁻¹² M, 10⁻¹² M, 5×10⁻¹³ M, 10⁻¹³ M, 5×10⁻¹⁴ M, 10⁻¹⁴ M, 5×10⁻¹⁵ M, and 10⁻¹⁵ M.

Gene Therapy

[0371] In a specific embodiment, nucleic acids comprising sequences encoding antibodies or functional derivatives thereof, are administered to treat, inhibit or prevent a cardiovascular disease or disorder associated with aberrant expression and/or activity of a polypeptide of the invention, by way of gene therapy. Gene therapy refers to therapy performed by the administration to a subject of an expressed or expressible nucleic acid. In this embodiment of the invention, the nucleic acids produce their encoded protein that mediates a therapeutic effect.

[0372] Any of the methods for gene therapy available in the art can be used according to the present invention. Exemplary methods are described below.

[0373] For general reviews of the methods of gene therapy, see Goldspiel et al., Clinical Pharmacy 12:488-505 (1993); Wu and Wu, Biotherapy 3:87-95 (1991); Tolstoshev, Ann. Rev. Pharmacol. Toxicol. 32:573-596 (1993); Mulligan, Science 260:926-932 (1993); and Morgan and Anderson, Ann. Rev. Biochem. 62:191-217 (1993); May, TIBTECH 11(5):155-215 (1993). Methods commonly known in the art of recombinant DNA technology which can be used are described in Ausubel et al. (eds.), Current Protocols in Molecular Biology, John Wiley & Sons, NY (1993); and Kriegler, Gene Transfer and Expression, A Laboratory Manual, Stockton Press, NY (1990).

[0374] In a preferred embodiment, the compound comprises nucleic acid sequences encoding an antibody, said nucleic acid sequences being part of expression vectors that express the antibody or fragments or chimeric proteins or heavy or light chains thereof in a suitable host. In particular, such nucleic acid sequences have promoters operably linked to the antibody coding region, said promoter being inducible or constitutive, and, optionally, tissue-specific. In another particular embodiment, nucleic acid molecules are used in which the antibody coding sequences and any other desired sequences are flanked by regions that promote homologous recombination at a desired site in the genome, thus providing for intrachromosomal expression of the antibody encoding nucleic acids (Koller and Smithies, Proc. Natl. Acad. Sci. USA 86:8932-8935 (1989); Zijlstra et al., Nature 342:435438 (1989). In specific embodiments, the expressed antibody molecule is a single chain antibody; alternatively, the nucleic acid sequences include sequences encoding both the heavy and light chains, or fragments thereof, of the antibody.

[0375] Delivery of the nucleic acids into a patient may be either direct, in which case the patient is directly exposed to the nucleic acid or nucleic acid-carrying vectors, or indirect, in which case, cells are first transformed with the nucleic acids in vitro, then transplanted into the patient. These two approaches are known, respectively, as in vivo or ex vivo gene therapy.

[0376] In a specific embodiment, the nucleic acid sequences are directly administered in vivo, where it is expressed to produce the encoded product. This can be accomplished by any of numerous methods known in the art, e.g., by constructing them as part of an appropriate nucleic acid expression vector and administering it so that they become intracellular, e.g., by infection using defective or attenuated retrovirals or other viral vectors (see U.S. Pat. No. 4,980,286), or by direct injection of naked DNA, or by use of microparticle bombardment (e.g., a gene gun; Biolistic, Dupont), or coating with lipids or cell-surface receptors or transfecting agents, encapsulation in liposomes, microparticles, or microcapsules, or by administering them in linkage to a peptide which is known to enter the nucleus, by administering it in linkage to a ligand subject to receptor-mediated endocytosis (see, e.g., Wu and Wu, J. Biol. Chem. 262:44294432 (1987)) (which can be used to target cell types specifically expressing the receptors), etc. In another embodiment, nucleic acid-ligand complexes can be formed in which the ligand comprises a fusogenic viral peptide to disrupt endosomes, allowing the nucleic acid to avoid lysosomal degradation. In yet another embodiment, the nucleic acid can be targeted in vivo for cell specific uptake and expression, by targeting a specific receptor (see, e.g., PCT Publications WO 92/06180; WO 92/22635; WO92/20316; WO93/14188, WO 93/20221). Alternatively, the nucleic acid can be introduced intracellularly and incorporated within host cell DNA for expression, by homologous recombination (Koller and Smithies, Proc. Natl. Acad. Sci. USA 86:8932-8935 (1989); Zijlstra et al., Nature 342:435-438 (1989)).

[0377] In a specific embodiment, viral vectors that contains nucleic acid sequences encoding an antibody of the invention are used. For example, a retroviral vector can be used (see Miller et al., Meth. Enzymol. 217:581-599 (1993)). These retroviral vectors contain the components necessary for the correct packaging of the viral genome and integration into the host cell DNA. The nucleic acid sequences encoding the antibody to be used in gene therapy are cloned into one or more vectors, which facilitates delivery of the gene into a patient. More detail about retroviral vectors can be found in Boesen et al., Biotherapy 6:291-302 (1994), which describes the use of a retroviral vector to deliver the mdr1 gene to hematopoietic stem cells in order to make the stem cells more resistant to chemotherapy. Other references illustrating the use of retroviral vectors in gene therapy are: Clowes et al., J. Clin. Invest. 93:644-651 (1994); Kiem et al., Blood 83:1467-1473 (1994); Salmons and Gunzberg, Human Gene Therapy 4:129-141 (1993); and Grossman and Wilson, Curr. Opin. in Genetics and Devel. 3:110-114 (1993).

[0378] Adenoviruses are other viral vectors that can be used in gene therapy. Adenoviruses are especially attractive vehicles for delivering genes to respiratory epithelia. Adenoviruses naturally infect respiratory epithelia where they cause a mild disease. Other targets for adenovirus-based delivery systems are liver, the central nervous system, endothelial cells, and muscle. Adenoviruses have the advantage of being capable of infecting non-dividing cells. Kozarsky and Wilson, Current Opinion in Genetics and Development 3:499-503 (1993) present a review of adenovirus-based gene therapy. Bout et al., Human Gene Therapy 5:3-10 (1994) demonstrated the use of adenovirus vectors to transfer genes to the respiratory epithelia of rhesus monkeys. Other instances of the use of adenoviruses in gene therapy can be found in Rosenfeld et al., Science 252:431-434 (1991); Rosenfeld et al., Cell 68:143-155 (1992); Mastrangeli et al., J. Clin. Invest. 91:225-234 (1993); PCT Publication WO94/12649; and Wang, et al., Gene Therapy 2:775-783 (1995). In a preferred embodiment, adenovirus vectors are used.

[0379] Adeno-associated virus (AAV) has also been proposed for use in gene therapy (Walsh et al., Proc. Soc. Exp. Biol. Med. 204:289-300 (1993); U.S. Pat. No. 5,436,146).

[0380] Another approach to gene therapy involves transferring a gene to cells in tissue culture by such methods as electroporation, lipofection, calcium phosphate mediated transfection, or viral infection. Usually, the method of transfer includes the transfer of a selectable marker to the cells. The cells are then placed under selection to isolate those cells that have taken up and are expressing the transferred gene. Those cells are then delivered to a patient.

[0381] In this embodiment, the nucleic acid is introduced into a cell prior to administration in vivo of the resulting recombinant cell. Such introduction can be carried out by any method known in the art, including but not limited to transfection, electroporation, microinjection, infection with a viral or bacteriophage vector containing the nucleic acid sequences, cell fusion, chromosome-mediated gene transfer, microcell-mediated gene transfer, spheroplast fusion, etc. Numerous techniques are known in the art for the introduction of foreign genes into cells (see, e.g., Loeffler and Behr, Meth. Enzymol. 217:599-618 (1993); Cohen et al., Meth. Enzymol. 217:618-644 (1993); Cline, Pharmac. Ther. 29:69-92m (1985) and may be used in accordance with the present invention, provided that the necessary developmental and physiological functions of the recipient cells are not disrupted. The technique should provide for the stable transfer of the nucleic acid to the cell, so that the nucleic acid is expressible by the cell and preferably heritable and expressible by its cell progeny.

[0382] The resulting recombinant cells can be delivered to a patient by various methods known in the art. Recombinant blood cells (e.g., hematopoietic stem or progenitor cells) are preferably administered intravenously. The amount of cells envisioned for use depends on the desired effect, patient state, etc., and can be determined by one skilled in the art.

[0383] Cells into which a nucleic acid can be introduced for purposes of gene therapy encompass any desired, available cell type, and include but are not limited to epithelial cells, endothelial cells, keratinocytes, fibroblasts, muscle cells, hepatocytes; blood cells such as T lymphocytes, B lymphocytes, monocytes, macrophages, neutrophils, eosinophils, megakaryocytes, granulocytes; various stem or progenitor cells, in particular hematopoietic stem or progenitor cells, e.g., as obtained from bone marrow, umbilical cord blood, peripheral blood, fetal liver, etc.

[0384] In a preferred embodiment, the cell used for gene therapy is autologous to the patient.

[0385] In an embodiment in which recombinant cells are used in gene therapy, nucleic acid sequences encoding an antibody are introduced into the cells such that they are expressible by the cells or their progeny, and the recombinant cells are then administered in vivo for therapeutic effect. In a specific embodiment, stem or progenitor cells are used. Any stem and/or progenitor cells which can be isolated and maintained in vitro can potentially be used in accordance with this embodiment of the present invention (see e.g. PCT Publication WO 94/08598; Stemple and Anderson, Cell 71:973-985 (1992); Rheinwald, Meth. Cell Bio. 21A:229 (1980); and Pittelkow and Scott, Mayo Clinic Proc. 61:771 (1986)).

[0386] In a specific embodiment, the nucleic acid to be introduced for purposes of gene therapy comprises an inducible promoter operably linked to the coding region, such that expression of the nucleic acid is controllable by the presence or absence of an appropriate inducer of transcription.

Demonstration of Therapeutic or Prophylactic Activity

[0387] The compounds or pharmaceutical compositions of the invention are preferably tested in vitro, and then in vivo for the desired therapeutic or prophylactic activity, prior to use in humans. For example, in vitro assays to demonstrate the therapeutic or prophylactic utility of a compound or pharmaceutical composition include, the effect of a compound on a cell line or a patient tissue sample. The effect of the compound or composition on the cell line and/or tissue sample can be determined utilizing techniques known to those of skill in the art including, but not limited to, rosette formation assays and cell lysis assays. In accordance with the invention, in vitro assays which can be used to determine whether administration of a specific compound is indicated, include in vitro cell culture assays in which a patient tissue sample is grown in culture, and exposed to or otherwise administered a compound, and the effect of such compound upon the tissue sample is observed.

Therapeutic/Prophylactic Administration and Composition

[0388] The invention provides methods of treatment, inhibition and prophylaxis by administration to a subject of an effective amount of a compound or pharmaceutical composition of the invention, preferably a polypeptide or antibody of the invention. In a preferred embodiment, the compound is substantially purified (e.g., substantially free from substances that limit its effect or produce undesired side-effects). The subject is preferably an animal, including but not limited to animals such as cows, pigs, horses, chickens, cats, dogs, etc., and is preferably a mammal, and most preferably human.

[0389] Formulations and methods of administration that can be employed when the compound comprises a nucleic acid or an immunoglobulin are described above; additional appropriate formulations and routes of administration can be selected from among those described herein below.

[0390] Various delivery systems are known and can be used to administer a compound of the invention, e.g., encapsulation in liposomes, microparticles, microcapsules, recombinant cells capable of expressing the compound, receptor-mediated endocytosis (see, e.g., Wu and Wu, J. Biol. Chem. 262:4429-4432 (1987)), construction of a nucleic acid as part of a retroviral or other vector, etc. Methods of introduction include but are not limited to intradermal, intramuscular, intraperitoneal, intravenous, subcutaneous, intranasal, epidural, and oral routes. The compounds or compositions may be administered by any convenient route, for example by infusion or bolus injection, by absorption through epithelial or mucocutaneous linings (e.g., oral mucosa, rectal and intestinal mucosa, etc.) and may be administered together with other biologically active agents. Administration can be systemic or local. In addition, it may be desirable to introduce the pharmaceutical compounds or compositions of the invention into the central nervous system by any suitable route, including intraventricular and intrathecal injection; intraventricular injection may be facilitated by an intraventricular catheter, for example, attached to a reservoir, such as an Ommaya reservoir. Pulmonary administration can also be employed, e.g., by use of an inhaler or nebulizer, and formulation with an aerosolizing agent.

[0391] In a specific embodiment, it may be desirable to administer the pharmaceutical compounds or compositions of the invention locally to the area in need of treatment; this may be achieved by, for example, and not by way of limitation, local infusion during surgery, topical application, e.g., in conjunction with a wound dressing after surgery, by injection, by means of a catheter, by means of a suppository, or by means of an implant, said implant being of a porous, non-porous, or gelatinous material, including membranes, such as sialastic membranes, or fibers. Preferably, when administering a protein, including an antibody, of the invention, care must be taken to use materials to which the protein does not absorb.

[0392] In another embodiment, the compound or composition can be delivered in a vesicle, in particular a liposome (see Langer, Science 249:1527-1533 (1990); Treat et al., in Liposomes in the Therapy of Infectious Disease and Cancer, Lopez-Berestein and Fidler (eds.), Liss, New York, pp. 353-365 (1989); Lopez-Berestein, ibid., pp.317-327; see generally ibid.)

[0393] In yet another embodiment, the compound or composition can be delivered in a controlled release system. In one embodiment, a pump may be used (see Langer, supra; Sefton, CRC Crit. Ref. Biomed. Eng. 14:201 (1987); Buchwald et al., Surgery 88:507 (1980); Saudek et al., N. Engl. J. Med. 321:574 (1989)). In another embodiment, polymeric materials can be used (see Medical Applications of Controlled Release, Langer and Wise (eds.), CRC Pres., Boca Raton, Fla. (1974); Controlled Drug Bioavailability, Drug Product Design and Performance, Smolen and Ball (eds.), Wiley, New York (1984); Ranger and Peppas, J., Macromol. Sci. Rev. Macromol. Chem. 23:61 (1983); see also Levy et al., Science 228:190 (1985); During et al., Ann. Neurol. 25:351 (1989); Howard et al., J. Neurosurg. 71:105 (1989)). In yet another embodiment, a controlled release system can be placed in proximity of the therapeutic target, e.g., the brain, thus requiring only a fraction of the systemic dose (see, e.g., Goodson, in Medical Applications of Controlled Release, supra, vol. 2, pp. 115-138 (1984)).

[0394] Other controlled release systems are discussed in the review by Langer (Science 249:1527-1533 (1990)).

[0395] In a specific embodiment where the compound of the invention is a nucleic acid encoding a protein, the nucleic acid can be administered in vivo to promote expression of its encoded protein, by constructing it as part of an appropriate nucleic acid expression vector and administering it so that it becomes intracellular, e.g., by use of a retroviral vector (see U.S. Pat. No. 4,980,286), or by direct injection, or by use of microparticle bombardment (e.g., a gene gun; Biolistic, Dupont), or coating with lipids or cell-surface receptors or transfecting agents, or by administering it in linkage to a homeobox-like peptide which is known to enter the nucleus (see e.g., Joliot et al., Proc. Natl. Acad. Sci. USA 88:1864-1868 (1991)), etc. Alternatively, a nucleic acid can be introduced intracellularly and incorporated within host cell DNA for expression, by homologous recombination.

[0396] The present invention also provides pharmaceutical compositions. Such compositions comprise a therapeutically effective amount of a compound, and a pharmaceutically acceptable carrier. In a specific embodiment, the term “pharmaceutically acceptable” means approved by a regulatory agency of the Federal or a state government or listed in the U.S. Pharmacopeia or other generally recognized pharmacopeia for use in animals, and more particularly in humans. The term “carrier” refers to a diluent, adjuvant, excipient, or vehicle with which the therapeutic is administered. Such pharmaceutical carriers can be sterile liquids, such as water and oils, including those of petroleum, animal, vegetable or synthetic origin, such as peanut oil, soybean oil, mineral oil, sesame oil and the like. Water is a preferred carrier when the pharmaceutical composition is administered intravenously. Saline solutions and aqueous dextrose and glycerol solutions can also be employed as liquid carriers, particularly for injectable solutions. Suitable pharmaceutical excipients include starch, glucose, lactose, sucrose, gelatin, malt, rice, flour, chalk, silica gel, sodium stearate, glycerol monostearate, talc, sodium chloride, dried skim milk, glycerol, propylene, glycol, water, ethanol and the like. The composition, if desired, can also contain minor amounts of wetting or emulsifying agents, or pH buffering agents. These compositions can take the form of solutions, suspensions, emulsion, tablets, pills, capsules, powders, sustained-release formulations' and the like. The composition can be formulated as a suppository, with traditional binders and carriers such as triglycerides. Oral formulation can include standard carriers such as pharmaceutical grades of mannitol, lactose, starch, magnesium stearate, sodium saccharine, cellulose, magnesium carbonate, etc. Examples of suitable pharmaceutical carriers are described in “Remington's Pharmaceutical Sciences” by E. W. Martin. Such compositions will contain a therapeutically effective amount of the compound, preferably in purified form, together with a suitable amount of carrier so as to provide the form for proper administration to the patient. The formulation should suit the mode of administration.

[0397] In a preferred embodiment, the composition is formulated in accordance with routine procedures as a pharmaceutical composition adapted for intravenous administration to human beings. Typically, compositions for intravenous administration are solutions in sterile isotonic aqueous buffer. Where necessary, the composition may also include a solubilizing agent and a local anesthetic such as lignocaine to ease pain at the site of the injection. Generally, the ingredients are supplied either separately or mixed together in unit dosage form, for example, as a dry lyophilized powder or water free concentrate in a hermetically sealed container such as an ampoule or sachette indicating the quantity of active agent. Where the composition is to be administered by infusion, it can be dispensed with an infusion bottle containing sterile pharmaceutical grade water or saline. Where the composition is administered by injection, an ampoule of sterile water for injection or saline can be provided so that the ingredients may be mixed prior to administration.

[0398] The compounds of the invention can be formulated as neutral or salt forms. Pharmaceutically acceptable salts include those formed with anions such as those derived from hydrochloric, phosphoric, acetic, oxalic, tartaric acids, etc., and those formed with cations such as those derived from sodium, potassium, ammonium, calcium, ferric hydroxides, isopropylamine, triethylamine, 2-ethylamino ethanol, histidine, procaine, etc.

[0399] The amount of the compound of the invention which will be effective in the treatment, inhibition and prevention of a disease or disorder associated with aberrant expression and/or activity of a polypeptide of the invention can be determined by standard clinical techniques. In addition, in vitro assays may optionally be employed to help identify optimal dosage ranges. The precise dose to be employed in the formulation will also depend on the route of administration, and the seriousness of the disease or disorder, and should be decided according to the judgment of the practitioner and each patient's circumstances. Effective doses may be extrapolated from dose-response curves derived from in vitro or animal model test systems.

[0400] For antibodies, the dosage administered to a patient is typically 0.1 mg/kg to 100 mg/kg of the patient's body weight. Preferably, the dosage administered to a patient is between 0.1 mg/kg and 20 mg/kg of the patient's body weight, more preferably 1 mg/kg to 10 mg/kg of the patient's body weight. Generally, human antibodies have a longer half-life within the human body than antibodies from other species due to the immune response to the foreign polypeptides. Thus, lower dosages of human antibodies and less frequent administration is often possible. Further, the dosage and frequency of administration of antibodies of the invention may be reduced by enhancing uptake and tissue penetration (e.g., into the brain) of the antibodies by modifications such as, for example, lipidation.

[0401] The invention also provides a pharmaceutical pack or kit comprising one or more containers filled with one or more of the ingredients of the pharmaceutical compositions of the invention. Optionally associated with such container(s) can be a notice in the form prescribed by a governmental agency regulating the manufacture, use or sale of pharmaceuticals or biological products, which notice reflects approval by the agency of manufacture, use or sale for human administration.

Diagnosis and Imaging

[0402] Labeled antibodies, and derivatives and analogs thereof, which specifically bind to a polypeptide of interest can be used for diagnostic purposes to detect, diagnose, prognosticate, or monitor cardiovascular diseases, disorders, and/or conditions associated with the aberrant expression and/or activity of a polypeptide of the invention. The invention provides for the detection of aberrant expression of a polypeptide of interest, comprising (a) assaying the expression of the polypeptide of interest in cells or body fluid of an individual using one or more antibodies specific to the polypeptide interest and (b) comparing the level of gene expression with a standard gene expression level, whereby an increase or decrease in the assayed polypeptide gene expression level compared to the standard expression level is indicative of aberrant expression.

[0403] The invention provides a diagnostic assay for diagnosing a cardiovascular disease or disorder, comprising (a) assaying the expression of the polypeptide of interest in cells or body fluid of an individual using one or more antibodies specific to the polypeptide interest and (b) comparing the level of gene expression with a standard gene expression level, whereby an increase or decrease in the assayed polypeptide gene expression level compared to the standard expression level is indicative of a particular cardiovascular disease or disorder. With respect to cancers of the cardiovascular system, the presence of a relatively high amount of transcript in biopsied tissue from an individual may indicate a predisposition for the development of the disease, or may provide a means for detecting the disease prior to the appearance of actual clinical symptoms. A more definitive diagnosis of this type may allow health professionals to employ preventative measures or aggressive treatment earlier thereby preventing the development or further progression of the cancer of the cardiovascular system.

[0404] Antibodies of the invention can be used to assay protein levels in a biological sample using classical immunohistological methods known to those of skill in the art (e.g., see Jalkanen et al., J. Cell. Biol. 101:976-985 (1985); Jalkanen et al., J. Cell. Biol. 105:3087-3096 (1987)). Other antibody-based methods useful for detecting protein gene expression include immunoassays, such as the enzyme linked immunosorbent assay (ELISA) and the radioimmunoassay (RIA). Suitable antibody assay labels are known in the art and include enzyme labels, such as, glucose oxidase; radioisotopes, such as iodine (125I, 121I), carbon (14C), sulfur (35S), tritium (3H, indium (112In), and technetium (99Tc); luminescent labels, such as luminol; and fluorescent labels, such as fluorescein and rhodamine, and biotin.

[0405] One facet of the invention is the detection and diagnosis of a disease or disorder associated with aberrant expression of a polypeptide of interest in an animal, preferably a mammal and most preferably a human. In one embodiment, diagnosis comprises: a) administering (for example, parenterally, subcutaneously, or intraperitoneally) to a subject an effective amount of a labeled molecule which specifically binds to the polypeptide of interest, b) waiting for a time interval following the administering for permitting the labeled molecule to preferentially concentrate at sites in the subject where the polypeptide is expressed (and for unbound labeled molecule to be cleared to background level); c) determining background level; and d) detecting the labeled molecule in the subject, such that detection of labeled molecule above the background level indicates that the subject has a particular disease or disorder associated with aberrant expression of the polypeptide of interest. Background level can be determined by various methods including, comparing the amount of labeled molecule detected to a standard value previously determined for a particular system.

[0406] It will be understood in the art that the size of the subject and the imaging system used will determine the quantity of imaging moiety needed to produce diagnostic images. In the case of a radioisotope moiety, for a human subject, the quantity of radioactivity injected will normally range from about 5 to 20 millicuries of 99 mTc. The labeled antibody or antibody fragment will then preferentially accumulate at the location of cells which contain the specific protein. In vivo tumor imaging is described in S. W. Burchiel et al., “Immunopharmacokinetics of Radiolabeled Antibodies and Their Fragments.” (Chapter 13 in Tumor Imaging: The Radiochemical Detection of Cancer, S. W. Burchiel and B. A. Rhodes, eds., Masson Publishing Inc. (1982)).

[0407] Depending on several variables, including the type of label used and the mode of administration, the time interval following the administration for permitting the labeled molecule to preferentially concentrate at sites in the subject and for unbound labeled molecule to be cleared to background level is 6 to 48 hours or 6 to 24 hours or 6 to 12 hours. In another embodiment the time interval following administration is 5 to 20 days or 5 to 10 days.

[0408] In an embodiment, monitoring of the disease or disorder is carried out by repeating the method for diagnosing the disease or disease, for example, one month after initial diagnosis, six months after initial diagnosis, one year after initial diagnosis, etc.

[0409] Presence of the labeled molecule can be detected in the patient using methods known in the art for in vivo scanning. These methods depend upon the type of label used. Skilled artisans will be able to determine the appropriate method for detecting a particular label. Methods and devices that may be used in the diagnostic methods of the invention include, but are not limited to, computed tomography (CT), whole body scan such as position emission tomography (PAT), magnetic resonance imaging (MRI, and sonography.

[0410] In a specific embodiment, the molecule is labeled with a radioisotope and is detected in The patient using a radiation responsive surgical instrument (Thurston et al., U.S. Pat. No. 5,441,050). In another embodiment, the molecule is labeled with a fluorescent compound and is detected in the patient using a fluorescence responsive scanning instrument. In another embodiment, the molecule is labeled with a positron emitting metal and is detected in the patent using positron emission-tomography. In yet another embodiment, the molecule is labeled with a paramagnetic label and is detected in a patient using magnetic resonance imaging (MRI).

Kits

[0411] The present invention provides kits that can be used in the above methods. In one embodiment, a kit comprises an antibody of the invention, preferably a purified antibody, in one or more containers. In a specific embodiment, the kits of the present invention contain a substantially isolated polypeptide comprising an epitope which is specifically immunoreactive with an antibody included in the kit. Preferably, the kits of the present invention further comprise a control antibody which does not react with the polypeptide of interest. In another specific embodiment, the kits of the present invention contain a means for detecting the binding of an antibody to a polypeptide of interest (e.g., the antibody may be conjugated to a detectable substrate such as a fluorescent compound, an enzymatic substrate, a radioactive compound or a luminescent compound, or a second antibody which recognizes the first antibody may be conjugated to a detectable substrate).

[0412] In another specific embodiment of the present invention, the kit is a diagnostic kit for use in screening serum containing antibodies specific against proliferative and/or cancerous polynucleotides and polypeptides. Such a kit may include a control antibody that does not react with the polypeptide of interest. Such a kit may include a substantially isolated polypeptide antigen comprising an epitope which is specifically immunoreactive with at least one anti-polypeptide antigen antibody. Further, such a kit includes means for detecting the binding of said antibody to the antigen (e.g., the antibody may be conjugated to a fluorescent compound such as fluorescein or rhodamine which can be detected by flow cytometry). In specific embodiments, the kit may include a recombinantly produced or chemically synthesized polypeptide antigen. The polypeptide antigen of the kit may also be attached to a solid support.

[0413] In a more specific embodiment the detecting means of the above-described kit includes a solid support to which said polypeptide antigen is attached. Such a kit may also include a non-attached reporter-labeled anti-human antibody. In this embodiment, binding of the antibody to the polypeptide antigen can be detected by binding of the said reporter-labeled antibody.

[0414] In an additional embodiment, the invention includes a diagnostic kit for use in screening serum containing antigens of the polypeptide of the invention. The diagnostic kit includes a substantially isolated antibody specifically immunoreactive with polypeptide or polynucleotide antigens, and means for detecting the binding of the polynucleotide or polypeptide antigen to the antibody. In one embodiment, the antibody is attached to a solid support. In a specific embodiment, the antibody may be a monoclonal antibody. The detecting means of the kit may include a second, labeled monoclonal antibody. Alternatively, or in addition, the detecting means may include a labeled, competing antigen.

[0415] In one diagnostic configuration, test serum is reacted with a solid phase reagent having a surface-bound antigen obtained by the methods of the present invention. After binding with specific antigen antibody to the reagent and removing unbound serum components by washing, the reagent is reacted with reporter-labeled anti-human antibody to bind reporter to the reagent in proportion to the amount of bound anti-antigen antibody on the solid support. The reagent is again washed to remove unbound labeled antibody, and the amount of reporter associated with the reagent is determined. Typically, the reporter is an enzyme which is detected by incubating the solid phase in the presence of a suitable fluorometric, luminescent or colorimetric substrate (Sigma, St. Louis, Mo.).

[0416] The solid surface reagent in the above assay is prepared by known techniques for attaching protein material to solid support material, such as polymeric beads, dip sticks, 96-well plate or filter material. These attachment methods generally include non-specific adsorption of the protein to the support or covalent attachment of the protein, typically through a free amine group, to a chemically reactive group on the solid support, such as an activated carboxyl, hydroxyl, or aldehyde group. Alternatively, streptavidin coated plates can be used in conjunction with biotinylated antigen(s).

[0417] Thus, the invention provides an assay system or kit for carrying out this diagnostic method. The kit generally includes a support with surface-bound recombinant antigens, and a reporter-labeled anti-human antibody for detecting surface-bound anti-antigen antibody.

Uses of the Polynucleotides

[0418] Each of the polynucleotides identified herein can be used in numerous ways as reagents. The following description should be considered exemplary and utilizes known techniques.

[0419] The polynucleotides of the present invention are useful for chromosome identification. There exists an ongoing need to identify new chromosome markers, since few chromosome marking reagents, based on actual sequence data (repeat polymorphisms), are presently available. Each sequence is specifically targeted to and can hybridize with a particular location on an individual human chromosome, thus each polynucleotide of the present invention can routinely be used as a chromosome marker using techniques known in the art. Table 1B, column 9 provides the chromosome location of some of the polynucleotides of the invention.

[0420] Briefly, sequences can be mapped to chromosomes by preparing PCR primers (preferably at least 15 bp (e.g., 15-25 bp) from the sequences shown in SEQ ID NO:X. Primers can optionally be selected using computer analysis so that primers do not span more than one predicted exon in the genomic DNA. These primers are then used for PCR screening of somatic cell hybrids containing individual human chromosomes. Only those hybrids containing the human gene corresponding to SEQ ID NO:X will yield an amplified fragment.

[0421] Similarly, somatic hybrids provide a rapid method of PCR mapping the polynucleotides to particular chromosomes. Three or more clones can be assigned per day using a single thermal cycler. Moreover, sublocalization of the polynucleotides can be achieved with panels of specific chromosome fragments. Other gene mapping strategies that can be used include in situ hybridization, prescreening with labeled flow-sorted chromosomes, preselection by hybridization to construct chromosome specific-cDNA libraries, and computer mapping techniques (See, e.g., Shuler, Trends Biotechnol 16:456459 (1998) which is hereby incorporated by reference in its entirety).

[0422] Precise chromosomal location of the polynucleotides can also be achieved using fluorescence in situ hybridization (FISH) of a metaphase chromosomal spread. This technique uses polynucleotides as short as 500 or 600 bases; however, polynucleotides 2,0004,000 bp are preferred. For a review of this technique, see Verma et al., “Human Chromosomes: a Manual of Basic Techniques,” Pergamon Press, New York (1988).

[0423] For chromosome mapping, the polynucleotides can be used individually (to mark a single chromosome or a single site on that chromosome) or in panels (for marking multiple sites and/or multiple chromosomes).

[0424] Thus, the present invention also provides a method for chromosomal localization which involves (a) preparing PCR primers from the polynucleotide sequences in Table 1B and/or Table 2 and SEQ ID NO:X and (b) screening somatic cell hybrids containing individual chromosomes.

[0425] The polynucleotides of the present invention would likewise be useful for radiation hybrid mapping, HAPPY mapping, and long range restriction mapping. For a review of these techniques and others known in the art, see, e.g. Dear, “Genome Mapping: A Practical Approach,” IRL Press at Oxford University Press, London (1997); Aydin, J. Mol. Med. 77:691-694 (1999); Hacia et al., Mol. Psychiatry 3:483-492 (1998); Herrick et al., Chromosome Res. 7:409-423 (1999); Hamilton et al., Methods Cell Biol. 62:265-280 (2000); and/or Ott, J. Hered. 90:68-70 (1999) each of which is hereby incorporated by reference in its entirety.

[0426] Once a polynucleotide has been mapped to a precise chromosomal location, the physical position of the polynucleotide can be used in linkage analysis. Linkage analysis establishes coinheritance between a chromosomal location and presentation of a particular disease. (Disease mapping data are found, for example, in V. McKusick, Mendelian Inheritance in Man (available on line through Johns Hopkins University Welch Medical Library)). Table 1B provides an OMIM reference identification number of diseases associated with the cytologic band disclosed in Table 1B, as determined using techniques described herein and by reference to Table 5. Assuming 1 megabase mapping resolution and one gene per 20 kb, a cDNA precisely localized to a chromosomal region associated with the disease could be one of 50-500 potential causative genes.

[0427] Thus, once coinheritance is established, differences in a polynucleotide of the invention and the corresponding gene between affected and unaffected individuals can be examined. First, visible structural alterations in the chromosomes, such as deletions or translocations, are examined in chromosome spreads or by PCR. If no structural alterations exist, the presence of point mutations are ascertained. Mutations observed in some or all affected individuals, but not in normal individuals, indicates that the mutation may cause the disease. However, complete sequencing of the polypeptide and the corresponding gene from several normal individuals is required to distinguish the mutation from a polymorphism. If a new polymorphism is identified, this polymorphic polypeptide can be used for further linkage analysis.

[0428] Furthermore, increased or decreased expression of the gene in affected individuals as compared to unaffected individuals can be assessed using the polynucleotides of the invention. Any of these alterations (altered expression, chromosomal rearrangement, or mutation) can be used as a diagnostic or prognostic marker. Diagnostic and prognostic methods, kits and reagents encompassed by the present invention are briefly described below and more thoroughly elsewhere herein (see e.g., the sections labeled “Antibodies”, “Diagnostic Assays”, and “Methods for Detecting Diseases”).

[0429] Thus, the invention also provides a diagnostic method useful during diagnosis of a disorder, involving measuring the expression level of polynucleotides of the present invention in cells or body fluid from an individual and comparing the measured gene expression level with a standard level of polynucleotide expression level, whereby an increase or decrease in the gene expression level compared to the standard is indicative of a disorder. Additional non-limiting examples of diagnostic methods encompassed by the present invention are more thoroughly described elsewhere herein (see, e.g., Example 12).

[0430] In still another embodiment, the invention includes a kit for analyzing samples for the presence of proliferative and/or cancerous polynucleotides derived from a test subject. In a general embodiment, the kit includes at least one polynucleotide probe containing a nucleotide sequence that will specifically hybridize with a polynucleotide of the invention and a suitable container. In a specific embodiment, the kit includes two polynucleotide probes defining an internal region of the polynucleotide of the invention, where each probe has one strand containing a 31′mer-end internal to the region. In a further embodiment, the probes may be useful as primers for polymerase chain reaction amplification.

[0431] Where a diagnosis of a related disorder, including, for example, diagnosis of a tumor, has already been made according to conventional methods, the present invention is useful as a prognostic indicator, whereby patients exhibiting enhanced or depressed polynucleotide of the invention expression will experience a worse clinical outcome relative to patients expressing the gene at a level nearer the standard level.

[0432] By “measuring the expression level of polynucleotides of the invention” is intended qualitatively or quantitatively measuring or estimating the level of the polypeptide of the invention or the level of the mRNA encoding the polypeptide of the invention in a first biological sample either directly (e.g., by determining or estimating absolute protein level or mRNA level) or relatively (e.g., by comparing to the polypeptide level or mRNA level in a second biological sample). Preferably, the polypeptide level or mRNA level in the first biological sample is measured or estimated and compared to a standard polypeptide level or mRNA level, the standard being taken from a second biological sample obtained from an individual not having the related disorder or being determined by averaging levels from a population of individuals not having a related disorder. As will be appreciated in the art, once a standard polypeptide level or mRNA level is known, it can be used repeatedly as a standard for comparison.

[0433] By “biological sample” is intended any biological sample obtained from an individual, body fluid, cell line, tissue culture, or other source which contains polypeptide of the present invention or the corresponding mRNA. As indicated, biological samples include body fluids (such as semen, lymph, vaginal pool, sera, plasma, urine, synovial fluid and spinal fluid) which contain the polypeptide of the present invention, and tissue sources found to express the polypeptide of the present invention. Methods for obtaining tissue biopsies and body fluids from mammals are well known in the art. Where the biological sample is to include mRNA, a tissue biopsy is the preferred source.

[0434] The method(s) provided above may preferably be applied in a diagnostic method and/or kits in which polynucleotides and/or polypeptides of the invention are attached to a solid support. In one exemplary method, the support may be a “gene chip” or a “biological chip” as described in U.S. Pat. Nos. 5,837,832, 5,874,219, and 5,856,174. Further, such a gene chip with polynucleotides of the invention attached may be used to identify polymorphisms between the isolated polynucleotide sequences of the invention, with polynucleotides isolated from a test subject. The knowledge of such polymorphisms (i.e. their location, as well as, their existence) would be beneficial in identifying disease loci for many disorders, such as for example, in neural disorders, immune system disorders, muscular disorders, reproductive disorders, gastrointestinal disorders, pulmonary disorders, digestive disorders, metabolic disorders, cardiovascular disorders, renal disorders, proliferative disorders, and/or cancerous diseases and conditions. Such a method is described in U.S. Pat. Nos. 5,858,659 and 5,856,104. The US Patents referenced supra are hereby incorporated by reference in their entirety herein.

[0435] The present invention encompasses polynucleotides of the present invention that are chemically synthesized, or reproduced as peptide nucleic acids (PNA), or according to other methods known in the art. The use of PNAs would serve as the preferred form if the polynucleotides of the invention are incorporated onto a solid support, or gene chip. For the purposes of the present invention, a peptide nucleic acid (PNA) is a polyanide type of DNA analog and the monomeric units for adenine, guanine, thymine and cytosine are available commercially (Perceptive Biosystems). Certain components of DNA, such as phosphorus, phosphorus oxides, or deoxyribose derivatives, are not present in PNAs. As disclosed by Nielsen et al., Science 254, 1497 (1991); and Egholm et al., Nature 365, 666 (1993), PNAs bind specifically and tightly to complementary DNA strands and are not degraded by nucleases. In fact, PNA binds more strongly to DNA than DNA itself does. This is probably because there is no electrostatic repulsion between the two strands, and also the polyamide backbone is more flexible. Because of this, PNA/DNA duplexes bind under a wider range of stringency conditions than DNA/DNA duplexes, making it easier to perform multiplex hybridization. Smaller probes can be used than with DNA due to the strong binding. In addition, it is more likely that single base mismatches can be determined with PNA/DNA hybridization because a single mismatch in a PNA/DNA 15-mer lowers the melting point (T.sub.m) by 8°-20° C., vs. 4°-16° C. for the DNA/DNA 15-mer duplex. Also, the absence of charge groups in PNA means that hybridization can be done at low ionic strengths and reduce possible interference by salt during the analysis.

[0436] The compounds of the present invention have uses which include, but are not limited to, detecting cancer in mammals. In particular the invention is useful during diagnosis of pathological cell proliferative neoplasias which include, but are not limited to: acute myelogenous leukemias including acute monocytic leukemia, acute myeloblastic leukemia, acute promyelocytic leukemia, acute myelomonocytic leukemia, acute erythroleukemia, acute megakaryocytic leukemia, and acute undifferentiated leukemia, etc.; and chronic myelogenous leukemias including chronic myelomonocytic leukemia, chronic granulocytic leukemia, etc. Preferred mammals include monkeys, apes, cats, dogs, cows, pigs, horses, rabbits and humans. Particularly preferred are humans.

[0437] Pathological cell proliferative disorders are often associated with inappropriate activation of proto-oncogenes. (Gelmann, E. P. et al., “The Etiology of Acute Leukemia: Molecular Genetics and Viral Oncology,” in Neoplastic Diseases of the Blood, Vol 1., Wiernik, P. H. et al. eds., 161-182 (1985)). Neoplasias are now believed to result from the qualitative alteration of a normal cellular gene product, or from the quantitative modification of gene expression by insertion into the chromosome of a viral sequence, by chromosomal translocation of a gene to a more actively transcribed region, or by some other mechanism (Gelmann et al., supra) It is likely that mutated or altered expression of specific genes is involved in the pathogenesis of some leukemias, among other tissues and cell types. (Gelmann et al., supra) Indeed, the human counterparts of the oncogenes involved in some animal neoplasias have been amplified or translocated in some cases of human leukemia and carcinoma. (Gelmann et al., supra)

[0438] For example, c-myc expression is highly amplified in the non-lymphocytic leukemia cell line HL-60. When HL-60 cells are chemically induced to stop proliferation, the level of c-myc is found to be downregulated. (International Publication Number WO 91/15580). However, it has been shown that exposure of HL-60 cells to a DNA construct that is complementary to the 5′ end of c-myc or c-myb blocks translation of the corresponding mRNAs which down-regulates expression of the c-myc or c-myb proteins and causes arrest of cell proliferation and differentiation of the treated cells. (International Publication Number WO 91/15580; Wickstrom et al., Proc. Natl. Acad. Sci. 85:1028 (1988); Anfossi et al., Proc. Natl. Acad. Sci. 86:3379 (1989)). However, the skilled artisan would appreciate the present invention's usefulness is not be limited to treatment, prevention, and/or prognosis of proliferative disorders of cells and tissues of hematopoietic origin, in light of the numerous cells and cell types of varying origins which are known to exhibit proliferative phenotypes.

[0439] In addition to the foregoing, a polynucleotide of the present invention can be used to control gene expression through triple helix formation or through antisense DNA or RNA. Antisense techniques are discussed, for example, in Okano, J. Neurochem. 56: 560 (1991); “Oligodeoxynucleotides as Antisense Inhibitors of Gene Expression, CRC Press, Boca Raton, Fla. (1988). Triple helix formation is discussed in, for instance Lee et al., Nucleic Acids Research 6: 3073 (1979); Cooney et al., Science 241: 456 (1988); and Dervan et al., Science 251: 1360 (1991). Both methods rely on binding of the polynucleotide to a complementary DNA or RNA. For these techniques, preferred polynucleotides are usually oligonucleotides 20 to 40 bases in length and complementary to either the region of the gene involved in transcription (triple helix—see Lee et al., Nucl. Acids Res. 6:3073 (1979); Cooney et al., Science 241:456 (1988); and Dervan et al., Science 251:1360 (1991)) or to the mRNA itself (antisense—Okano, J. Neurochem 56:560 (1991); Oligodeoxy-nucleotides as Antisense Inhibitors of Gene Expression, CRC Press, Boca Raton, Fla. (1988)). Triple helix formation optimally results in a shut-off of RNA transcription from DNA, while antisense RNA hybridization blocks translation of an mRNA molecule into polypeptide. The oligonucleotide described above can also be delivered to cells such that the antisense RNA or DNA may be expressed in vivo to inhibit production of polypeptide of the present invention antigens. Both techniques are effective in model systems, and the information disclosed herein can be used to design antisense or triple helix polynucleotides in an effort to treat disease, and in particular, for the treatment of proliferative diseases and/or conditions. Non-limiting antisense and triple helix methods encompassed by the present invention are more thoroughly described elsewhere herein (see, e.g., the section labeled “Antisense and Ribozyme (Antagonists)”).

[0440] Polynucleotides of the present invention are also useful in gene therapy. One goal of gene therapy is to insert a normal gene into an organism having a defective gene, in an effort to correct the genetic defect. The polynucleotides disclosed in the present invention offer a means of targeting such genetic defects in a highly accurate manner. Another goal is to insert a new gene that was not present in the host genome, thereby producing a new trait in the host cell. Additional non-limiting examples of gene therapy methods encompassed by the present invention are more thoroughly described elsewhere herein (see, e.g., the sections labeled “Gene Therapy Methods”, and Examples 16, 17 and 18).

[0441] The polynucleotides are also useful for identifying individuals from minute biological samples. The United States military, for example, is considering the use of restriction fragment length polymorphism (RFLP) for identification of its personnel. In this technique, an individual's genomic DNA is digested with one or more restriction enzymes, and probed on a Southern blot to yield unique bands for identifying personnel. This method does not suffer from the current limitations of “Dog Tags” which can be lost, switched, or stolen, making positive identification difficult. The polynucleotides of the present invention can be used as additional DNA markers for RFLP.

[0442] The polynucleotides of the present invention can also be used as an alternative to RFLP, by determining the actual base-by-base DNA sequence of selected portions of an individual's genome. These sequences can be used to prepare PCR primers for amplifying and isolating such selected DNA, which can then be sequenced. Using this technique, individuals can be identified because each individual will have a unique set of DNA sequences. Once an unique ID database is established for an individual, positive identification of that individual, living or dead, can be made from extremely small tissue samples.

[0443] Forensic biology also benefits from using DNA-based identification techniques as disclosed herein. DNA sequences taken from very small biological samples such as tissues, e.g., hair or skin, or body fluids, e.g., blood, saliva, semen, synovial fluid, amniotic fluid, breast milk, lymph, pulmonary sputum or surfactant, urine, fecal matter, etc., can be amplified using PCR. In one prior art technique, gene sequences amplified from polymorphic loci, such as DQa class II HLA gene, are used in forensic biology to identify individuals. (Erlich, H., PCR Technology, Freeman and Co. (1992)). Once these specific polymorphic loci are amplified, they are digested with one or more restriction enzymes, yielding an identifying set of bands on a Southern blot probed with DNA corresponding to the DQa class II HLA gene. Similarly, polynucleotides of the present invention can be used as polymorphic markers for forensic purposes.

[0444] There is also a need for reagents capable of identifying the source of a particular tissue. Such need arises, for example, in forensics when presented with tissue of unknown origin. Appropriate reagents can comprise, for example, DNA probes or primers prepared from the sequences of the present invention, specific to tissues, including but not limited to those shown in Table 1B. Panels of such reagents can identify tissue by species and/or by organ type. In a similar fashion, these reagents can be used to screen tissue cultures for contamination. Additional non-limiting examples of such uses are further described herein.

[0445] The polynucleotides of the present invention are also useful as hybridization probes for differential identification of the tissue(s) or cell type(s) present in a biological sample. Similarly, polypeptides and antibodies directed to polypeptides of the present invention are useful to provide immunological probes for differential identification of the tissue(s) (e.g., immunohistochemistry assays) or cell type(s) (e.g., immunocytochemistry assays). In addition, for a number of disorders of the above tissues or cells, significantly higher or lower levels of gene expression of the polynucleotides/polypeptides of the present invention may be detected in certain tissues (e.g., tissues expressing polypeptides and/or polynucleotides of the present invention, for example, those disclosed in Table 1B, and/or cancerous and/or wounded tissues) or bodily fluids (e.g., semen, lymph, vaginal pool, serum, plasma, urine, synovial fluid or spinal fluid) taken from an individual having such a disorder, relative to a “standard” gene expression level, i.e., the expression level in healthy tissue from an individual not having the disorder.

[0446] Thus, the invention provides a diagnostic method of a disorder, which involves: (a) assaying gene expression level in cells or body fluid of an individual; (b) comparing the gene expression level with a standard gene expression level, whereby an increase or decrease in the assayed gene expression level compared to the standard expression level is indicative of a disorder.

[0447] In the very least, the polynucleotides of the present invention can be used as molecular weight markers on Southern gels, as diagnostic probes for the presence of a specific mRNA in a particular cell type, as a probe to “subtract-out” known sequences in the process of discovering novel polynucleotides, for selecting and making oligomers for attachment to a “gene chip” or other support, to raise anti-DNA antibodies using DNA immunization techniques, and as an antigen to elicit an immune response.

Uses of the Polypeptides

[0448] Each of the polypeptides identified herein can be used in numerous ways. The following description should be considered exemplary and utilizes known techniques.

[0449] Polypeptides and antibodies directed to polypeptides of the present invention are useful to provide immunological probes for differential identification of the tissue(s) (e.g., immunohistochemistry assays such as, for example, ABC immunoperoxidase (Hsu et al., J. Histochem. Cytochem. 29:577-580 (1981)) or cell type(s) (e.g., immunocytochemistry assays).

[0450] Antibodies can be used to assay levels of polypeptides encoded by polynucleotides of the invention in a biological sample using classical immunohistological methods known to those of skill in the art (e.g., see Jalkanen, et al., J. Cell. Biol. 101:976-985 (1985); Jalkanen, et al., J. Cell. Biol. 105:3087-3096 (1987)). Other antibody-based methods useful for detecting protein gene expression include immunoassays, such as the enzyme linked immunosorbent assay (ELISA) and the radioimmunoassay (RIA). Suitable antibody assay labels are known in the art and include enzyme labels, such as, glucose oxidase; radioisotopes, such as iodine (¹³¹I, ¹²⁵I, ¹²³I, ¹²¹I), carbon (¹⁴C), sulfur (³⁵S), tritium (³H), indium (^{115m}In, ^{113m}In, ¹¹²In, ¹¹¹In), and technetium (⁹⁹Tc, ^{99m}Tc), thallium (²⁰¹Ti), gallium (⁶⁸Ga, ⁶⁷Ga), palladium (¹⁰³Pd), molybdenum (⁹⁹Mo), xenon (¹³³Xe), fluorine (¹⁸F), ¹⁵³Sm, ¹⁷⁷Lu, ¹⁵⁹Gd, ¹⁴⁹Pm, ¹⁴⁰La, ¹⁷⁵Yb, ¹⁶⁶Ho, ⁹⁰Y, ⁴⁷Sc, ¹⁸⁶Re, ¹⁸⁸Re, ¹⁴²Pr, ¹⁰⁵Rh, ⁹⁷Ru; luminescent labels, such as luminol; and fluorescent labels, such as fluorescein and rhodamine, and biotin.

[0451] In addition to assaying levels of polypeptide of the present invention in a biological sample, proteins can also be detected in vivo by imaging. Antibody labels or markers for in vivo imaging of protein include those detectable by X-radiography, NMR or ESR. For X-radiography, suitable labels include radioisotopes such as barium or cesium, which emit detectable radiation but are not overtly harmful to the subject. Suitable markers for NMR and ESR include those with a detectable characteristic spin, such as deuterium, which may be incorporated into the antibody by labeling of nutrients for the relevant hybridoma.

[0452] A protein-specific antibody or antibody fragment which has been labeled with an appropriate detectable imaging moiety, such as a radioisotope (for example, ¹³¹I, ¹¹²In, ^{99m}Tc, (¹³¹I, ¹²⁵I, ¹²³I, ¹²¹I), carbon (¹⁴C), sulfur (³⁵S), tritium (³H), indium (^{115m}In, ^{113m}In, ¹¹²In, ¹¹¹In), and technetium (⁹⁹Tc, ⁹⁹Tc), thallium (²⁰¹Ti), gallium (⁶⁸Ga, ⁶⁷Ga), palladium (¹⁰³Pd), molybdenum (⁹⁹Mo) xenon (¹³³Xe), fluorine (¹⁸F, ¹⁵³Sm, ¹⁷⁷Lu, ¹⁵⁹Gd, 149 Pm, ¹⁴⁰La, ¹⁷⁵Yb, ¹⁶⁶Ho, ⁹⁰Y, ⁴⁷Sc, ¹⁸⁶Re, ¹⁸⁸Re, ¹⁴²Pr, ¹⁰⁵Rh, ⁹⁷Ru), a radio-opaque substance, or a material detectable by nuclear magnetic resonance, is introduced (for example, parenterally, subcutaneously or intraperitoneally) into the mammal to be examined for immune system disorder. It will be understood in the art that the size of the subject and the imaging system used will determine the quantity of imaging moiety needed to produce diagnostic images. In the case of a radioisotope moiety, for a human subject, the quantity of radioactivity injected will normally range from about 5 to 20 millicuries of ^{99m}Tc. The labeled antibody or antibody fragment will then preferentially accumulate at the location of cells which express the polypeptide encoded by a polynucleotide of the invention. In vivo tumor imaging is described in S. W. Burchiel et al., “Immunopharmacokinetics of Radiolabeled Antibodies and Their Fragments” (Chapter 13 in Tumor Imaging: The Radiochemical Detection of Cancer, S. W. Burchiel and B. A. Rhodes, eds., Masson Publishing Inc. (1982)).

[0453] In one embodiment, the invention provides a method for the specific delivery of compositions of the invention to cells by administering polypeptides of the invention (e.g., polypeptides encoded by polynucleotides of the invention and/or antibodies) that are associated with heterologous polypeptides or nucleic acids. In one example, the invention provides a method for delivering a therapeutic protein into the targeted cell. In another example, the invention provides a method for delivering a single stranded nucleic acid (e.g., antisense or ribozymes) or double stranded nucleic acid (e.g., DNA that can integrate into the cell's genome or replicate episomally and that can be transcribed) into the targeted cell.

[0454] In another embodiment, the invention provides a method for the specific destruction of cells (e.g., the destruction of tumor cells) by administering polypeptides of the invention in association with toxins or cytotoxic prodrugs.

[0455] By “toxin” is meant one or more compounds that bind and activate endogenous cytotoxic effector systems, radioisotopes, holotoxins, modified toxins, catalytic subunits of toxins, or any molecules or enzymes not normally present in or on the surface of a cell that under defined conditions cause the cell's death. Toxins that may be used according to the methods of the invention include, but are not limited to, radioisotopes known in the art, compounds such as, for example, antibodies (or complement fixing containing portions thereof) that bind an inherent or induced endogenous cytotoxic effector system, thymidine kinase, endonuclease, RNAse, alpha toxin, ricin, abrin, Pseudomonasexotoxin A, diphtheria toxin, saporin, momordin, gelonin, pokeweed antiviral protein, alpha-sarcin and cholera toxin. “Toxin” also includes a cytostatic or cytocidal agent, a therapeutic agent or a radioactive metal ion, e.g., alpha-emitters such as, for example, ²¹³Bi, or other radioisotopes such as, for example, ¹⁰³Pd, ¹³³Xe, ¹³¹I, ⁶⁸Ge, ⁵⁷Co, ⁶⁵Zn, ⁸⁵Sr, ³²P, ³⁵S, ⁹⁰Y, ¹⁵³Sm, ¹⁵³Gd, ¹⁶⁹Yb, ⁵¹Cr, ⁵⁴Mn, ⁷⁵Se, ¹¹³Sn, ⁹⁰Yttrium, ¹¹⁷Tin, ¹⁸⁶Rhenium, ¹⁶⁶Holmium, and ⁸⁸Rhenium; luminescent labels, such as luminol; and fluorescent labels, such as fluorescein and rhodamine, and biotin. In a specific embodiment, the invention provides a method for the specific destruction of cells (e.g., the destruction of tumor cells) by administering polypeptides of the invention or antibodies of the invention in association with the radioisotope ⁹⁰Y. In another specific embodiment, the invention provides a method for the specific destruction of cells (e.g., the destruction of tumor cells) by administering polypeptides of the invention or antibodies of the invention in association with the radioisotope ¹¹¹In. In a further specific embodiment, the invention provides a method for the specific destruction of cells (e.g., the destruction of tumor cells) by administering polypeptides of the invention or antibodies of the invention in association with the radioisotope ¹³¹I.

[0456] Techniques known in the art may be applied to label polypeptides of the invention (including antibodies). Such techniques include, but are not limited to, the use of bifunctional conjugating agents (see e.g., U.S. Pat. Nos. 5,756,065; 5,714,631; 5,696,239; 5,652,361; 5,505,931; 5,489,425; 5,435,990; 5,428,139; 5,342,604; 5,274,119; 4,994,560; and 5,808,003; the contents of each of which are hereby incorporated by reference in its entirety).

[0457] Thus, the invention provides a diagnostic method of a disorder, which involves (a) assaying the expression level of a polypeptide of the present invention in cells or body fluid of an individual; and (b) comparing the assayed polypeptide expression level with a standard polypeptide expression level, whereby an increase or decrease in the assayed polypeptide expression level compared to the standard expression level is indicative of a disorder. With respect to cancer, the presence of a relatively high amount of transcript in biopsied tissue from an individual may indicate a predisposition for the development of the disease, or may provide a means for detecting the disease prior to the appearance of actual clinical symptoms. A more definitive diagnosis of this type may allow health professionals to employ preventative measures or aggressive treatment earlier thereby preventing the development or further progression of the cancer.

[0458] Moreover, polypeptides of the present invention can be used to treat or prevent diseases or conditions such as, for example, neural disorders, immune system disorders, muscular disorders, reproductive disorders, gastrointestinal disorders, pulmonary disorders, cardiovascular disorders, renal disorders, proliferative disorders, and/or cancerous diseases and conditions. For example, patients can be administered a polypeptide of the present invention in an effort to replace absent or decreased levels of the polypeptide (e.g., insulin), to supplement absent or decreased levels of a different polypeptide (e.g., hemoglobin S for hemoglobin B, SOD, catalase, DNA repair proteins), to inhibit the activity of a polypeptide (e.g., an oncogene or tumor supressor), to activate the activity of a polypeptide (e.g., by binding to a receptor), to reduce the activity of a membrane bound receptor by competing with it for free ligand (e.g., soluble TNF receptors used in reducing inflammation), or to bring about a desired response (e.g., blood vessel growth inhibition, enhancement of the immune response to proliferative cells or tissues).

[0459] Similarly, antibodies directed to a polypeptide of the present invention can also be used to treat disease (as described supra, and elsewhere herein). For example, administration of an antibody directed to a polypeptide of the present invention can bind, and/or neutralize the polypeptide, and/or reduce overproduction of the polypeptide. Similarly, administration of an antibody can activate the polypeptide, such as by binding to a polypeptide bound to a membrane (receptor).

[0460] At the very least, the polypeptides of the present invention can be used as molecular weight markers on SDS-PAGE gels or on molecular sieve gel filtration columns using methods well known to those of skill in the art. Polypeptides can also be used to raise antibodies, which in turn are used to measure protein expression from a recombinant cell, as a way of assessing transformation of the host cell. Moreover, the polypeptides of the present invention can be used to test the biological activities described herein.

Diagnostic Assays

[0461] The compounds of the present invention are useful for diagnosis, treatment, prevention and/or prognosis of various disorders in mammals, preferably humans. Such disorders include, but are not limited to, those related to biological activities described in Table 1D and, also as described herein under the section heading “Biological Activities”.

[0462] For a number of disorders, substantially altered (increased or decreased) levels of gene expression can be detected in tissues, cells or bodily fluids (e.g., sera, plasma, urine, semen, synovial fluid or spinal fluid) taken from an individual having such a disorder, relative to a “standard” gene expression level, that is, the expression level in tissues or bodily fluids from an individual not having the disorder. Thus, the invention provides a diagnostic method useful during diagnosis of a disorder, which involves measuring the expression level of the gene encoding the polypeptide in tissues, cells or body fluid from an individual and comparing the measured gene expression level with a standard gene expression level, whereby an increase or decrease in the gene expression level(s) compared to the standard is indicative of a disorder. These diagnostic assays may be performed in vivo or in vitro, such as, for example, on blood samples, biopsy tissue or autopsy tissue.

[0463] The present invention is also useful as a prognostic indicator, whereby patients exhibiting enhanced or depressed gene expression will experience a worse clinical outcome relative to patients expressing the gene at a level nearer the standard level.

[0464] In certain embodiments, a polypeptide of the invention, or polynucleotides, antibodies, agonists, or antagonists corresponding to that polypeptide, may be used to diagnose and/or prognosticate diseases and/or disorders associated with the tissue(s) in which the polypeptide of the invention is expressed, including one, two, three, four, five, or more tissues disclosed in Table 1B.2 (Tissue Distribution Library Code).

[0465] By “assaying the expression level of the gene encoding the polypeptide” is intended qualitatively or quantitatively measuring or estimating the level of the polypeptide of the invention or the level of the mRNA encoding the polypeptide of the invention in a first biological sample either directly (e.g., by determining or estimating absolute protein level or mRNA level) or relatively (e.g., by comparing to the polypeptide level or mRNA level in a second biological sample). Preferably, the polypeptide expression level or mRNA level in the first biological sample is measured or estimated and compared to a standard polypeptide level or mRNA level, the standard being taken from a second biological sample obtained from an individual not having the disorder or being determined by averaging levels from a population of individuals not having the disorder. As will be appreciated in the art, once a standard polypeptide level or mRNA level is known, it can be used repeatedly as a standard for comparison.

[0466] By “biological sample” is intended any biological sample obtained from an individual, cell line, tissue culture, or other source containing polypeptides of the invention (including portions thereof) or mRNA. As indicated, biological samples include body fluids (such as sera, plasma, urine, synovial fluid and spinal fluid) and tissue sources found to express the full length or fragments thereof of a polypeptide or mRNA. Methods for obtaining tissue biopsies and body fluids from mamas are well known in the art. Where the biological sample is to include mRNA, a tissue biopsy is the preferred source.

[0467] Total cellular RNA can be isolated from a biological sample using any suitable technique such as the single-step guanidinium-thiocyanate-phenol-chloroform method described in Chomczynski and Sacchi, Anal. Biochem. 162:156-159 (1987). Levels of mRNA encoding the polypeptides of the invention are then assayed using any appropriate method. These include Northern blot analysis, S1 nuclease mapping, the polymerase chain reaction (PCR), reverse transcription in combination with the polymerase chain reaction (RT-PCR), and reverse transcription in combination with the ligase chain reaction (RT-LCR).

[0468] The present invention also relates to diagnostic assays such as quantitative and diagnostic assays for detecting levels of polypeptides of the invention, in a biological sample (e.g., cells and tissues), including determination of normal and abnormal levels of polypeptides. Thus, for instance, a diagnostic assay in accordance with the invention for detecting over-expression of polypeptides of the invention compared to normal control tissue samples may be used to detect the presence of tumors. Assay techniques that can be used to determine levels of a polypeptide, such as a polypeptide of the present invention in a sample derived from a host are well-known to those of skill in the art. Such assay methods include radioimmunoassays, competitive-binding assays, Western Blot analysis and ELISA assays. Assaying polypeptide levels in a biological sample can occur using any art-known method.

[0469] Assaying polypeptide levels in a biological sample can occur using antibody-based techniques. For example, polypeptide expression in tissues can be studied with classical immunohistological methods (Jalkanen et al., J. Cell. Biol. 101:976-985 (1985); Jalkanen, M., et al., J. Cell. Biol. 105:3087-3096 (1987)). Other antibody-based methods useful for detecting polypeptide gene expression include immunoassays, such as the enzyme linked immunosorbent assay (ELISA) and the radioimmunoassay (RIA). Suitable antibody assay labels are known in the art and include enzyme labels, such as, glucose oxidase, and radioisotopes, such as iodine (¹²⁵I, ¹²¹I, carbon (¹⁴C), sulfur (³⁵S), tritium (³H), indium (¹¹²In), and technetium (^{99m}Tc), and fluorescent labels, such as fluorescein and rhodamine, and biotin.

[0470] The tissue or cell type to be analyzed will generally include those which are known, or suspected, to express the gene of interest (such as, for example, cancer). The protein isolation methods employed herein may, for example, be such as those described in Harlow and Lane (Harlow, E. and Lane, D., 1988, “Antibodies: A Laboratory Manual”, Cold Spring Harbor Laboratory Press, Cold Spring Harbor, N.Y.), which is incorporated herein by reference in its entirety. The isolated cells can be derived from cell culture or from a patient. The analysis of cells taken from culture may be a necessary step in the assessment of cells that could be used as part of a cell-based gene therapy technique or, alternatively, to test the effect of compounds on the expression of the gene.

[0471] For example, antibodies, or fragments of antibodies, such as those described herein, may be used to quantitatively or qualitatively detect the presence of gene products or conserved variants or peptide fragments thereof. This can be accomplished, for example, by immunofluorescence techniques employing a fluorescently labeled antibody coupled with light microscopic, flow cytometric, or fluorimetric detection.

[0472] In a preferred embodiment, antibodies, or fragments of antibodies directed to any one or all of the predicted epitope domains of the polypeptides of the invention (shown in Table 1B) may be used to quantitatively or qualitatively detect the presence of gene products or conserved variants or peptide fragments thereof. This can be accomplished, for example, by immunofluorescence techniques employing a fluorescently labeled antibody coupled with light microscopic, flow cytometric, or fluorimetric detection.

[0473] In an additional preferred embodiment, antibodies, or fragments of antibodies directed to a conformational epitope of a polypeptide of the invention may be used to quantitatively or qualitatively detect the presence of gene products or conserved variants or peptide fragments thereof. This can be accomplished, for example, by immunofluorescence techniques employing a fluorescently labeled antibody coupled with light microscopic, flow cytometric, or fluorimetric detection.

[0474] The antibodies (or fragments thereof), and/or polypeptides of the present invention may, additionally, be employed histologically, as in immunofluorescence, immunoelectron microscopy or non-immunological assays, for in situ detection of gene products or conserved variants or peptide fragments thereof. In situ detection may be accomplished by removing a histological specimen from a patient, and applying thereto a labeled antibody or polypeptide of the present invention. The antibody (or fragment thereof) or polypeptide is preferably applied by overlaying the labeled antibody (or fragment) onto a biological sample. Through the use of such a procedure, it is possible to determine not only the presence of the gene product, or conserved variants or peptide fragments, or polypeptide binding, but also its distribution in the examined tissue. Using the present invention, those of ordinary skill will readily perceive that any of a wide variety of histological methods (such as staining procedures) can be modified in order to achieve such in situ detection.

[0475] Immunoassays and non-immunoassays for gene products or conserved variants or peptide fragments thereof will typically comprise incubating a sample, such as a biological fluid, a tissue extract, freshly harvested cells, or lysates of cells which have been incubated in cell culture, in the presence of a detectably labeled antibody capable of binding gene products or conserved variants or peptide fragments thereof, and detecting the bound antibody by any of a number of techniques well-known in the art.

[0476] The biological sample may be brought in contact with and immobilized onto a solid phase support or carrier such as nitrocellulose, or other solid support which is capable of immobilizing cells, cell particles or soluble proteins. The support may then be washed with suitable buffers followed by treatment with the detectably labeled antibody or detectable polypeptide of the invention. The solid phase support may then be washed with the buffer a second time to remove unbound antibody or polypeptide. Optionally the antibody is subsequently labeled. The amount of bound label on solid support may then be detected by conventional means.

[0477] By “solid phase support or carrier” is intended any support capable of binding an antigen or an antibody. Well-known supports or carriers include glass, polystyrene, polypropylene, polyethylene, dextran, nylon, amylases, natural and modified celluloses, polyacrylamides, gabbros, and magnetite. The nature of the carrier can be either soluble to some extent or insoluble for the purposes of the present invention. The support material may have virtually any possible structural configuration so long as the coupled molecule is capable of binding to an antigen or antibody. Thus, the support configuration may be spherical, as in a bead, or cylindrical, as in the inside surface of a test tube, or the external surface of a rod. Alternatively, the surface may be flat such as a sheet, test strip, etc. Preferred supports include polystyrene beads. Those skilled in the art will know many other suitable carriers for binding antibody or antigen, or will be able to ascertain the same by use of routine experimentation.

[0478] The binding activity of a given lot of antibody or antigen polypeptide may be determined according to well known methods. Those skilled in the art will be able to determine operative and optimal assay conditions for each determination by employing routine experimentation.

[0479] In addition to assaying polypeptide levels or polynucleotide levels in a biological sample obtained from an individual, polypeptide or polynucleotide can also be detected in vivo by imaging. For example, in one embodiment of the invention, polypeptides and/or antibodies of the invention are used to image diseased cells, such as neoplasms. In another embodiment, polynucleotides of the invention (e.g., polynucleotides complementary to all or a portion of an mRNA) and/or antibodies (e.g., antibodies directed to any one or a combination of the epitopes of a polypeptide of the invention, antibodies directed to a conformational epitope of a polypeptide of the invention, or antibodies directed to the full length polypeptide expressed on the cell surface of a mammalian cell) are used to image diseased or neoplastic cells.

[0480] Antibody labels or markers for in vivo imaging of polypeptides of the invention include those detectable by X-radiography, NMR, MRI, CAT-scans or ESR. For X-radiography, suitable labels include radioisotopes such as barium or cesium, which emit detectable radiation but are not overtly harmful to the subject. Suitable markers for NMR and ESR include those with a detectable characteristic spin, such as deuterium, which may be incorporated into the antibody by labeling of nutrients for the relevant hybridoma. Where in vivo imaging is used to detect enhanced levels of polypeptides for diagnosis in humans, it may be preferable to use human antibodies or “humanized” chimeric monoclonal antibodies. Such antibodies can be produced using techniques described herein or otherwise known in the art. For example methods for producing chimeric antibodies are known in the art. See, for review, Morrison, Science 229:1202 (1985); Oi et al., BioTechniques 4:214 (1986); Cabilly et al., U.S. Pat. No. 4,816,567; Taniguchi et al., EP 171496; Morrison et al., EP 173494; Neuberger et al., WO 8601533; Robinson et al., WO 8702671; Boulianne et al., Nature 312:643 (1984); Neuberger et al., Nature 314:268 (1985).

[0481] Additionally, any polypeptides of the invention whose presence can be detected, can be administered. For example, polypeptides of the invention labeled with a radio-opaque or other appropriate compound can be administered and visualized in vivo, as discussed, above for labeled antibodies. Further, such polypeptides can be utilized for in vitro diagnostic procedures.

[0482] A polypeptide-specific antibody or antibody fragment which has been labeled with an appropriate detectable imaging moiety, such as a radioisotope (for example, ¹³¹I, ¹¹²In, ^{99m}Tc), a radio-opaque substance, or a material detectable by nuclear magnetic resonance, is introduced (for example, parenterally, subcutaneously or intraperitoneally) into the mammal to be examined for a disorder. It will be understood in the art that the size of the subject and the imaging system used will determine the quantity of imaging moiety needed to produce diagnostic images. In the case of a radioisotope moiety, for a human subject, the quantity of radioactivity injected will normally range from about 5 to 20 millicuries of ^{99m}Tc. The labeled antibody or antibody fragment will then preferentially accumulate at the location of cells which contain the antigenic protein. In vivo tumor imaging is described in S. W. Burchiel et al., “Immunopharmacokinetics of Radiolabeled Antibodies and Their Fragments” (Chapter 13 in Tumor Imaging: The Radiochemical Detection of Cancer, S. W. Burchiel and B. A. Rhodes, eds., Masson Publishing Inc. (1982)).

[0483] With respect to antibodies, one of the ways in which an antibody of the present invention can be detectably labeled is by linking the same to a reporter enzyme and using the linked product in an enzyme immunoassay (EIA) (Voller, A., “The Enzyme Linked Immunosorbent Assay (ELISA)”, 1978, Diagnostic Horizons 2:1-7, Microbiological Associates Quarterly Publication, Walkersville, Md.); Voller et al., J. Clin. Pathol. 31:507-520 (1978); Butler, J. E., Meth Enzymol. 73:482-523 (1981); Maggio, E. (ed.), 1980, Enzyme Immunoassay, CRC Press, Boca Raton, Fla.,; Ishikawa, E. et al., (eds.), 1981, Enzyme Immunoassay, Kgaku Shoin, Tokyo). The reporter enzyme which is bound to the antibody will react with an appropriate substrate, preferably a chromogenic substrate, in such a manner as to produce a chemical moiety which can be detected, for example, by spectrophotometric, fluorimetric or by visual means. Reporter enzymes which can be used to detectably label the antibody include, but are not limited to, malate dehydrogenase, staphylococcal nuclease, delta-5-steroid isomerase, yeast alcohol dehydrogenase, alpha-glycerophosphate, dehydrogenase, triose phosphate isomerase, horseradish peroxidase, alkaline phosphatase, asparaginase, glucose oxidase, beta-galactosidase, ribonuclease, urease, catalase, glucose-6-phosphate dehydrogenase, glucoamylase and acetylcholinesterase. Additionally, the detection can be accomplished by colorimetric methods which employ a chromogenic substrate for the reporter enzyme. Detection may also be accomplished by visual comparison of the extent of enzymatic reaction of a substrate in comparison with similarly prepared standards.

[0484] Detection may also be accomplished using any of a variety of other immunoassays. For example, by radioactively labeling the antibodies or antibody fragments, it is possible to detect polypeptides through the use of a radioimmunoassay (RIA) (see, for example, Weintraub, B., Principles of Radioimmunoassays, Seventh Training Course on Radioligand Assay Techniques, The Endocrine Society, March, 1986, which is incorporated by reference herein). The radioactive isotope can be detected by means including, but not limited to, a gamma counter, a scintillation counter, or autoradiography.

[0485] It is also possible to label the antibody with a fluorescent compound. When the fluorescently labeled antibody is exposed to light of the proper wave length, its presence can then be detected due to fluorescence. Among the most commonly used fluorescent labeling compounds are fluorescein isothiocyanate, rhodamine, phycoerythrin, phycocyanin, allophycocyanin, ophthaldehyde and fluorescamine.

[0486] The antibody can also be detectably labeled using fluorescence emitting metals such as ¹⁵²Eu, or others of the lanthanide series. These metals can be attached to the antibody using such metal chelating groups as diethylenetriaminepentacetic acid (DTPA) or ethylenediaminetetraacetic acid (EDTA).

[0487] The antibody also can be detectably labeled by coupling it to a chemiluminescent compound. The presence of the chemiluminescent-tagged antibody is then determined by detecting the presence of luminescence that arises during the course of a chemical reaction. Examples of particularly useful chemiluminescent labeling compounds are luminol, isoluminol, theromatic acridinium ester, imidazole, acridinium salt and oxalate ester.

[0488] Likewise, a bioluminescent compound may be used to label the antibody of the present invention. Bioluminescence is a type of chemiluminescence found in biological systems in, which a catalytic protein increases the efficiency of the chemiluminescent reaction. The presence of a bioluminescent protein is determined by detecting the presence of luminescence. Important bioluminescent compounds for purposes of labeling are luciferin, luciferase and aequorin.

Methods for Detecting Diseases

[0489] In general, a disease may be detected in a patient based on the presence of one or more proteins of the invention and/or polynucleotides encoding such proteins in a biological sample (for example, blood, sera, urine, and/or tumor biopsies) obtained from the patient. In other words, such proteins may be used as markers to indicate the presence or absence of a disease or disorder, including cancer and/or as described elsewhere herein. In addition, such proteins may be useful for the detection of other diseases and cancers. The binding agents provided herein generally permit detection of the level of antigen that binds to the agent in the biological sample. Polynucleotide primers and probes may be used to detect the level of mRNA encoding polypeptides of the invention, which is also indicative of the presence or absence of a disease or disorder, including cancer. In general, polypeptides of the invention should be present at a level that is at least three fold higher in diseased tissue than in normal tissue.

[0490] There are a variety of assay formats known to those of ordinary skill in the art for using a binding agent to detect polypeptide markers in a sample. See, e.g., Harlow and Lane, supra. In general, the presence or absence of a disease in a patient may be determined by (a) contacting a biological sample obtained from a patient with a binding agent; (b) detecting in the sample a level of polypeptide that binds to the binding agent; and (c) comparing the level of polypeptide with a predetermined cut-off value.

[0491] In a preferred embodiment, the assay involves the use of a binding agent(s) immobilized on a solid support to bind to and remove the polypeptide of the invention from the remainder of the sample. The bound polypeptide may then be detected using a detection reagent that contains a reporter group and specifically binds to the binding agent/polypeptide complex. Such detection reagents may comprise, for example, a binding agent that specifically binds to the polypeptide or an antibody or other agent that specifically binds to the binding agent, such as an anti-immunoglobulin, protein G, protein A or a lectin. Alternatively, a competitive assay may be utilized, in which a polypeptide is labeled with a reporter group and allowed to bind to the immobilized binding agent after incubation of the binding agent with the sample. The extent to which components of the sample inhibit the binding of the labeled polypeptide to the binding agent is indicative of the reactivity of the sample with the immobilized binding agent. Suitable polypeptides for use within such assays include polypeptides of the invention and portions thereof, or antibodies, to which the binding agent binds, as described above.

[0492] The solid support may be any material known to those of skill in the art to which polypeptides of the invention may be attached. For example, the solid support may be a test well in a microtiter plate or a nitrocellulose or other suitable membrane. Alternatively, the support may be a bead or disc, such as glass fiberglass, latex or a plastic material such as polystyrene or polyvinylchloride. The support may also be a magnetic particle or a fiber optic sensor, such as those disclosed, for example, in U.S. Pat. No. 5,359,681. The binding agent may be immobilized on the solid support using a variety of techniques known to those of skill in the art, which are amply described in the patent and scientific literature. In the context of the present invention, the term “immobilization” refers to both noncovalent association, such as adsorption, and covalent attachment (which may be a direct linkage between the agent and functional groups on the support or may be a linkage by way of a cross-linking agent). Immobilization by adsorption to a well in a microtiter plate or to a membrane is preferred. In such cases, adsorption may be achieved by contacting the binding agent, in a suitable buffer, with the solid support for the suitable amount of tine. The contact time varies with temperature, but is typically between about 1 hour and about 1 day. In general, contacting a well of plastic microtiter plate (such as polystyrene or polyvinylchloride) with an amount of binding agent ranging from about 10 ng to about 10 ug, and preferably about 100 ng to about 1 ug, is sufficient to immobilize an adequate amount of binding agent.

[0493] Covalent attachment of binding agent to a solid support may generally be achieved by first reacting the support with a bifunctional reagent that will react with both the support and a functional group, such as a hydroxyl or amino group, on the binding agent. For example, the binding agent may be covalently attached to supports having an appropriate polymer coating using benzoquinone or by condensation of an aldehyde group on the support with an amine and an active hydrogen on the binding partner (see, e.g., Pierce Immunotechnology Catalog and Handbook, 1991, at A12-A13).

Gene Therapy Methods

[0494] Also encompassed by the invention are gene therapy methods for treating or preventing disorders, diseases and conditions. The gene therapy methods relate to the introduction of nucleic acid (DNA, RNA and antisense DNA or RNA) sequences into an animal to achieve expression of the polypeptide of the present invention. This method requires a polynucleotide which codes for a polypeptide of the present invention operatively linked to a promoter and any other genetic elements necessary for the expression of the polypeptide by the target tissue. Such gene therapy and delivery techniques are known in the art, see, for example, WO90/11092, which is herein incorporated by reference.

[0495] Thus, for example, cells from a patient may be engineered with a polynucleotide (DNA or RNA) comprising a promoter operably linked to a polynucleotide of the present invention ex vivo, with the engineered cells then being provided to a patient to be treated with the polypeptide of the present invention. Such methods are well-known in the art. For example, see Belldegrun, A., et al., J. Natl. Cancer Inst. 85: 207-216 (1993); Ferrantini, M. et al., Cancer Research 53: 1107-1112 (1993); Ferrantini, M. et al., J. Immunology 153: 4604-4615 (1994); Kaido, T., et al., Int. J. Cancer 60: 221-229 (1995); Ogura, H., et al., Cancer Research 50: 5102-5106 (1990); Santodonato, L., et al., Human Gene Therapy 7:1-10 (1996); Santodonato, L., et al., Gene Therapy 4:1246-1255 (1997); and Zhang, J.-F. et al., Cancer Gene Therapy 3: 31-38 (1996)), which are herein incorporated by reference. In one embodiment, the cells which are engineered are arterial cells. The arterial cells may be reintroduced into the patient through direct injection to the artery, the tissues surrounding the artery, or through catheter injection.

[0496] As discussed in more detail below, the polynucleotide constructs can be delivered by any method that delivers injectable materials to the cells of an animal, such as, injection into the interstitial space of tissues (heart, muscle, skin, lung, liver, and the like). The polynucleotide constructs may be delivered in a pharmaceutically acceptable liquid or aqueous carrier.

[0497] In one embodiment, the polynucleotide of the present invention is delivered as a naked polynucleotide. The term “naked” polynucleotide, DNA or RNA refers to sequences that are free from any delivery vehicle that acts to assist, promote or facilitate entry into the cell, including viral sequences, viral particles, liposome formulations, lipofectin or precipitating agents and the like. However, the polynucleotide of the present invention can also be delivered in liposome formulations and lipofectin formulations and the like can be prepared by methods well known to those skilled in the art. Such methods are described, for example, in U.S. Pat. Nos. 5,593,972, 5,589,466, and 5,580,859, which are herein incorporated by reference.

[0498] The polynucleotide vector constructs used in the gene therapy method are preferably constructs that will not integrate into the host genome nor will they contain sequences that allow for replication. Appropriate vectors include p 0, pSV2CAT, pOG44, pXT1 and pSG available from Stratagene; pSVK3, pBPV, pMSG and pSVL available from Pharmacia; and pEF1/V5, pcDNA3.1, and pRc/CMV2 available from Invitrogen. Other suitable vectors will be readily apparent to the skilled artisan.

[0499] Any strong promoter known to those skilled in the art can be used for driving the expression of the polynucleotide sequence. Suitable promoters include adenoviral promoters, such as the adenoviral major late promoter; or heterologous promoters, such as the cytomegalovirus (CMV) promoter; the respiratory syncytial virus (RSV) promoter; inducible promoters, such as the MMT promoter, the metallothionein promoter; heat shock promoters; the albumin promoter; the ApoAI promoter; human globin promoters; viral thymidine kinase promoters, such as the Herpes Simplex thymidine kinase promoter; retroviral LTRs; the b-actin promoter; and human growth hormone promoters. The promoter also may be the native promoter for the polynucleotide of the present invention.

[0500] Unlike other gene therapy techniques, one major advantage of introducing naked nucleic acid sequences into target cells is the transitory nature of the polynucleotide synthesis in the cells. Studies have shown that non-replicating DNA sequences can be introduced into cells to provide production of the desired polypeptide for periods of up to six months.

[0501] The polynucleotide construct can be delivered to the interstitial space of tissues within the an animal, including of muscle, skin, brain, lung, liver, spleen, bone marrow, thymus, heart, lymph, blood, bone, cartilage, pancreas, kidney, gall bladder, stomach, intestine, testis, ovary, uterus, rectum, nervous system, eye, gland, and connective tissue. Interstitial space of the tissues comprises the intercellular, fluid, mucopolysaccharide matrix among the reticular fibers of organ tissues, elastic fibers in the walls of vessels or chambers, collagen fibers of fibrous tissues, or that same matrix within connective tissue ensheathing muscle cells or in the lacunae of bone. It is similarly the space occupied by the plasma of the circulation and the lymph fluid of the lymphatic channels. Delivery to the interstitial space of muscle tissue is preferred for the reasons discussed below. They may be conveniently delivered by injection into the tissues comprising these cells. They are preferably delivered to and expressed in persistent, non-dividing cells which are differentiated, although delivery and expression may be achieved in non-differentiated or less completely differentiated cells, such as, for example, stem cells of blood or skin fibroblasts. In vivo muscle cells are particularly competent in their ability to take up and express polynucleotides.

[0502] For the naked nucleic acid sequence injection, an effective dosage amount of DNA or RNA will be in the range of from about 0.05 mg/kg body weight to about 50 mg/kg body weight. Preferably the dosage will be from about 0.005 mg/kg to about 20 mg/kg and more preferably from about 0.05 mg/kg to about 5 mg/kg. Of course, as the artisan of ordinary skill will appreciate, this dosage will vary according to the tissue site of injection. The appropriate and effective dosage of nucleic acid sequence can readily be determined by those of ordinary skill in the art and may depend on the condition being treated and the route of administration.

[0503] The preferred route of administration is by the parenteral route of injection into the interstitial space of tissues. However, other parenteral routes may also be used, such as, inhalation of an aerosol formulation particularly for delivery to lungs or bronchial tissues, throat or mucous membranes of the nose. In addition, naked DNA constructs can be delivered to arteries during angioplasty by the catheter used in the procedure.

[0504] The naked polynucleotides are delivered by any method known in the art, including, but not limited to, direct needle injection at the delivery site, intravenous injection, topical administration, catheter infusion, and so-called “gene guns”. These delivery methods are known in the art.

[0505] The constructs may also be delivered with delivery vehicles such as viral sequences, viral particles, liposome formulations, lipofectin, precipitating agents, etc. Such methods of delivery are known in the art.

[0506] In certain embodiments, the polynucleotide constructs are complexed in a liposome preparation. Liposomal preparations for use in the instant invention include cationic (positively charged), anionic (negatively charged) and neutral preparations. However, cationic liposomes are particularly preferred because a tight charge complex can be formed between the cationic liposome and the polyanionic nucleic acid. Cationic liposomes have been shown to mediate intracellular delivery of plasmid DNA (Felgner et al., Proc. Natl. Acad. Sci. USA (1987) 84:7413-7416, which is herein incorporated by reference); mRNA (Malone et al., Proc. Natl. Acad. Sci. USA (1989) 86:6077-6081, which is herein incorporated by reference); and purified transcription factors (Debs et al., J. Biol. Chem. (1990) 265:10189-10192, which is herein incorporated by reference), in functional form.

[0507] Cationic liposomes are readily available. For example, N[1-2,3-dioleyloxy)propyl]-N,N,N-triethylammonium (DOTMA) liposomes are particularly useful and are available under the trademark Lipofectin, from GIBCO BRL, Grand Island, N.Y. (See, also, Felgner et al., Proc. Natl. Acad. Sci. USA (1987) 84:7413-7416, which is herein incorporated by reference). Other commercially available liposomes include transfectace (DDAB/DOPE) and DOTAP/DOPE (Boehringer).

[0508] Other cationic liposomes can be prepared from readily available materials using techniques well known in the art. See, e.g. PCT Publication No. WO 90/11092 (which is herein incorporated by reference) for a description of the synthesis of DOTAP (1,2-bis(oleoyloxy)-3-(trirethylammonio)propane) liposomes. Preparation of DOTMA liposomes is explained in the literature, see, e.g., P. Felgner et al., Proc. Natl. Acad. Sci. USA 84:7413-7417, which is herein incorporated by reference. Similar methods can be used to prepare liposomes from other cationic lipid materials.

[0509] Similarly, anionic and neutral liposomes are readily available, such as from Avanti Polar Lipids (Birmingham, Ala.), or can be easily prepared using readily available materials. Such materials include phosphatidyl, choline, cholesterol, phosphatidyl ethanolamine, dioleoylphosphatidyl choline (DOPC), dioleoylphosphatidyl glycerol (DOPG), dioleoylphoshatidyl ethanolamine (DOPE), among others. These materials can also be mixed with the DOTMA and DOTAP starting materials in appropriate ratios. Methods for making liposomes using these materials are well known in the art.

[0510] For example, commercially dioleoylphosphatidyl choline (DOPC), dioleoylphosphatidyl glycerol (DOPG), and dioleoylphosphatidyl ethanolamine (DOPE) can be used in various combinations to make conventional liposomes, with or without the addition of cholesterol. Thus, for example, DOPG/DOPC vesicles can be prepared by drying 50 mg each of DOPG and DOPC under a stream of nitrogen gas into a sonication vial. The sample is placed under a vacuum pump overnight and is hydrated the following day with deionized water. The sample is then sonicated for 2 hours in a capped vial, using a Heat Systems model 350 sonicator equipped with an inverted cup (bath type) probe at the maximum setting while the bath is circulated at 15 EC. Alternatively, negatively charged vesicles can be prepared without sonication to produce multilamellar vesicles or by extrusion through nucleopore membranes to produce unilamellar vesicles of discrete size. Other methods are known and available to those of skill in the art.

[0511] The liposomes can comprise multilamellar vesicles (MLVs), small unilamellar vesicles (SUVs), or large unilamellar vesicles (LUVs), with SUVs being preferred. The various liposome-nucleic acid complexes are prepared using methods well known in the art. See, e.g., Straubinger et al., Methods of Immunology (1983), 101:512-527, which is herein incorporated by reference. For example, MLVs containing nucleic acid can be prepared by depositing a thin film of phospholipid on the walls of a glass tube and subsequently hydrating with a solution of the material to be encapsulated. SUVs are prepared by extended sonication of MLVs to produce a homogeneous population of unilamellar liposomes. The material to be entrapped is added to a suspension of preformed MLVs and then sonicated. When using liposomes containing cationic lipids, the dried lipid film is resuspended in an appropriate solution such as sterile water or an isotonic buffer solution such as 10 mM Tris/NaCl, sonicated, and then the preformed liposomes are mixed directly with the DNA. The liposome and DNA form a very stable complex due to binding of the positively charged liposomes to the cationic DNA. SUVs find use with small nucleic acid fragments. LUVs are prepared by a number of methods, well known in the art. Commonly used methods include Ca²⁺-EDTA chelation (Papahadjopoulos et al., Biochim Biophys. Acta (1975) 394:483; Wilson et al., Cell 17:77 (1979)); ether injection (Deamer, D. and Bangham, A., Biochim. Biophys. Acta 443:629 (1976); Ostro et al., Biochem. Biophys. Res. Commun. 76:836 (1977); Fraley et al., Proc. Natl. Acad. Sci. USA 76:3348 (1979)); detergent dialysis (Enoch, H. and Strittmatter, P., Proc. Natl. Acad. Sci. USA 76:145 (1979)); and reverse-phase evaporation (REV) (Fraley et al., J. Biol. Chem. 255:10431 (1980); Szoka, F. and Papahadjopoulos, D., Proc. Natl. Acad. Sci. USA 75:145 (1978); Schaefer-Ridder et al., Science 215:166 (1982)), which are herein incorporated by reference.

[0512] Generally, the ratio of DNA to liposomes will be from about 10:1 to about 1:10. Preferably, the ration will be from about 5:1 to about 1:5. More preferably, the ration will be about 3:1 to about 1:3. Still more preferably, the ratio will be about 1:1.

[0513] U.S. Pat. No. 5,676,954 (which is herein incorporated by reference) reports on the injection of genetic material, complexed with cationic liposomes carriers, into mice. U.S. Pat. Nos. 4,897,355, 4,946,787, 5,049,386, 5,459,127, 5,589,466, 5,693,622, 5,580,859, 5,703,055, and international publication no. WO 94/9469 (which are herein incorporated by reference) provide cationic lipids for use in transfecting DNA into cells and mammals. U.S. Pat. Nos. 5,589,466, 5,693,622, 5,580,859, 5,703,055, and international publication no. WO 94/9469 provide methods for delivering DNA-cationic lipid complexes to mammals.

[0514] In certain embodiments, cells are engineered, ex vivo or in vivo, using a retroviral particle containing RNA which comprises a sequence encoding a polypeptide of the present invention. Retroviruses from which the retroviral plasmid vectors may be derived include, but are not limited to, Moloney Murine Leukemia Virus, spleen necrosis virus, Rous sarcoma Virus, Harvey Sarcoma Virus, avian leukosis virus, gibbon ape leukemia virus, human immunodeficiency virus, Myeloproliferative Sarcoma Virus, and mammary tumor virus.

[0515] The retroviral plasmid vector is employed to transduce packaging cell lines to form producer cell lines. Examples of packaging cells which may be transfected include, but are not limited to, the PE501, PA317, R-2, R-AM, PA12, T19-14×, VT-19-17-H2, RCRE, RCRIP, GP+E-86, GP+envAm12, and DAN cell lines as described in Miller, Human Gene Therapy 1:5-14 (1990), which is incorporated herein by reference in its entirety. The vector may transduce the packaging cells through any means known in the art. Such means include, but are not limited to, electroporation, the use of liposomes, and CaPO₄ precipitation. In one alternative, the retroviral plasmid vector may be encapsulated into a liposome, or coupled to a lipid, and then administered to a host.

[0516] The producer cell line generates infectious retroviral vector particles which include polynucleotide encoding a polypeptide of the present invention. Such retroviral vector particles then may be employed, to transduce eukaryotic cells, either in vitro or in vivo. The transduced eukaryotic cells will express a polypeptide of the present invention.

[0517] In certain other embodiments, cells are engineered, ex vivo or in vivo, with polynucleotide contained in an adenovirus vector. Adenovirus can be manipulated such that it encodes and expresses a polypeptide of the present invention, and at the same time is inactivated in terms of its ability to replicate in a normal lytic viral life cycle. Adenovirus expression is achieved without integration of the viral DNA into the host cell chromosome, thereby alleviating concerns about insertional mutagenesis. Furthermore, adenoviruses have been used as live enteric vaccines for many years with an excellent safety profile (Schwartz et al. Am. Rev. Respir. Dis.109:233-238 (1974)). Finally, adenovirus mediated gene transfer has been demonstrated in a number of instances including transfer of alpha-1-antitrypsin and CFTR to the lungs of cotton rats (Rosenfeld, M. A. et al. (1991) Science 252:431-434; Rosenfeld et al., (1992) Cell 68:143-155). Furthermore, extensive studies to attempt to establish adenovirus as a causative agent in human cancer were uniformly negative (Green, M. et al. (1979) Proc. Natl. Acad. Sci. USA 76:6606).

[0518] Suitable adenoviral vectors useful in the present invention are described, for example, in Kozarsky and Wilson, Curr. Opin. Genet. Devel. 3:499-503 (1993); Rosenfeld et al., Cell 68:143-155 (1992); Engelhardt et al., Human Genet. Ther. 4:759-769 (1993); Yang et al., Nature Genet. 7:362-369 (1994); Wilson et al., Nature 365:691-692 (1993); and U.S. Pat. No. 5,652,224, which are herein incorporated by reference. For example, the adenovirus vector Ad2 is useful and can be grown in human 293 cells. These cells contain the E1 region of adenovirus and constitutively express E1a and E1b, which complement the defective adenoviruses by providing the products of the genes deleted from the vector. In addition to Ad2, other varieties of adenovirus (e.g., Ad3, Ad5, and Ad7) are also useful in the present invention.

[0519] Preferably, the adenoviruses used in the present invention are replication deficient. Replication deficient adenoviruses require the aid of a helper virus and/or packaging cell line to form infectious particles. The resulting virus is capable of infecting cells and can express a polynucleotide of interest which is operably linked to a promoter, but cannot replicate in most cells. Replication deficient adenoviruses may be deleted in one or more of all or a portion of the following genes: E1a, E1b, E3, E4, E2a, or L1 through L5.

[0520] In certain other embodiments, the cells are engineered, ex vivo or in vivo, using an adeno-associated virus (AAV). AAVs are naturally occurring defective viruses that require helper viruses to produce infectious particles (Muzyczka, N., Curr. Topics in Microbiol. Immunol. 158:97 (1992)). It is also one of the few viruses that may integrate its DNA into non-dividing cells. Vectors containing as little as 300 base pairs of AAV can be packaged and can integrate, but space for exogenous DNA is limited to about 4.5 kb. Methods for producing and using such AAVs are known in the art. See, for example, U.S. Pat. Nos. 5,139,941, 5,173,414, 5,354,678, 5,436,146, 5,474,935, 5,478,745, and 5,589,377.

[0521] For example, an appropriate AAV vector for use in the present invention will include all the sequences necessary for DNA replication, encapsidation, and host-cell integration. The polynucleotide construct is inserted into the AAV vector using standard cloning methods, such as those found in Sambrook et al., Molecular Cloning: A Laboratory Manual, Cold Spring Harbor Press (1989). The recombinant AAV vector is then transfected into packaging cells which are infected with a helper virus, using any standard technique, including lipofection, electroporation, calcium phosphate precipitation, etc. Appropriate helper viruses include adenoviruses, cytomegaloviruses, vaccinia viruses, or herpes viruses. Once the packaging cells are transfected and infected, they will produce infectious AAV viral particles which contain the polynucleotide construct. These viral particles are then used to transduce eukaryotic cells, either ex vivo or in vivo. The transduced cells will contain the polynucleotide construct integrated into its genome, and will express a polypeptide of the invention.

[0522] Another method of gene therapy involves operably associating heterologous control regions and endogenous polynucleotide sequences (e.g. encoding a polypeptide of the present invention) via homologous recombination (see, e.g., U.S. Pat. No. 5,641,670, issued Jun. 24, 1997; International Publication No. WO 96/29411, published Sep. 26, 1996; International Publication No. WO 94/12650, published Aug. 4, 1994; Koller et al., Proc. Natl. Acad. Sci. USA 86:8932-8935 (1989); and Zijlstra et al., Nature 342:435-438 (1989), which are herein encorporated by reference. This method involves the activation of a gene which is present in the target cells, but which is not normally expressed in the cells, or is expressed at a lower level than desired.

[0523] Polynucleotide constructs are made, using standard techniques known in the art, which contain the promoter with targeting sequences flanking the promoter. Suitable promoters are described herein. The targeting sequence is sufficiently complementary to an endogenous sequence to permit homologous recombination of the promoter-targeting sequence with the endogenous sequence. The targeting sequence will be sufficiently near the 5′ end of the desired endogenous polynucleotide sequence so the promoter will be operably linked to the endogenous sequence upon homologous recombination.

[0524] The promoter and the targeting sequences can be amplified using PCR. Preferably, the amplified promoter contains distinct restriction enzyme sites on the 5′ and 3′ ends. Preferably, the 3′ end of the first targeting sequence contains the same restriction enzyme site as the 5′ end of the amplified promoter and the 5′ end of the second targeting sequence contains the same restriction site as the 3′ end of the amplified promoter. The amplified promoter and targeting sequences are digested and ligated together.

[0525] The promoter-targeting sequence construct is delivered to the cells, either as naked polynucleotide, or in conjunction with transfection-facilitating agents, such as liposomes, viral sequences, viral particles, whole viruses, lipofection, precipitating agents, etc., described in more detail above. The P promoter-targeting sequence can be delivered by any method, included direct needle injection, intravenous injection, topical administration, catheter infusion, particle accelerators, etc. The methods are described in more detail below.

[0526] The promoter-targeting sequence construct is taken up by cells. Homologous recombination between the construct and the endogenous sequence takes place, such that an endogenous sequence is placed under the control of the promoter. The promoter then drives the expression of the endogenous sequence.

[0527] The polynucleotide encoding a polypeptide of the present invention may contain a secretory signal sequence that facilitates secretion of the protein. Typically, the signal sequence is positioned in the coding region of the polynucleotide to be expressed towards or at the 5′ end of the coding region. The signal sequence may be homologous or heterologous to the polynucleotide of interest and may be homologous or heterologous to the cells to be transfected. Additionally, the signal sequence may be chemically synthesized using methods known in the art.

[0528] Any mode of administration of any of the above-described polynucleotides constructs can be used so long as the mode results in the expression of one or more molecules in an amount sufficient to provide a therapeutic effect. This includes direct needle injection, systemic injection, catheter infusion, biolistic injectors, particle accelerators (i.e., “gene guns”), gelfoam sponge depots, other commercially available depot materials, osmotic pumps (e.g., Alza minipumps), oral or suppositorial solid (tablet or pill) pharmaceutical formulations, and decanting or topical applications during surgery. For example, direct injection of naked calcium phosphate-precipitated plasmid into rat liver and rat spleen or a protein-coated plasmid into the portal vein has resulted in gene expression of the foreign gene in the rat livers (Kaneda et al., Science 243:375 (1989)).

[0529] A preferred method of local administration is by direct injection. Preferably, a recombinant molecule of the present invention complexed with a delivery vehicle is administered by direct injection into or locally within the area of arteries. Administration of a composition locally within the area of arteries refers to injecting the composition centimeters and preferably, millimeters within arteries.

[0530] Another method of local administration is to contact a polynucleotide construct of the present invention in or around a surgical wound. For example, a patient can undergo surgery and the polynucleotide construct can be coated on the surface of tissue inside the wound or the construct can be injected into areas of tissue inside the wound.

[0531] Therapeutic compositions useful in systemic administration, include recombinant molecules of the present invention complexed to a targeted delivery vehicle of the present invention. Suitable delivery vehicles for use with systemic administration comprise liposomes comprising ligands for targeting the vehicle to a particular site. In specific embodiments, suitable delivery vehicles for use with systemic administration comprise liposomes comprising polypeptides of the invention for targeting the vehicle to a particular site.

[0532] Preferred methods of systemic administration, include intravenous injection, aerosol, oral and percutaneous (topical) delivery. Intravenous injections can be performed using methods standard in the art. Aerosol delivery can also be performed using methods standard in the art (see, for example, Stribling et al., Proc. Natl. Acad. Sci. USA 189:11277-11281, 1992, which is incorporated herein by reference). Oral delivery can be performed by complexing a polynucleotide construct of the present invention to a carrier capable of withstanding degradation by digestive enzymes in the gut of an animal. Examples of such carriers, include plastic capsules or tablets, such as those known in the art. Topical delivery can be performed by mixing a polynucleotide construct of the present invention with a lipophilic reagent (e.g., DMSO) that is capable of passing into the skin.

[0533] Determining an effective amount of substance to be delivered can depend upon a number of factors including, for example, the chemical structure and biological activity of the substance, the age and weight of the animal, the precise condition requiring treatment and its severity, and the route of administration. The frequency of treatments depends upon a number of factors, such as the amount of polynucleotide constructs administered per dose, as well as the health and history of the subject. The precise amount, number of doses, and timing of doses will be determined by the attending physician or veterinarian.

[0534] Therapeutic compositions of the present invention can be administered to any animal, preferably to mammals and birds. Preferred mammals include humans, dogs, cats, mice, rats, rabbits sheep, cattle, horses and pigs, with humans being particularly preferred.

Biological Activities

[0535] Polynucleotides or polypeptides, or agonists or antagonists of the present invention, can be used in assays to test for one or more biological activities. If these polynucleotides or polypeptides, or agonists or antagonists of the present invention, do exhibit activity in a particular assay, it is likely that these molecules may be involved in the diseases associated with the biological activity. Thus, the polynucleotides and polypeptides, and agonists or antagonists could be used to treat the associated disease.

[0536] Members of the secreted family of proteins are believed to be involved in biological activities associated with, for example, cellular signaling. Accordingly, compositions of the invention (including polynucleotides, polypeptides and antibodies of the invention, and fragments and variants thereof) may be used in diagnosis, prognosis, prevention and/or treatment of diseases and/or disorders associated with aberrant activity of secreted polypeptides.

[0537] In preferred embodiments, compositions of the invention (including polynucleotides, polypeptides and antibodies of the invention, and fragments and variants thereof) may be used in the diagnosis, prognosis, prevention, treatment, and/or amelioration of diseases and/or disorders relating to the cardiovascular system (e.g., atherosclerosis, stroke, myocardial infarction, hypertension, and as described in the “Cardiovascular Disorders” section below).

[0538] In certain embodiments, a polypeptide of the invention, or polynucleotides, antibodies, agonists, or antagonists corresponding to that polypeptide, may be used to diagnose and/or prognosticate diseases and/or disorders associated with the tissue(s) in which the polypeptide of the invention is expressed including one, two, three, four, five, or more tissues disclosed in Table 1B.2 (Tissue Distribution Library Code).

[0539] Thus, polynucleotides, translation products and antibodies of the invention are useful in the diagnosis, detection, prevention, prognistication, and/or treatment of diseases and/or disorders associated with activities that include, but are not limited to, prohormone activation, neurotransmitter activity, cellular signaling, cellular proliferation, cellular differentiation, and cell migration.

[0540] More generally, polynucleotides, translation products and antibodies corresponding to this gene may be useful for the diagnosis, prognosis, prevention, treatment and/or amelioration of diseases and/or disorders associated with the following system or systems.

Cardiovascular Disorders

[0541] Polynucleotides or polypeptides, or agonists or antagonists of the present invention, may be used to detect, prevent, diagnose, prognosticate, treat, and/or ameliorate cardiovascular diseases and disorders, including, but not limited to, peripheral artery disease, such as limb ischemia.

[0542] Cardiovascular disorders include, but are not limited to, cardiovascular abnormalities, such as arterio-arterial fistula, arteriovenous fistula, cerebral arteriovenous malformations, congenital heart defects, pulmonary atresia, and Scimitar Syndrome. Congenital heart defects include, but are not limited to, aortic coarctation, cor triatriatum, coronary vessel anomalies, crisscross heart, dextrocardia, patent ductus arteriosus, Ebstein's anomaly, Eisenmenger complex, hypoplastic left heart syndrome, levocardia, tetralogy of fallot, transposition of great vessels, double outlet right ventricle, tricuspid atresia, persistent truncus arteriosus, and heart septal defects, such as aortopulmonary septal defect, endocardial cushion defects, Lutembacher's Syndrome, trilogy of Fallot, ventricular heart septal defects.

[0543] Cardiovascular disorders also include, but are not limited to, heart disease, such as arrhythmias, carcinoid heart disease, high cardiac output, low cardiac output, cardiac tamponade, endocarditis (including bacterial), heart aneurysm, cardiac arrest, congestive heart failure, congestive cardiomyopathy, paroxysmal dyspnea, cardiac edema, heart hypertrophy, congestive cardiomyopathy, left ventricular hypertrophy, right ventricular hypertrophy, post-infarction heart rupture, ventricular septal rupture, heart valve diseases, myocardial diseases, myocardial ischemia, pericardial effusion, pericarditis (including constrictive and tuberculous), pneumopericardium, postpericardiotomy syndrome, pulmonary heart disease, rheumatic heart disease, ventricular dysfunction, hyperemia, cardiovascular pregnancy complications, Scimitar Syndrome, cardiovascular syphilis, and cardiovascular tuberculosis.

[0544] Arrhythmias include, but are not limited to, sinus arrhythmia, atrial fibrillation, atrial flutter, bradycardia, extrasystole, Adams-Stokes Syndrome, bundle-branch block, sinoatrial block, long QT syndrome, parasystole, Lown-Ganong-Levine Syndrome, Mahaim-type pre-excitation syndrome, Wolff-Parkinson-White syndrome, sick sinus syndrome, tachycardias, and ventricular fibrillation. Tachycardias include paroxysmal tachycardia, supraventricular tachycardia, accelerated idioventricular rhythm, atrioventricular nodal reentry tachycardia, ectopic atrial tachycardia, ectopic junctional tachycardia, sinoatrial nodal reentry tachycardia, sinus tachycardia, Torsades de Pointes, and ventricular tachycardia.

[0545] Heart valve diseases include, but are not limited to, aortic valve insufficiency, aortic valve stenosis, hear murmurs, aortic valve prolapse, mitral valve prolapse, tricuspid valve prolapse, mitral valve insufficiency, mitral valve stenosis, pulmonary atresia, pulmonary valve insufficiency, pulmonary valve stenosis, tricuspid atresia, tricuspid valve insufficiency, and tricuspid valve stenosis.

[0546] Myocardial diseases include, but are not limited to, alcoholic cardiomyopathy, congestive cardiomyopathy, hypertrophic cardiomyopathy, aortic subvalvular stenosis, pulmonary subvalvular stenosis, restrictive cardiomyopathy, Chagas cardiomyopathy, endocardial fibroelastosis, endomyocardial fibrosis, Kearns Syndrome, myocardial reperfusion injury, and myocarditis.

[0547] Myocardial ischemias include, but are not limited to, coronary disease, such as angina pectoris, coronary aneurysm, coronary arteriosclerosis, coronary thrombosis, coronary vasospasm, myocardial infarction and myocardial stunning.

[0548] Cardiovascular diseases also include vascular diseases such as aneurysms, angiodysplasia, angiomatosis, bacillary angiomatosis, Hippel-Lindau Disease, Klippel-Trenaunay-Weber Syndrome, Sturge-Weber Syndrome, angioneurotic edema, aortic diseases, Takayasu's Arteritis, aortitis, Leriche's Syndrome, arterial occlusive diseases, arteritis, enarteritis, polyarteritis nodosa, cerebrovascular disorders, diabetic angiopathies, diabetic retinopathy, embolisms, thrombosis, erythromelalgia, hemorrhoids, hepatic veno-occlusive disease, hypertension, hypotension, ischemia, peripheral vascular diseases, phlebitis, pulmonary veno-occlusive disease, Raynaud's disease, CREST syndrome, retinal vein occlusion, Scimitar syndrome, superior vena cava syndrome, telangiectasia, atacia telangiectasia, hereditary hemorrhagic telangiectasia, varicocele, varicose veins, varicose ulcer, vasculitis, and venous insufficiency.

[0549] Aneurysms include, but are not limited to, dissecting aneurysms, false aneurysms, infected aneurysms, ruptured aneurysms, aortic aneurysms, cerebral aneurysms, coronary aneurysms, heart aneurysms, and iliac aneurysms.

[0550] Arterial occlusive diseases include, but are not limited to, arteriosclerosis, intermittent claudication, carotid stenosis, fibromuscular dysplasias, mesenteric vascular occlusion, Moyamoya disease, renal artery obstruction, retinal artery occlusion, and thromboangiitis obliterans.

[0551] Cerebrovascular disorders include, but are not limited to, carotid artery diseases, cerebral amyloid angiopathy, cerebral aneurysm, cerebral anoxia, cerebral arteriosclerosis, cerebral arteriovenous malformation, cerebral artery diseases, cerebral embolism and thrombosis, carotid artery thrombosis, sinus thrombosis, Wallenberg's syndrome, cerebral hemorrhage, epidural hematoma, subdural hematoma, subaraxrhnoid hemorrhage, cerebral infarction, cerebral ischemia (including transient), subclavian steal syndrome, periventricular leukomalacia, vascular headache, cluster headache, migraine, and vertebrobasilar insufficiency.

[0552] Embolisms include, but are not limited to, air embolisms, amniotic fluid embolisms, cholesterol embolisms, blue toe syndrome, fat embolisms, pulmonary embolisms, and thromoboembolisms. Thrombosis include, but are not limited to, coronary thrombosis, hepatic vein thrombosis, retinal vein occlusion, carotid artery thrombosis, sinus thrombosis, Wallenberg's syndrome, and thrombophlebitis.

[0553] Ischemic disorders include, but are not limited to, cerebral ischemia, ischemic colitis, compartment syndromes, anterior compartment syndrome, myocardial ischemia, reperfusion injuries, and peripheral limb ischemia. Vasculitis includes, but is not limited to, aortitis, arteritis, Behcet's Syndrome, Churg-Strauss Syndrome, mucocutaneous lymph node syndrome, thromboangiitis obliterans, hypersensitivity vasculitis, Schoenlein-Henoch purpura, allergic cutaneous vasculitis, and Wegener's granulomatosis.

[0554] Polypeptides may be administered using any method known in the art, including, but not limited to, direct needle injection at the delivery site, intravenous injection, topical administration, catheter infusion, biolistic injectors, particle accelerators, gelfoam sponge depots, other commercially available depot materials, osmotic pumps, oral or suppositorial solid pharmaceutical formulations, decanting or topical applications during surgery, aerosol delivery. Such methods are known in the art. Polypeptides may be administered as part of a Therapeutic, described in more detail below. Methods of delivering polynucleotides are described in more detail herein.

Wound Healing and Epithelial Cell Proliferation

[0555] In accordance with yet a further aspect of the present invention, there is provided a process for utilizing polynucleotides or polypeptides, as well as agonists or antagonists of the present invention, for therapeutic purposes, for example, to stimulate epithelial cell proliferation and basal keratinocytes for the purpose of wound healing, and to stimulate hair follicle production and healing of dermal wounds. Polynucleotides or polypeptides, as well as agonists or antagonists of the present invention, may be clinically useful in stimulating wound healing including surgical wounds, excisional wounds, deep wounds involving damage of the dermis and epidermis, eye tissue wounds, dental tissue wounds, oral cavity wounds, diabetic ulcers, dermal ulcers, cubitus ulcers, arterial ulcers, venous stasis ulcers, burns resulting from heat exposure or chemicals, and other abnormal wound healing conditions such as uremia, malnutrition, vitamin deficiencies and complications associated with systemic treatment with steroids, radiation therapy and antineoplastic drugs and antimetabolites. Polynucleotides or polypeptides, as well as agonists or antagonists of the present invention, could be used to promote dermal reestablishment subsequent to dermal loss

[0556] Polynucleotides or polypeptides, as well as agonists or antagonists of the present invention, could be used to increase the adherence of skin grafts to a wound bed and to stimulate re-epithelialization from the wound bed. The following are types of grafts that polynucleotides or polypeptides, agonists or antagonists of the present invention, could be used to increase adherence to a wound bed: autografts, artificial skin, allografts, autodermic graft, autoepdermic grafts, avacular grafts, Blair-Brown grafts, bone graft, brephoplastic grafts, cutis graft, delayed graft, dermic graft, epidermic graft, fascia graft, full thickness graft, heterologous graft, xenograft, homologous graft, hyperplastic graft, lamellar graft, mesh graft, mucosal graft, Ollier-Thiersch graft, omenpal graft, patch graft, pedicle graft, penetrating graft, split skin graft, thick split graft. Polynucleotides or polypeptides, as well as agonists or antagonists of the present invention, can be used to promote skin strength and to improve the appearance of aged skin.

[0557] It is believed that polynucleotides or polypeptides, as well as agonists or antagonists of the present invention, will also produce changes in hepatocyte proliferation, and epithelial cell proliferation in the lung, breast, pancreas, stomach, small intestine, and large intestine. Polynucleotides or polypeptides, as well as agonists or antagonists of the present invention, could promote proliferation of epithelial cells such as sebocytes, hair follicles, hepatocytes, type II pneumocytes, mucin-producing goblet cells, and other epithelial cells and their progenitors contained within the skin, lung, liver, and gastrointestinal tract. Polynucleotides or polypeptides, agonists or antagonists of the present invention, may promote proliferation of endothelial cells, keratinocytes, and basal keratinocytes.

[0558] Polynucleotides or polypeptides, as well as agonists or antagonists of the present invention, could also be used to reduce the side effects of gut toxicity that result from radiation, chemotherapy treatments or viral infections. Polynucleotides or polypeptides, as well as agonists or antagonists of the present invention, may have a cytoprotective effect on the small intestine mucosa. Polynucleotides or polypeptides, as well as agonists or antagonists of the present invention, may also stimulate healing of mucositis (mouth ulcers) that result from chemotherapy and viral infections.

[0559] Polynucleotides or polypeptides, as well as agonists or antagonists of the present invention, could further be used in full regeneration of skin in full and partial thickness skin defects, including burns, (i.e., repopulation of hair follicles, sweat glands, and sebaceous glands), treatment of other skin defects such as psoriasis. Polynucleotides or polypeptides, as well as agonists or antagonists of the present invention, could be used to treat epidermolysis bullosa, a defect in adherence of the epidermis to the underlying dermis which results in frequent, open and painful blisters by accelerating reepithelialization of these lesions. Polynucleotides or polypeptides, as well as agonists or antagonists of the present invention, could also be used to treat gastric and doudenal ulcers and help heal by scar formation of the mucosal lining and regeneration of glandular mucosa and duodenal mucosal lining more rapidly. Inflammatory bowel diseases, such as Crohn's disease and ulcerative colitis, are diseases which result in destruction of the mucosal surface of the small or large intestine, respectively. Thus, polynucleotides or polypeptides, as well as agonists or antagonists of the present invention, could be used to promote the resurfacing of the mucosal surface to aid more rapid healing and to prevent progression of inflammatory bowel disease. Treatment with polynucleotides or polypeptides, agonists or antagonists of the present invention, is expected to have a significant effect on the production of mucus throughout the gastrointestinal tract and could be used to protect the intestinal mucosa from injurious substances that are ingested or following surgery. Polynucleotides or polypeptides, as well as agonists or antagonists of the present invention, could be used to treat diseases associate with the under expression.

[0560] Moreover, polynucleotides or polypeptides, as well as agonists or antagonists of the present invention, could be used to prevent and heal damage to the lungs due to various pathological states. Polynucleotides or polypeptides, as well as agonists or antagonists of the present invention, which could stimulate proliferation and differentiation and promote the repair of alveoli and brochiolar epithelium to prevent or treat acute or chronic lung damage. For example, emphysema, which results in the progressive loss of aveoli, and inhalation injuries, i.e., resulting from smoke inhalation and burns, that cause necrosis of the bronchiolar epithelium and alveoli could be effectively treated using polynucleotides or polypeptides, agonists or antagonists of the present invention. Also, polynucleotides or polypeptides, as well as agonists or antagonists of the present invention, could be used to stimulate the proliferation of and differentiation of type II pneumocytes, which may help treat or prevent disease such as hyaline membrane diseases, such as infant respiratory distress syndrome and bronchopulmonary displasia, in premature infants.

[0561] Polynucleotides or polypeptides, as well as agonists or antagonists of the present invention, could stimulate the proliferation and differentiation of hepatocytes and, thus, could be used to alleviate or treat liver diseases and pathologies such as fulminant liver failure caused by cirrhosis, liver damage caused by viral hepatitis and toxic substances (i.e., acetaminophen, carbon tetraholoride and other hepatotoxins known in the art).

[0562] In addition, polynucleotides or polypeptides, as well as agonists or antagonists of the present invention, could be used treat or prevent the onset of diabetes mellitus. In patients with newly diagnosed Types I and II diabetes, where some islet cell function remains, polynucleotides or polypeptides, as well as agonists or antagonists of the present invention, could be used to maintain the islet function so as to alleviate, delay or prevent permanent manifestation of the disease. Also, polynucleotides or polypeptides, as well as agonists or antagonists of the present invention, could be used as an auxiliary in islet cell transplantation to improve or promote islet cell function.

Chemotaxis

[0563] Polynucleotides or polypeptides, as well as agonists or antagonists of the present invention may have chemotaxis activity. A chemotaxic molecule attracts or mobilizes cells (e.g., monocytes, fibroblasts, neutrophils, T-cells, mast cells, eosinophils, epithelial and/or endothelial cells) to a particular site in the body, such as inflammation, infection, or site of hyperproliferation. The mobilized cells can then fight off and/or heal the particular trauma or abnormality.

[0564] Polynucleotides or polypeptides, as well as agonists or antagonists of the present invention may increase chemotaxic activity of particular cells. These chemotactic molecules can then be used to treat inflammation, infection, hyperproliferative disorders, or any immune system disorder by increasing the number of cells targeted to a particular location in the body. For example, chemotaxic molecules can be used to treat wounds and other trauma to tissues by attracting immune cells to the injured location. Chemotactic molecules of the present invention can also attract fibroblasts, which can be used to treat wounds.

[0565] It is also contemplated that polynucleotides or polypeptides, as well as agonists or antagonists of the present invention may inhibit chemotactic activity. These molecules could also be used to treat disorders. Thus, polynucleotides or polypeptides, as well as agonists or antagonists of the present invention could be used as an inhibitor of chemotaxis.

Binding Activity

[0566] A polypeptide of the present invention may be used to screen for molecules that bind to the polypeptide or for molecules to which the polypeptide binds. The binding of the polypeptide and the molecule may activate (agonist), increase, inhibit (antagonist), or decrease activity of the polypeptide or the molecule bound. Examples of such molecules include antibodies, oligonucleotides, proteins (e.g., receptors), or small molecules.

[0567] Preferably, the molecule is closely related to the natural ligand of the polypeptide, e.g., a fragment of the ligand, or a natural substrate, a ligand, a structural or functional mimetic. (See, Coligan et al., Current Protocols in Immunology 1(2):Chapter 5 (1991)). Similarly, the molecule can be closely related to the natural receptor to which the polypeptide binds, or at least, a fragment of the receptor capable of being bound by the polypeptide (e.g., active site). In either case, the molecule can be rationally designed using known techniques.

[0568] Preferably, the screening for these molecules involves producing appropriate cells which express the polypeptide. Preferred cells include cells from mammals, yeast, Drosophila, or E. coli. Cells expressing the polypeptide (or cell membrane containing the expressed polypeptide) are then preferably contacted with a test compound potentially containing the molecule to observe binding, stimulation, or inhibition of activity of either the polypeptide or the molecule.

[0569] The assay may simply test binding of a candidate compound to the polypeptide, wherein binding is detected by a label, or in an assay involving competition with a labeled competitor. Further, the assay may test whether the candidate compound results in a signal generated by binding to the polypeptide.

[0570] Alternatively, the assay can be carried out using cell-free preparations, polypeptide/molecule affixed to a solid support, chemical libraries, or natural product mixtures. The assay may also simply comprise the steps of mixing a candidate compound with a solution containing a polypeptide, measuring polypeptide/molecule activity or binding, and comparing the polypeptide/molecule activity or binding to a standard.

[0571] Preferably, an ELISA assay can measure polypeptide level or activity in a sample (e.g., biological sample) using a monoclonal or polyclonal antibody. The antibody can measure polypeptide level or activity by either binding, directly or indirectly, to the polypeptide or by competing with the polypeptide for a substrate.

[0572] Additionally, the receptor to which the polypeptide of the present invention binds can be identified by numerous methods known to those of skill in the art, for example, ligand panning and FACS sorting (Coligan, et al., Current Protocols in Immun., 1(2), Chapter 5, (1991)). For example, expression cloning is employed wherein polyadenylated RNA is prepared from a cell responsive to the polypeptides, for example, NIH3T3 cells which are known to contain multiple receptors for the FGF family proteins, and SC-3 cells, and a cDNA library created from this RNA is divided into pools and used to transfect COS cells or other cells that are not responsive to the polypeptides. Transfected cells which are grown on glass slides are exposed to the polypeptide of the present invention, after they have been labeled. The polypeptides can be labeled by a variety of means including iodination or inclusion of a recognition site for a site-specific protein kinase.

[0573] Following fixation and incubation, the slides are subjected to auto-radiographic analysis. Positive pools are identified and sub-pools are prepared and re-transfected using an iterative sub-pooling and re-screening process, eventually yielding a single clones that encodes the putative receptor.

[0574] As an alternative approach for receptor identification, the labeled polypeptides can be photoaffinity linked with cell membrane or extract preparations that express the receptor molecule. Cross-linked material is resolved by PAGE analysis and exposed to X-ray film. The labeled complex containing the receptors of the polypeptides can be excised, resolved into peptide fragments, and subjected to protein microsequencing. The amino acid sequence obtained from microsequencing would be used to design a set of degenerate oligonucleotide probes to screen a cDNA library to identify the genes encoding the putative receptors.

[0575] Moreover, the techniques of gene-shuffling, motif-shuffling, exon-shuffling, and/or codon-shuffling (collectively referred to as “DNA shuffling”) may be employed to modulate the activities of the polypeptide of the present invention thereby effectively generating agonists and antagonists of the polypeptide of the present invention. See generally, U.S. Pat. Nos. 5,605,793, 5,811,238, 5,830,721, 5,834,252, and 5,837,458, and Patten, P. A., et al., Curr. Opinion Biotechnol. 8:724-33 (1997); Harayama, S. Trends Biotechnol. 16(2):76-82 (1998); Hansson, L. O., et al., J. Mol. Biol. 287:265-76 (1999); and Lorenzo, M. M. and Blasco, R. Biotechniques 24(2):308-13 (1998); each of these patents and publications are hereby incorporated by reference). In one embodiment, alteration of polynucleotides and corresponding polypeptides may be achieved by DNA shuffling. DNA shuffling involves the assembly of two or more DNA segments into a desired molecule by homologous, or site-specific, recombination. In another embodiment, polynucleotides and corresponding polypeptides may be altered by being subjected to random mutagenesis by error-prone PCR, random nucleotide insertion or other methods prior to recombination. In another embodiment, one or more components, motifs, sections, parts, domains, fragments, etc., of the polypeptide of the present invention may be recombined with one or more components, motifs, sections, parts, domains, fragments, etc. of one or more heterologous molecules. In preferred embodiments, the heterologous molecules are family members. In further preferred embodiments, the heterologous molecule is a growth factor such as, for example, platelet-derived growth factor (PDGF), insulin-like growth factor (IGF-I), transforming growth factor (TGF)-alpha, epidermal growth factor (EGF), fibroblast growth factor (FGF), TGF-beta, bone morphogenetic protein (BMP)-2, BMP-4, BMP-5, BMP-6, BMP-7, activins A and B, decapentaplegic(dpp), 60A, OP-2, dorsalin, growth differentiation factors (GDFs), nodal, MIS, inhibin-alpha, TGF-beta1, TGF-beta2, TGF-beta3, TGF-beta5, and glial-derived neurotrophic factor (GDNF).

[0576] Other preferred fragments are biologically active fragments of the polypeptide of the present invention. Biologically active fragments are those exhibiting activity similar, but not necessarily identical, to an activity of the polypeptide of the present invention. The biological activity of the fragments may include an improved desired activity, or a decreased undesirable activity.

[0577] Additionally, this invention provides a method of screening compounds to identify those which modulate the action of the polypeptide of the present invention. An example of such an assay comprises combining a mammalian fibroblast cell, a the polypeptide of the present invention, the compound to be screened and ³[H] thymidine under cell culture conditions where the fibroblast cell would normally proliferate. A control assay may be performed in the absence of the compound to be screened and compared to the amount of fibroblast proliferation in the presence of the compound to determine if the compound stimulates proliferation by determining the uptake of ³[H] thymidine in each case. The amount of fibroblast cell proliferation is measured by liquid scintillation chromatography which measures the incorporation of ³[H] thymidine. Both agonist and antagonist compounds may be identified by this procedure.

[0578] In another method, a mammalian cell or membrane preparation expressing a receptor for a polypeptide of the present invention is incubated with a labeled polypeptide of the present invention in the presence of the compound. The ability of the compound to enhance or block this interaction could then be measured. Alternatively, the response of a known second messenger system following interaction of a compound to be screened and the receptor is measured and the ability of the compound to bind to the receptor and elicit a second messenger response is measured to determine if the compound is a potential agonist or antagonist. Such second messenger systems include but are not limited to, cAMP guanylate cyclase, ion channels or phosphoinositide hydrolysis.

[0579] All of these above assays can be used as diagnostic or prognostic markers. The molecules discovered using these assays can be used to treat disease or to bring about a particular result in a patient (e.g., blood vessel growth) by activating or inhibiting the polypeptide/molecule. Moreover, the assays can discover agents which may inhibit or enhance the production of the polypeptides of the invention from suitably manipulated cells or tissues.

[0580] Therefore, the invention includes a method of identifying compounds which bind to a polypeptide of the invention comprising the steps of: (a) incubating a candidate binding compound with a polypeptide of the present invention; and (b) determining if binding has occurred. Moreover, the invention includes a method of identifying agonists/antagonists comprising the steps of: (a) incubating a candidate compound with a polypeptide of the present invention, (b) assaying a biological activity, and (b) determining if a biological activity of the polypeptide has been altered.

Targeted Delivery

[0581] In another embodiment, the invention provides a method of delivering compositions to targeted cells expressing a receptor for a polypeptide of the invention, or cells expressing a cell bound form of a polypeptide of the invention.

[0582] As discussed herein, polypeptides or antibodies of the invention may be associated with heterologous polypeptides, heterologous nucleic acids, toxins, or prodrugs via hydrophobic, hydrophilic, ionic and/or covalent interactions. In one embodiment, the invention provides a method for the specific delivery of compositions of the invention to cells by administering polypeptides of the invention (including antibodies) that are associated with heterologous polypeptides or nucleic acids. In one example, the invention provides a method for delivering a therapeutic protein into the targeted cell. In another example, the invention provides a method for delivering a single stranded nucleic acid (e.g., antisense or ribozymes) or double stranded nucleic acid (e.g., DNA that can integrate into the cell's genome or replicate episomally and that can be transcribed) into the targeted cell.

[0583] In another embodiment, the invention provides a method for the specific destruction of cells (e.g., the destruction of tumor cells) by administering polypeptides of the invention (e.g., polypeptides of the invention or antibodies of the invention) in association with toxins or cytotoxic prodrugs.

[0584] By “toxin” is meant compounds that bind and activate endogenous cytotoxic effector systems, radioisotopes, holotoxins, modified toxins, catalytic subunits of toxins, or any molecules or enzymes not normally present in or on the surface of a cell that under defined conditions cause the cell's death. Toxins that may be used according to the methods of the invention include, but are not limited to, radioisotopes known in the art, compounds such as, for example, antibodies (or complement fixing containing portions thereof) that bind an inherent or induced endogenous cytotoxic effector system, thymidine kinase, endonuclease, RNAse, alpha toxin, ricin, abrin, Pseudomonas exotoxin A, diphtheria toxin, saporin, momordin, gelonin, pokeweed antiviral protein, alpha-sarcin and cholera toxin. By “cytotoxic prodrug” is meant a non-toxic compound that is converted by an enzyme, normally present in the cell, into a cytotoxic compound. Cytotoxic prodrugs that may be used according to the methods of the invention include, but are not limited to, glutamyl derivatives of benzoic acid mustard alkylating agent, phosphate derivatives of etoposide or mitomycin C, cytosine arabinoside, daunorubisin, and phenoxyacetamide derivatives of doxorubicin.

Drug Screening

[0585] Further contemplated is the use of the polypeptides of the present invention, or the polynucleotides encoding these polypeptides, to screen for molecules which modify the activities of the polypeptides of the present invention. Such a method would include contacting the polypeptide of the present invention with a selected compound(s) suspected of having antagonist or agonist activity, and assaying the activity of these polypeptides following binding.

[0586] This invention is particularly useful for screening therapeutic compounds by using the polypeptides of the present invention, or binding fragments thereof, in any of a variety of drug screening techniques. The polypeptide or fragment employed in such a test may be affixed to a solid support, expressed on a cell surface, free in solution, or located intracellularly. One method of drug screening utilizes eukaryotic or prokaryotic host cells which are stably transformed with recombinant nucleic acids expressing the polypeptide or fragment. Drugs are screened against such transformed cells in competitive binding assays. One may measure, for example, the formulation of complexes between the agent being tested and a polypeptide of the present invention.

[0587] Thus, the present invention provides methods of screening for drugs or any other agents which affect activities mediated by the polypeptides of the present invention. These methods comprise contacting such an agent with a polypeptide of the present invention or a fragment thereof and assaying for the presence of a complex between the agent and the polypeptide or a fragment thereof, by methods well known in the art. In such a competitive binding assay, the agents to screen are typically labeled. Following incubation, free agent is separated from that present in bound form, and the amount of free or uncomplexed label is a measure of the ability of a particular agent to bind to the polypeptides of the present invention.

[0588] Another technique for drug screening provides high throughput screening for compounds having suitable binding affinity to the polypeptides of the present invention, and is described in great detail in European Patent Application 84/03564, published on Sep. 13, 1984, which is incorporated herein by reference herein. Briefly stated, large numbers of different small peptide test compounds are synthesized on a solid substrate, such as plastic pins or some other surface. The peptide test compounds are reacted with polypeptides of the present invention and washed. Bound polypeptides are then detected by methods well known in the art. Purified polypeptides are coated directly onto plates for use in the aforementioned drug screening techniques. In addition, non-neutralizing antibodies may be used to capture the peptide and immobilize it on the solid support.

[0589] This invention also contemplates the use of competitive drug screening assays in which neutralizing antibodies capable of binding polypeptides of the present invention specifically compete with a test compound for binding to the polypeptides or fragments thereof. In this manner, the antibodies are used to detect the presence of any peptide which shares one or more antigenic epitopes with a polypeptide of the invention.

Antisense And Ribozyme (Antagonists)

[0590] In specific embodiments, antagonists according to the present invention are nucleic acids corresponding to the sequences contained in SEQ ID NO:X, or the complementary strand thereof, and/or to cDNA sequences contained in cDNA ATCC Deposit No:Z identified for example, in Table 1A and/or 1B. In one embodiment, antisense sequence is generated internally, by the organism, in another embodiment, the antisense sequence is separately administered (see, for example, O'Connor, J., Neurochem 56:560 (1991). Oligodeoxynucleotides as Antisense Inhibitors of Gene Expression, CRC Press, Boca Raton, Fla. (1988). Antisense technology can be used to control gene expression through antisense DNA or RNA, or through triple-helix formation. Antisense techniques are discussed for example, in Okano, J., Neurochem. 56:560 (1991); Oligodeoxynucleotides as Antisense Inhibitors of Gene Expression, CRC Press, Boca Raton, Fla. (1988). Triple helix formation is discussed in, for instance, Lee et al., Nucleic Acids Research 6:3073 (1979); Cooney et al., Science 241:456 (1988); and Dervan et al., Science 251:1300 (1991). The methods are based on binding of a polynucleotide to a complementary DNA or RNA.

[0591] For example, the use of c-myc and c-myb antisense RNA constructs to inhibit the growth of the non-lymphocytic leukemia cell line HL-60 and other cell lines was previously described. (Wickstrom et al. (1988); Anfossi et al. (1989)). These experiments were performed in vitro by incubating cells with the oligoribonucleotide. A similar procedure for in vivo use is described in WO 91/15580. Briefly, a pair of oligonucleotides for a given antisense RNA is produced as follows: A sequence complimentary to the first 15 bases of the open reading frame is flanked by an EcOR1 site on the 5 end and a HindIII site on the 3 end. Next, the pair of oligonucleotides is heated at 90° C. for one minute and then annealed in 2× ligation buffer (20 mM TRIS HCl pH 7.5, 10 mM MgCl2, 10 MM dithiothreitol (DTT) and 0.2 mM ATP) and then ligated to the EcOR1/Hind m site of the retroviral vector PMV7 (WO 91/15580).

[0592] For example, the 5′ coding portion of a polynucleotide that encodes the polypeptide of the present invention may be used to design an antisense RNA oligonucleotide of from about 10 to 40 base pairs in length. A DNA oligonucleotide is designed to be complementary to a region of the gene involved in transcription thereby preventing transcription and the production of the receptor. The antisense RNA oligonucleotide hybridizes to the mRNA in vivo and blocks translation of the mRNA molecule into receptor polypeptide.

[0593] In one embodiment, the antisense nucleic acid of the invention is produced intracellularly by transcription from an exogenous sequence. For example, a vector or a portion thereof, is transcribed, producing an antisense nucleic acid (RNA) of the invention. Such a vector would contain a sequence encoding the antisense nucleic acid. Such a vector can remain episomal or become chromosomally integrated, as long as it can be transcribed to produce the desired antisense RNA. Such vectors can be constructed by recombinant DNA technology methods standard in the art. Vectors can be plasmid, viral, or others known in the art, used for replication and expression in vertebrate cells. Expression of the sequence encoding the polypeptide of the present invention or fragments thereof, can be by any promoter known in the art to act in vertebrate, preferably human cells. Such promoters can be inducible or constitutive. Such promoters include, but are not limited to, the SV40 early promoter region (Bernoist and Chambon, Nature 29:304-310 (1981), the promoter contained in the 3′ long terminal repeat of Rous sarcoma virus (Yamamoto et al., Cell 22:787-797 (1980), the herpes thymidine promoter (Wagner et al., Proc. Natl. Acad. Sci. U.S.A. 78:1441-1445 (1981), the regulatory sequences of the metallothionein gene (Brinster, et al., Nature 296:3942 (1982)), etc.

[0594] The antisense nucleic acids of the invention comprise a sequence complementary to at least a portion of an RNA transcript of a gene of the present invention. However, absolute complementarity, although preferred, is not required. A sequence “complementary to at least a portion of an RNA,” referred to herein, means a sequence having sufficient complementarity to be able to hybridize with the RNA, forming a stable duplex; in the case of double stranded antisense nucleic acids, a single strand of the duplex DNA may thus be tested, or triplex formation may be assayed. The ability to hybridize will depend on both the degree of complementarity and the length of the antisense nucleic acid. Generally, the larger the hybridizing nucleic acid, the more base mismatches with a RNA it may contain and still form a stable duplex (or triplex as the case may be). One skilled in the art can ascertain a tolerable degree of mismatch by use of standard procedures to determine the melting point of the hybridized complex.

[0595] Oligonucleotides that are complementary to the 5′ end of the message, e.g., the 5′ untranslated sequence up to and including the AUG initiation codon, should work most efficiently at inhibiting translation. However, sequences complementary to the 3′ untranslated sequences of mRNAs have been shown to be effective at inhibiting translation of mRNAs as well. See generally, Wagner, R., 1994, Nature 372:333-335. Thus, oligonucleotides complementary to either the 5′- or 3′-non-translated, non-coding regions of polynucleotide sequences described herein could be used in an antisense approach to inhibit translation of endogenous mRNA. Oligonucleotides complementary to the 5′ untranslated region of the mRNA should include the complement of the AUG start codon. Antisense oligonucleotides complementary to mRNA coding regions are less efficient inhibitors of translation but could be used in accordance with the invention. Whether designed to hybridize to the 5′-, 3′- or coding region of mRNA of the present invention, antisense nucleic acids should be at least six nucleotides in length, and are preferably oligonucleotides ranging from 6 to about 50 nucleotides in length. In specific aspects the oligonucleotide is at least 10 nucleotides, at least 17 nucleotides, at least 25 nucleotides or at least 50 nucleotides.

[0596] The polynucleotides of the invention can be DNA or RNA or chimeric mixtures or derivatives or modified versions thereof, single-stranded or double-stranded. The oligonucleotide can be modified at the base moiety, sugar moiety, or phosphate backbone, for example, to improve stability of the molecule, hybridization, etc. The oligonucleotide may include other appended groups such as peptides (e.g., for targeting host cell receptors in vivo), or agents facilitating transport across the cell membrane (see, e.g., Letsinger et al., 1989, Proc. Natl. Acad. Sci. U.S.A. 86:6553-6556; Lemaitre et al., 1987, Proc. Natl. Acad. Sci. 84:648-652; PCT Publication No. WO88/09810, published Dec. 15, 1988) or the blood-brain barrier (see, e.g., PCr Publication No. WO89/10134, published Apr. 25, 1988), hybridization-triggered cleavage agents. (See, e.g., Krol et al., 1988, BioTechniques 6:958-976) or intercalating agents. (See, e.g., Zon, 1988, Pharm. Res. 5:539-549). To this end, the oligonucleotide may be conjugated to another molecule, e.g., a peptide, hybridization triggered cross-linking agent, transport agent, hybridization-triggered cleavage agent, etc.

[0597] The antisense oligonucleotide may comprise at least one modified base moiety which is selected from the group including, but not limited to, 5-fluorouracil, 5-bromouracil, 5-chlorouracil, 5-iodouracil, hypoxanthine, xantine, 4-acetylcytosine, 5-carboxyhydroxylmethyl) uracil, 5-carboxymethylaminomethyl-2-thiouridine, 5-carboxymethylaminomethyluracil, dihydrouracil, beta-D-galactosylqueosine, inosine, N6-isopentenyladenine, 1-methylguanine, 1-methylinosine, 2,2-dimethylguanine, 2-methyladenine, 2-methylguanine, 3-methylcytosine, 5-methylcytosine, N6-adenine, 7-methylguanine, 5-methylaminomethyluracil, 5-methoxyaminomethyl-2-thiouracil, beta-D-mannosylqueosine, 5′-methoxycarboxymethyluracil, 5-methoxyuracil, 2-methylthio-N-6-isopentenyladenine, uracil-5-oxyacetic acid (v), wybutoxosine, pseudouracil, queosine, 2-thiocytosine, 5-methyl-2-thiouracil, 2-thiouracil, 4-thiouracil, 5-methyluracil, uracil-5-oxyacetic acid methylester, uracil-5-oxyacetic acid (v), 5-methyl-2-thiouracil, 3-(3-amino-3-N-2-carboxypropyl) uracil, (acp3)w, and 2,6-diaminopurine.

[0598] The antisense oligonucleotide may also comprise at least one modified sugar moiety selected from the group including, but not limited to, arabinose, 2-fluoroarabinose, xylulose, and hexose.

[0599] In yet another embodiment, the antisense oligonucleotide comprises at least one modified phosphate backbone selected from the group including, but not limited to, a phosphorothioate, a phosphorodithioate, a phosphoramidothioate, a phosphoramidate, a phosphordiamidate, a methylphosphonate, an alkyl phosphotriester, and a formacetal or analog thereof.

[0600] In yet another embodiment, the antisense oligonucleotide is an a-anomeric oligonucleotide. An a-anomeric oligonucleotide forms specific double-stranded hybrids with complementary RNA in which, contrary to the usual b-units, the strands run parallel to each other (Gautier et al., 1987, Nucl. Acids Res. 15:6625641). The oligonucleotide is a 2′-0-methylribonucleotide (Inoue et al., 1987, Nucl. Acids Res. 15:6131-6148), or a chimeric RNA-DNA analogue (Inoue et al., 1987, FEBS Lett. 215:327-330).

[0601] Polynucleotides of the invention may be synthesized by standard methods known in the art, e.g. by use of an automated DNA synthesizer (such as are commercially available from Biosearch, Applied Biosystems, etc.). As examples, phosphorothioate oligonucleotides may be synthesized by the method of Stein et al. (1988, Nucl. Acids Res. 16:3209), methylphosphonate oligonucleotides can be prepared by use of controlled pore glass polymer supports (Sarin et al., 1988, Proc. Natl. Acad. Sci. U.S.A. 85:7448-7451), etc.

[0602] While antisense nucleotides complementary to the coding region sequence could be used, those complementary to the transcribed untranslated region are most preferred.

[0603] Potential antagonists according to the invention also include catalytic RNA, or a ribozyme (See, e.g., PCT International Publication WO 90/11364, published Oct. 4, 1990; Sarver et al, Science 247:1222-1225 (1990). While ribozymes that cleave mRNA at site specific recognition sequences can be used to destroy mRNAs, the use of hammerhead ribozymes is preferred. Hammerhead ribozymes cleave mRNAs at locations dictated by flanking regions that form complementary base pairs with the target mRNA. The sole requirement is that the target mRNA have the following sequence of two bases: 5′-UG-3′. The construction and production of hammerhead ribozymes is well known in the art and is described more fully in Haseloff and Gerlach, Nature 334:585-591 (1988). There are numerous potential hammerhead ribozyme cleavage sites within the nucleotide sequence of SEQ ID NO:X. Preferably, the ribozyme is engineered so that the cleavage recognition site is located near the 5′ end of the mRNA; i.e., to increase efficiency and minimize the intracellular accumulation of non-functional in RNA transcripts.

[0604] As in the antisense approach, the ribozymes of the invention can be composed of modified oligonucleotides (e.g., for improved stability, targeting, etc.) and should be delivered to cells which express in vivo. DNA constructs encoding the ribozyme may be introduced into the cell in the same manner as described above for the introduction of antisense encoding DNA. A preferred method of delivery involves using a DNA construct “encoding” the ribozyme under the control of a strong constitutive promoter, such as, for example, pol m or pol II promoter, so that transfected cells will produce sufficient quantities of the ribozyme to destroy endogenous messages and inhibit translation. Since ribozymes unlike antisense molecules, are catalytic, a lower intracellular concentration is required for efficiency.

[0605] Antagonist/agonist compounds may be employed to inhibit the cell growth and proliferation effects of the polypeptides of the present invention on neoplastic cells and tissues, i.e. stimulation of angiogenesis of tumors, and, therefore, retard or prevent abnormal cellular growth and proliferation, for example, in tumor formation or growth.

[0606] The antagonistlagonist may also be employed to prevent hyper-vascular diseases, and prevent the proliferation of epithelial lens cells after extracapsular cataract surgery. Prevention of the mitogenic activity of the polypeptides of the present invention may also be desirous in cases such as restenosis after balloon angioplasty.

[0607] The antagonist/agonist may also be employed to prevent the growth of scar tissue during wound healing.

[0608] The antagonist/agonist may also be employed to treat the diseases described herein.

[0609] Thus, the invention provides a method of treating disorders or diseases, including but not limited to the disorders or diseases listed throughout this application, associated with overexpression of a polynucleotide of the present invention by administering to a patient (a) an antisense molecule directed to the polynucleotide of the present invention, and/or (b) a ribozyme directed to the polynucleotide of the present invention.

Binding Peptides and Other Molecules

[0610] The invention also encompasses screening methods for identifying polypeptides and nonpolypeptides that bind polypeptides of the invention, and the binding molecules identified thereby. These binding molecules are useful, for example, as agonists and antagonists of the polypeptides of the invention. Such agonists and antagonists can be used, in accordance with the invention, in the therapeutic embodiments described in detail, below.

[0611] This method comprises the steps of:
[0612] a. contacting polypeptides of the invention with a plurality of molecules; and
[0613] b. identifying a molecule that binds the polypeptides of the invention.

[0614] The step of contacting the polypeptides of the invention with the plurality of molecules may be effected in a number of ways. For example, one may contemplate immobilizing the polypeptides on a solid support and bringing a solution of the plurality of molecules in contact with the immobilized polypeptides. Such a procedure would be akin to an affinity chromatographic process, with the affinity matrix being comprised of the immobilized polypeptides of the invention. The molecules having a selective affinity for the polypeptides can then be purified by affinity selection. The nature of the solid support, process for attachment of the polypeptides to the solid support, solvent, and conditions of the affinity isolation or selection are largely conventional and well known to those of ordinary skill in the art.

[0615] Alternatively, one may also separate a plurality of polypeptides into substantially separate fractions comprising a subset of or individual polypeptides. For instance, one can separate the plurality of polypeptides by gel electrophoresis, column chromatography, or like method known to those of ordinary skill for the separation of polypeptides. The individual polypeptides can also be produced by a transformed host cell in such a way as to be expressed on or about its outer surface (e.g., a recombinant phage). Individual isolates can then be “probed” by the polypeptides of the invention, optionally in the presence of an inducer should one be required for expression, to determine if any selective affinity interaction takes place between the polypeptides and the individual clone. Prior to contacting the polypeptides with each fraction comprising individual polypeptides, the polypeptides could first be transferred to a solid support for additional convenience. Such a solid support may simply be a piece of filter membrane, such as one made of nitrocellulose or nylon. In this manner, positive clones could be identified from a collection of transformed host cells of an expression library, which harbor a DNA construct encoding a polypeptide having a selective affinity for polypeptides of the invention. Furthermore, the amino acid sequence of the polypeptide having a selective affinity for the polypeptides of the invention can be determined directly by conventional means or the coding sequence of the DNA encoding the polypeptide can frequently be determined more conveniently. The primary sequence can then be deduced from the corresponding DNA sequence. If the amino acid sequence is to be determined from the polypeptide itself, one may use microsequencing techniques. The sequencing technique may include mass spectroscopy.

[0616] In certain situations, it may be desirable to wash away any unbound polypeptides from a mixture of the polypeptides of the invention and the plurality of polypeptides prior to attempting to determine or to detect the presence of a selective affinity interaction. Such a wash step may be particularly desirable when the polypeptides of the invention or the plurality of polypeptides are bound to a solid support.

[0617] The plurality of molecules provided according to this method may be provided by way of diversity libraries, such as random or combinatorial peptide or nonpeptide libraries which can be screened for molecules that specifically bind polypeptides of the invention. Many libraries are known in the art that can be used, e.g., chemically synthesized libraries, recombinant (e.g., phage display libraries), and in vitro translation-based libraries. Examples of chemically synthesized libraries are described in Fodor et al., 1991, Science 251:767-773; Houghten et al., 1991, Nature 354:84-86; Lam et al., 1991, Nature 354:82-84; Medynski, 1994, Bio/Technology 12:709-710;Gallop et al., 1994, J. Medicinal Chemistry 37(9):1233-1251; Ohlmeyer et al., 1993, Proc. Natl. Acad. Sci. USA 90:10922-10926; Erb et al., 1994, Proc. Natl. Acad. Sci. USA 91:11422-11426; Houghten et al., 1992, Biotechniques 13:412; Jayawickreme et al., 1994, Proc. Natl. Acad. Sci. USA 91:1614-1618; Salmon et al., 1993, Proc. Natl. Acad. Sci. USA 90:11708-11712; PCT Publication No. WO 93/20242; and Brenner and Lerner, 1992, Proc. Natl. Acad. Sci. USA 89:5381-5383.

[0618] Examples of phage display libraries are described in Scott and Smith, 1990, Science 249:386-390; Devlin et al., 1990, Science, 249:404-406; Christian, R. B., et al., 1992, J. Mol. Biol. 227:711-718); Lenstra, 1992, J. Immunol. Meth. 152:149-157; Kay et al., 1993, Gene 128:59-65; and PCT Publication No. WO 94/18318 dated Aug. 18, 1994.

[0619] In vitro translation-based libraries include but are not limited to those described in PCT Publication No. WO 91/05058 dated Apr. 18, 1991; and Mattheakis et al., 1994, Proc. Natl. Acad. Sci. USA 91:9022-9026.

[0620] By way of examples of nonpeptide libraries, a benzodiazepine library (see e.g., Bunin et al., 1994, Proc. Natl. Acad. Sci. USA 91:4708-4712) can be adapted for use. Peptoid libraries (Simon et al., 1992, Proc. Natl. Acad. Sci. USA 89:9367-9371) can also be used. Another example of a library that can be used, in which the amide functionalities in peptides have been permethylated to generate a chemically transformed combinatorial library, is described by Ostresh et al. (1994, Proc. Natl. Acad. Sci. USA 91:11138-11142).

[0621] The variety of non-peptide libraries that are useful in the present invention is great. For example, Ecker and Crooke, 1995, Bio/Technology 13:351-360 list benzodiazepines, hydantoins, piperazinediones, biphenyls, sugar analogs, beta-mercaptoketones, arylacetic acids, acylpiperidines, benzopyrans, cubanes, xanthines, aminimides, and oxazolones as among the chemical species that form the basis of various libraries.

[0622] Non-peptide libraries can be classified broadly into two types: decorated monomers and oligomers. Decorated monomer libraries employ a relatively simple scaffold structure upon which a variety functional groups is added. Often the scaffold will be a molecule with a known useful pharmacological activity. For example, the scaffold might be the benzodiazepine structure.

[0623] Non-peptide oligomer libraries utilize a large number of monomers that are assembled together in ways that create new shapes that depend on the order of the monomers. Among the monomer units that have been used are carbamates, pyrrolinones, and morpholinos. Peptoids, peptide-like oligomers in which the side chain is attached to the alpha amino group rather than the alpha carbon, form the basis of another version of non-peptide oligomer libraries. The first non-peptide oligomer libraries utilized a single type of monomer and thus contained a repeating backbone. Recent libraries have utilized more than one monomer, giving the libraries added flexibility.

[0624] Screening the libraries can be accomplished by any of a variety of commonly known methods. See, e.g., the following references, which disclose screening of peptide libraries: Parmley and Smith, 1989, Adv. Exp. Med. Biol. 251:215-218; Scott and Smith, 1990, Science 249:386-390; Fowlkes et al., 1992; BioTechniques 13:422-427; Oldenburg et al., 1992, Proc. Natl. Acad. Sci. USA 89:5393-5397; Yu et al., 1994, Cell 76:933-945; Staudt et al., 1988, Science 241:577-580; Bock et al., 1992, Nature 355:564-566; Tuerk et al., 1992, Proc. Natl. Acad. Sci. USA 89:6988-6992; Ellington et al., 1992, Nature 355:850-852; U.S. Pat. No. 5,096,815, U.S. Pat. No. 5,223,409, and U.S. Pat. No. 5,198,346, all to Ladner et al.; Rebar and Pabo, 1993, Science 263:671-673; and CT Publication No. WO 94/18318.

[0625] In a specific embodiment, screening to identify a molecule that binds polypeptides of the invention can be carried out by contacting the library members with polypeptides of the invention immobilized on a solid phase and harvesting those library members that bind to the polypeptides of the invention. Examples of such screening methods, termed “panning” techniques are described by way of example in Parmley and Smith, 1988, Gene 73:305-318; Fowlkes et al., 1992, BioTecbniques 13:422-427; PCT Publication No. WO 94/18318; and in references cited herein.

[0626] In another embodiment, the two-hybrid system for selecting interacting proteins in yeast (Fields and Song, 1989, Nature 340:245-246; Chien et al., 1991, Proc. Natl. Acad. Sci. USA 88:9578-9582) can be used to identify molecules that specifically bind to polypeptides of the invention.

[0627] Where the binding molecule is a polypeptide, the polypeptide can be conveniently selected from any peptide library, including random peptide libraries, combinatorial peptide libraries, or biased peptide libraries. The term “biased” is used herein to mean that the method of generating the library is manipulated so as to restrict one or more parameters that govern the diversity of the resulting collection of molecules, in this case peptides.

[0628] Thus, a truly random peptide library would generate a collection of peptides in which the probability of finding a particular amino acid at a given position of the peptide is the same for all 20 amino acids. A bias can be introduced into the library, however, by specifying, for example, that a lysine occur every fifth amino acid or that positions 4, 8, and 9 of a decapeptide library be fixed to include only arginine. Clearly, many types of biases can be contemplated, and the present invention is not restricted to any particular bias. Furthermore, the present invention contemplates specific types of peptide libraries, such as phage displayed peptide libraries and those that utilize a DNA construct comprising a lambda phage vector with a DNA insert.

[0629] As mentioned above, in the case of a binding molecule that is a polypeptide, the polypeptide may have about 6 to less than about 60 amino acid residues, preferably about 6 to about 10 amino acid residues, and most preferably, about 6 to about 22 amino acids. In another embodiment, a binding polypeptide has in the range of 15-100 amino acids, or 20-50 amino acids.

[0630] The selected binding polypeptide can be obtained by chemical synthesis or recombinant expression.

Other Activities

[0631] A polypeptide, polynucleotide, agonist, or antagonist of the present invention, as a result of the ability to stimulate vascular endothelial cell growth, may be employed in treatment for stimulating re-vascularization of ischemic tissues due to various disease conditions such as thrombosis, arteriosclerosis, and other cardiovascular conditions. The polypeptide, polynucleotide, agonist, or antagonist of the present invention may also be employed to stimulate angiogenesis and limb regeneration, as discussed above.

[0632] A polypeptide, polynucleotide, agonist, or antagonist of the present invention may also be employed for treating wounds due to injuries, burns, post-operative tissue repair, and ulcers since they are mitogenic to various cells of different origins, such as fibroblast cells and skeletal muscle cells, and therefore, facilitate the repair or replacement of damaged or diseased tissue.

[0633] A polypeptide, polynucleotide, agonist, or antagonist of the present invention may also be employed stimulate neuronal growth and to treat and prevent neuronal damage which occurs in certain neuronal disorders or neuro-degenerative conditions such as Alzheimer's disease, Parkinson's disease, and AIDS-related complex. A polypeptide, polynucleotide, agonist, or antagonist of the present invention may have the ability to stimulate chondrocyte growth, therefore, they may be employed to enhance bone and periodontal regeneration and aid in tissue transplants or bone grafts.

[0634] A polypeptide, polynucleotide, agonist, or antagonist of the present invention may be also be employed to prevent skin aging due to sunburn by stimulating keratinocyte growth.

[0635] A polypeptide, polynucleotide, agonist, or antagonist of the present invention may also be employed for preventing hair loss, since FGF family members activate hair-forming cells and promotes melanocyte growth. Along the same lines, a polypeptide, polynucleotide, agonist, or antagonist of the present invention may be employed to stimulate growth and differentiation of hematopoietic cells and bone marrow cells when used in combination with other cytokines.

[0636] A polypeptide, polynucleotide, agonist, or antagonist of the present invention may also be employed to maintain organs before transplantation or for supporting cell culture of primary tissues. A polypeptide, polynucleotide, agonist, or antagonist of the present invention may also be employed for inducing tissue of mesodermal origin to differentiate in early embryos.

[0637] A polypeptide, polynucleotide, agonist, or antagonist of the present invention may also increase or decrease the differentiation or proliferation of embryonic stem cells, besides, as discussed above, hematopoietic lineage.

[0638] A polypeptide, polynucleotide, agonist, or antagonist of the present invention may also be used to modulate mammalian characteristics, such as body height, weight, hair color, eye color, skin, percentage of adipose tissue, pigmentation, size, and shape (e.g., cosmetic surgery). Similarly, a polypeptide, polynucleotide, agonist, or antagonist of the present invention may be used to modulate mammalian metabolism affecting catabolism, anabolism, processing, utilization, and storage of energy.

[0639] A polypeptide, polynucleotide, agonist, or antagonist of the present invention may be used to change a mammal's mental state or physical state by influencing biorhythms, caricadic rhythms, depression (including depressive disorders), tendency for violence, tolerance for pain, reproductive capabilities (preferably by Activin or Inhibin-like activity), hormonal or endocrine levels, appetite, libido, memory, stress, or other cognitive qualities.

[0640] A polypeptide, polynucleotide, agonist, or antagonist of the present invention may also be used as a food additive or preservative, such as to increase or decrease storage capabilities, fat content, lipid, protein, carbohydrate, vitamins, minerals, cofactors or other nutritional components.

[0641] The above-recited applications have uses in a wide variety of hosts. Such hosts include, but are not limited to, human, murine, rabbit, goat, guinea pig, camel, horse, mouse, rat, hamster, pig, micro-pig, chicken, goat, cow, sheep, dog, cat, non-human primate, and human. In specific embodiments, the host is a mouse, rabbit, goat, guinea pig, chicken, rat, hamster, pig, sheep, dog or cat. In preferred embodiments, the host is a mammal. In most preferred embodiments, the host is a human.

Other Preferred Embodiments

[0642] Other preferred embodiments of the claimed invention include an isolated nucleic acid molecule comprising a nucleotide sequence which is at least 95% identical to a sequence of at least about 50 contiguous nucleotides in the nucleotide sequence of SEQ ID NO:X or the complementary strand thereto, the nucleotide sequence as defined in column 5 of Table 1B.1 or columns 8 and 9 of Table 2 or the complementary strand thereto, and/or cDNA contained in ATCC Deposit No:Z.

[0643] Also preferred is a nucleic acid molecule wherein said sequence of contiguous nucleotides is included in the nucleotide sequence of the portion of SEQ ID NO:X as defined in column 5, “ORF (From-To)”, in Table 1B.1.

[0644] Also preferred is a nucleic acid molecule wherein said sequence of contiguous nucleotides is included in the nucleotide sequence of the portion of SEQ ID NO:X as defined in columns 8 and 9, “NT From” and “NT To” respectively, in Table 2.

[0645] Also preferred is an isolated nucleic acid molecule comprising a nucleotide sequence which is at least 95% identical to a sequence of at least about 150 contiguous nucleotides in the nucleotide sequence of SEQ ID NO:X or the complementary strand thereto, the nucleotide sequence as defined in column 5 of Table 1B.1 or columns 8 and 9 of Table 2 or the complementary strand thereto, and/or cDNA contained in ATCC Deposit No:Z.

[0646] Further preferred is an isolated nucleic acid molecule comprising a nucleotide sequence which is at least 95% identical to a sequence of at least about 500 contiguous nucleotides in the nucleotide sequence of SEQ ID NO:X or the complementary strand thereto, the nucleotide sequence as defined in column 5 of Table 1B.1 or columns 8 and 9 of Table 2 or the complementary strand thereto, and/or cDNA contained in ATCC Deposit No:Z.

[0647] A further preferred embodiment is a nucleic acid molecule comprising a nucleotide sequence which is at least 95% identical to the nucleotide sequence of the portion of SEQ ID NO:X defined in column 5, “ORF (From-To)”, in Table 1B.1.

[0648] A further preferred embodiment is a nucleic acid molecule comprising a nucleotide sequence which is at least 95% identical to the nucleotide sequence of the portion of SEQ ID NO:X defined in columns 8 and 9, “NT From” and “NT To”, respectively, in Table 2.

[0649] A further preferred embodiment is an isolated nucleic acid molecule comprising a nucleotide sequence which is at least 95% identical to the complete nucleotide sequence of SEQ ID NO:X or the complementary strand thereto, the nucleotide sequence as defined in column 5 of Table 1B.1 or columns 8 and 9 of Table 2 or the complementary strand thereto, and/or cDNA contained in ATCC Deposit No:Z.

[0650] Also preferred is an isolated nucleic acid molecule which hybridizes under stringent hybridization conditions to a nucleic acid molecule comprising a nucleotide sequence of SEQ ID NO:X or the complementary strand thereto, the nucleotide sequence as defined in column 5 of Table 1B.1 or columns 8 and 9 of Table 2 or the complementary strand thereto, and/or cDNA contained in ATCC Deposit No:Z, wherein said nucleic acid molecule which hybridizes does not hybridize under stringent hybridization conditions to a nucleic acid molecule having a nucleotide sequence consisting of only A residues or of only T residues.

[0651] Also preferred is a composition of matter comprising a DNA molecule which comprises the cDNA contained in ATCC Deposit No:Z.

[0652] Also preferred is an isolated nucleic acid molecule comprising a nucleotide sequence which is at least 95% identical to a sequence of at least 50 contiguous nucleotides of the cDNA sequence contained in ATCC Deposit No:Z.

[0653] Also preferred is an isolated nucleic acid molecule, wherein said sequence of at least 50 contiguous nucleotides is included in the nucleotide sequence of an open reading frame sequence encoded by cDNA contained in ATCC Deposit No:Z.

[0654] Also preferred is an isolated nucleic acid molecule comprising a nucleotide sequence which is at least 95% identical to sequence of at least 150 contiguous nucleotides in the nucleotide sequence encoded by cDNA contained in ATCC Deposit No:Z.

[0655] A further preferred embodiment is an isolated nucleic acid molecule comprising a nucleotide sequence which is at least 95% identical to sequence of at least 500 contiguous nucleotides in the nucleotide sequence encoded by cDNA contained in ATCC Deposit No:Z.

[0656] A further preferred embodiment is an isolated nucleic acid molecule comprising a nucleotide sequence which is at least 95% identical to the complete nucleotide sequence encoded by cDNA contained in ATCC Deposit No:Z.

[0657] A further preferred embodiment is a method for detecting in a biological sample a nucleic acid molecule comprising a nucleotide sequence which is at least 95% identical to a sequence of at least 50 contiguous nucleotides in a sequence selected from the group consisting of: a nucleotide sequence of SEQ ID NO:X or the complementary strand thereto; the nucleotide sequence as defined in column 5 of Table 1B.1 or columns 8 and 9 of Table 2 or the complementary strand thereto; and a nucleotide sequence encoded by cDNA contained in ATCC Deposit No:Z; which method comprises a step of comparing a nucleotide sequence of at least one nucleic acid molecule in said sample with a sequence selected from said group and determining whether the sequence of said nucleic acid molecule in said sample is at least 95% identical to said selected sequence.

[0658] Also preferred is the above method wherein said step of comparing sequences comprises determining the extent of nucleic acid hybridization between nucleic acid molecules in said sample and a nucleic acid molecule comprising said sequence selected from said group. Similarly, also preferred is the above method wherein said step of comparing sequences is performed by comparing the nucleotide sequence determined from a nucleic acid molecule in said sample with said sequence selected from said group. The nucleic acid molecules can comprise DNA molecules or RNA molecules.

[0659] A further preferred embodiment is a method for identifying the species, tissue or cell type of a biological sample which method comprises a step of detecting nucleic acid molecules in said sample, if any, comprising a nucleotide sequence that is at least 95% identical to a sequence of at least 50 contiguous nucleotides in a sequence selected from the group consisting of: a nucleotide sequence of SEQ ID NO:X or the complementary strand thereto; the nucleotide sequence as defined in column 5 of Table 1B.1 or columns 8 and 9 of Table 2 or the complementary strand thereto; and a nucleotide sequence of the cDNA contained in ATCC Deposit No:Z.

[0660] The method for identifying the species, tissue or cell type of a biological sample can comprise a step of detecting nucleic acid molecules comprising a nucleotide sequence in a panel of at least two nucleotide sequences, wherein at least one sequence in said panel is at least 95% identical to a sequence of at least 50 contiguous nucleotides in a sequence selected from said group.

[0661] Also preferred is a method for diagnosing in a subject a pathological condition associated with abnormal structure or expression of a nucleotide sequence of SEQ ID NO:X or the complementary strand thereto; the nucleotide sequence as defined in column 5 of Table 1B.1 or columns 8 and 9 of Table 2 or the complementary strand thereto; or the cDNA contained in ATCC Deposit No:Z which encodes a protein, wherein the method comprises a step of detecting in a biological sample obtained from said subject nucleic acid molecules, if any, comprising a nucleotide sequence that is at least 95% identical to a sequence of at least 50 contiguous nucleotides in a sequence selected from the group consisting of: a nucleotide sequence of SEQ ID NO:X or the complementary strand thereto; the nucleotide sequence as defined in column 5 of Table 1B.1 or columns 8 and 9 of Table 2 or the complementary strand thereto; and a nucleotide sequence of cDNA contained in ATCC Deposit No:Z.

[0662] The method for diagnosing a pathological condition can comprise a step of detecting nucleic acid molecules comprising a nucleotide sequence in a panel of at least two nucleotide sequences, wherein at least one sequence in said panel is at least 95% identical to a sequence of at least 50 contiguous nucleotides in a sequence selected from said group.

[0663] Also preferred is a composition of matter comprising isolated nucleic acid molecules wherein the nucleotide sequences of said nucleic acid molecules comprise a panel of at least two nucleotide sequences, wherein at least one sequence in said panel is at least 95% identical to a sequence of at least 50 contiguous nucleotides in a sequence selected from the group consisting of: a nucleotide sequence of SEQ ID NO:X or the complementary strand thereto; the nucleotide sequence as defined in column 5 of Table 1B.1 or columns 8 and 9 of Table 2 or the complementary strand thereto; and a nucleotide sequence encoded by cDNA contained in ATCC Deposit No:Z. The nucleic acid molecules can comprise DNA molecules or RNA molecules.

[0664] Also preferred is a composition of matter comprising isolated nucleic acid molecules wherein the nucleotide sequences of said nucleic acid molecules comprise a DNA microarray or “chip” of at least 1, 2, 3, 4, 5, 6, 7, 8, 9, 10, 15, 20, 25, 30, 40, 50, 100, 150, 200, 250, 300, 500, 1000, 2000, 3000, or 4000 nucleotide sequences, wherein at least one sequence in said DNA microarray or “chip” is at least 95% identical to a sequence of at least 50 contiguous nucleotides in a sequence selected from the group consisting of: a nucleotide sequence of SEQ ID NO:X wherein X is any integer as defined in Table 1A and/or Table 1B.1; and a nucleotide sequence encoded by a human cDNA clone identified by a cDNA “Clone ID” in Table 1A and/or Table 1B.1.

[0665] Also preferred is an isolated polypeptide comprising an amino acid sequence at least 90% identical to a sequence of at least about 10 contiguous amino acids in the polypeptide sequence of SEQ ID NO:Y; a polypeptide encoded by SEQ ID NO:X or the complementary strand thereto; the polypeptide encoded by the nucleotide sequence as defined in columns 8 and 9 of Table 2; and/or a polypeptide encoded by cDNA contained in ATCC Deposit No:Z.

[0666] Also preferred is an isolated polypeptide comprising an amino acid sequence at least 95% identical to a sequence of at least about 30 contiguous amino acids in the amino acid sequence of SEQ ID NO:Y; a polypeptide encoded by SEQ ID NO:X or the complementary strand thereto; the polypeptide encoded by the nucleotide sequence as defined in columns 8 and 9 of Table 2; and/or a polypeptide encoded by cDNA contained in ATCC Deposit No:Z.

[0667] Further preferred is an isolated polypeptide comprising an amino acid sequence at least 95% identical to a sequence of at least about 100 contiguous amino acids in the amino acid sequence of SEQ ID NO:Y; a polypeptide encoded by SEQ ID NO:X or the complementary strand thereto; the polypeptide encoded by the nucleotide sequence as defined in columns 8 and 9 of Table 2; and/or a polypeptide encoded by cDNA contained in ATCC Deposit No:Z.

[0668] Further preferred is an isolated polypeptide comprising an amino acid sequence at least 95% identical to the complete amino acid sequence of SEQ ID NO:Y; a polypeptide encoded by SEQ ID NO:X or the complementary strand thereto; the polypeptide encoded by the nucleotide sequence as defined in columns 8 and 9 of Table 2; and/or a polypeptide encoded by cDNA contained in ATCC Deposit No:Z.

[0669] Further preferred is an isolated polypeptide comprising an amino acid sequence at least 90% identical to a sequence of at least about 10 contiguous amino acids in the complete amino acid sequence of a polypeptide encoded by contained in ATCC Deposit No:Z.

[0670] Also preferred is a polypeptide wherein said sequence of contiguous amino acids is included in the amino acid sequence of a portion of said polypeptide encoded by cDNA contained in ATCC Deposit No:Z; a polypeptide encoded by SEQ ID NO:X or the complementary strand thereto; the polypeptide encoded by the nucleotide sequence as defined in columns 8 and 9 of Table 2; and/or the polypeptide sequence of SEQ ID NO:Y.

[0671] Also preferred is an isolated polypeptide comprising an amino acid sequence at least 95% identical to a sequence of at least about 30 contiguous amino acids in the amino acid sequence of a polypeptide encoded by the cDNA contained in ATCC Deposit No:Z.

[0672] Also preferred is an isolated polypeptide comprising an amino acid sequence at least 95% identical to a sequence of at least about 100 contiguous amino acids in the amino acid sequence of a polypeptide encoded by cDNA contained in ATCC Deposit No:Z.

[0673] Also preferred is an isolated polypeptide comprising an amino acid sequence at least 95% identical to the amino acid sequence of a polypeptide encoded by the cDNA contained in ATCC Deposit No:Z.

[0674] Further preferred is an isolated antibody which binds specifically to a polypeptide comprising an amino acid sequence that is at least 90% identical to a sequence of at least 10 contiguous amino acids in a sequence selected from the group consisting of: a polypeptide sequence of SEQ ID NO:Y; a polypeptide encoded by SEQ ID NO:X or the complementary strand thereto; the polypeptide encoded by the nucleotide sequence as defined in columns 8 and 9 of Table 2; and a polypeptide encoded by the cDNA contained in ATCC Deposit No:Z.

[0675] Further preferred is a method for detecting in a biological sample a polypeptide comprising an amino acid sequence which is at least 90% identical to a sequence of at least 10 contiguous amino acids in a sequence selected from the group consisting of: a polypeptide sequence of SEQ ID NO:Y; a polypeptide encoded by SEQ ID NO:X or the complementary strand thereto; the polypeptide encoded by the nucleotide sequence as defined in columns 8 and 9 of Table 2; and a polypeptide encoded by the cDNA contained in ATCC Deposit No:Z; which method comprises a step of comparing an amino acid sequence of at least one polypeptide molecule in said sample with a sequence selected from said group and determining whether the sequence of said polypeptide molecule in said sample is at least 90% identical to said sequence of at least 10 contiguous amino acids.

[0676] Also preferred is the above method wherein said step of comparing an amino acid sequence of at least one polypeptide molecule in said sample with a sequence selected from said group comprises determining the extent of specific binding of polypeptides in said sample to an antibody which binds specifically to a polypeptide comprising an amino acid sequence that is at least 90% identical to a sequence of at least 10 contiguous amino acids in a sequence selected from the group consisting of: a polypeptide sequence of SEQ ID NO:Y; a polypeptide encoded by SEQ ID NO:X or the complementary strand thereto; the polypeptide encoded by the nucleotide sequence as defined in columns 8 and 9 of Table 2; and a polypeptide encoded by the cDNA contained in ATCC Deposit No:Z.

[0677] Also preferred is the above method wherein said step of comparing sequences is performed by comparing the amino acid sequence determined from a polypeptide molecule in said sample with said sequence selected from said group.

[0678] Also preferred is a method for identifying the species, tissue or cell type of a biological sample which method comprises a step of detecting polypeptide molecules in said sample, if any, comprising an amino acid sequence that is at least 90% identical to a sequence of at least 10 contiguous amino acids in a sequence selected from the group consisting of: polypeptide sequence of SEQ ID NO:Y; a polypeptide encoded by SEQ ID NO:X or the complementary strand thereto; the polypeptide encoded by the nucleotide sequence as defined in columns 8 and 9 of Table 2; and a polypeptide encoded by the cDNA contained in ATCC Deposit No:Z.

[0679] Also preferred is the above method for identifying the species, tissue or cell type of a biological sample, which method comprises a step of detecting polypeptide molecules comprising an amino acid sequence in a panel of at least two amino acid sequences, wherein at least one sequence in said panel is at least 90% identical to a sequence of at least 10 contiguous amino acids in a sequence selected from the above group.

[0680] Also preferred is a method for diagnosing in a subject a pathological condition associated with abnormal structure or expression of a nucleic acid sequence identified in Table 1A, 1B or Table 2 encoding a polypeptide, which method comprises a step of detecting in a biological sample obtained from said subject polypeptide molecules comprising an amino acid sequence in a panel of at least two amino acid sequences, wherein at least one sequence in said panel is at least 90% identical to a sequence of at least 10 contiguous amino acids in a sequence selected from the group consisting of: polypeptide sequence of SEQ ID NO:Y; a polypeptide encoded by SEQ ID NO:X or the complementary strand thereto; the polypeptide encoded by the nucleotide sequence as defined in columns 8 and 9 of Table 2; and a polypeptide encoded by the cDNA contained in ATCC Deposit No:Z.

[0681] In any of these methods, the step of detecting said polypeptide molecules includes using an antibody.

[0682] Also preferred is an isolated nucleic acid molecule comprising a nucleotide sequence which is at least 95% identical to a nucleotide sequence encoding a polypeptide wherein said polypeptide comprises an amino acid sequence that is at least 90% identical to a sequence of at least 10 contiguous amino acids in a sequence selected from the group consisting of: polypeptide sequence of SEQ ID NO:Y; a polypeptide encoded by SEQ ID NO:X or the complementary strand thereto; the polypeptide encoded by the nucleotide sequence as defined in columns 8 and 9 of Table 2; and a polypeptide encoded by the cDNA contained in ATCC Deposit No:Z.

[0683] Also preferred is an isolated nucleic acid molecule, wherein said nucleotide sequence encoding a polypeptide has been optimized for expression of said polypeptide in a prokaryotic host.

[0684] Also preferred is a polypeptide molecule, wherein said polypeptide comprises an amino acid sequence selected from the group consisting of: polypeptide sequence of SEQ ID NO:Y; a polypeptide encoded by SEQ ID NO:X or the complementary strand thereto; the polypeptide encoded by the nucleotide sequence as defined in columns 8 and 9 of Table 2; and a polypeptide encoded by the cDNA contained in ATCC Deposit No:Z.

[0685] Further preferred is a method of making a recombinant vector comprising inserting any of the above isolated nucleic acid molecule into a vector. Also preferred is the recombinant vector produced by this method. Also preferred is a method of making a recombinant host cell comprising introducing the vector into a host cell, as well as the recombinant host cell produced by this method.

[0686] Also preferred is a method of making an isolated polypeptide comprising culturing this recombinant host cell under conditions such that said polypeptide is expressed and recovering said polypeptide. Also preferred is this method of making an isolated polypeptide, wherein said recombinant host cell is a eukaryotic cell and said polypeptide is a human protein comprising an amino acid sequence selected from the group consisting of: polypeptide sequence of SEQ ID NO:Y; a polypeptide encoded by SEQ ID NO:X or the complementary strand thereto; the polypeptide encoded by the nucleotide sequence as defined in columns 8 and 9 of Table 2; and a polypeptide encoded by the cDNA contained in ATCC Deposit No:Z. The isolated polypeptide produced by this method is also preferred.

[0687] Also preferred is a method of treatment of an individual in need of an increased level of a protein activity, which method comprises administering to such an individual a Therapeutic comprising an amount of an isolated polypeptide, polynucleotide, immunogenic fragment or analogue thereof, binding agent, antibody, or antigen binding fragment of the claimed invention effective to increase the level of said protein activity in said individual.

[0688] Also preferred is a method of treatment of an individual in need of a decreased level of a protein activity, which method comprised administering to such an individual a Therapeutic comprising an amount of an isolated polypeptide, polynucleotide, immunogenic fragment or analogue thereof, binding agent, antibody, or antigen binding fragment of the claimed invention effective to decrease the level of said protein activity in said individual.

[0689] Also preferred is a method of treatment of an individual in need of a specific delivery of toxic compositions to diseased cells (e.g., tumors, leukemias or lymphomas), which method comprises administering to such an individual a Therapeutic comprising an amount of an isolated polypeptide of the invention, including, but not limited to a binding agent, or antibody of the claimed invention that are associated with toxin or cytotoxic prodrugs.

[0690] Having generally described the invention, the same will be more readily understood by reference to the following examples, which are provided by way of illustration and are not intended as limiting.

Description of Table 6

[0691] Table 6 summarizes some of the ATCC Deposits, Deposit dates, and ATCC designation numbers of deposits made with the ATCC in connection with the present application. These deposits were made in addition to those described in the Table 1A.

TABLE 6

| ATCC Deposits | Deposit Date | ATCC Designation Number |
|---|---|---|
| LP01, LP02, LP03, LP04, | May-20-97 | 209059, 209060, 209061, |
| LP05, LP06, LP07, LP08, | | 209062, 209063, 209064, |
| LP09, LP10, LP11, | | 209065, 209066, 209067, |
| | | 209068, 209069 |
| LP12 | Jan-12-98 | 209579 |
| LP13 | Jan-12-98 | 209578 |
| LP14 | Jul-16-98 | 203067 |
| LP15 | Jul-16-98 | 203068 |
| LP16 | Feb-1-99 | 203609 |
| LP17 | Feb-1-99 | 203610 |
| LP20 | Nov-17-98 | 203485 |
| LP21 | Jun-18-99 | PTA-252 |
| LP22 | Jun-18-99 | PTA-253 |
| LP23 | Dec-22-99 | PTA-1081 |

### EXAMPLES

### Example 1

### Isolation of a Selected cDNA Clone From the Deposited Sample

[0692] Each ATCC Deposit No:Z is contained in a plasmid vector. Table 7 identifies the vectors used to construct the cDNA library from which each clone was isolated. In many cases, the vector used to construct the library is a phage vector from which a plasmid has been excised. The following correlates the related plasmid for each phage vector used in constructing the cDNA library. For example, where a particular clone is identified in Table 7 as being isolated in the vector “Lambda Zap,” the corresponding deposited clone is in “pBluescript.”

| Vector Used to Construct Library | Corresponding Deposited Plasmid |
|---|---|
| Lambda Zap | pBluescript (pBS) |
| Uni-Zap XR | pBluescript (pBS) |
| Zap Express | pBK |
| lafmid BA | plafmid BA |
| pSport1 | pSport1 |
| pCMVSport 2.0 | pCMVSport 2.0 |
| pCMVSport 3.0 | pCMVSport 3.0 |
| pCR ® 2.1 | pCR ® 2.1 |

[0693] Vectors Lambda Zap (U.S. Pat. Nos. 5,128,256 and 5,286,636), Uni-Zap XR (U.S. Pat. Nos. 5,128,256 and 5,286,636), Zap Express (U.S. Pat. Nos. 5,128,256 and 5,286,636), pBluescript (pBS) (Short, J. M. et al., Nucleic Acids Res. 16:7583-7600 (1988); Alting-Mees, M. A. and Short, J. M., Nucleic Acids Res. 17:9494 (1989)) and pBK (Alting-Mees, M. A. et al., Strategies 5:58-61 (1992)) are commercially available from Stratagene Cloning Systems, Inc., 11011 N. Torrey Pines Road, La Jolla, Calif., 92037. pBS contains an ampicillin resistance gene and pBK contains a neomycin resistance gene. Both can be transformed into E. coli strain XL-1 Blue, also available from Stratagene. pBS comes in 4 forms SK+, SK−, KS+ and KS. The S and K refers to the orientation of the polylinker to the T7 and T3 primer sequences which flank the polylinker region (“S” is for SacI and “K” is for KpnI which are the first sites on each respective end of the linker). “+” or “−” refer to the orientation of the f1 origin of replication (“ori”), such that in one orientation, single stranded rescue initiated from the f1 ori generates sense strand DNA and in the other, antisense.

[0694] Vectors pSport1, pCMVSport 2.0 and pCMVSport 3.0, were obtained from Life Technologies, Inc., P.O. Box 6009, Gaithersburg, Md. 20897. All Sport vectors contain an ampicillin resistance gene and may be transformed into E. coli strain DH10B, also available from Life Technologies. (See, for instance, Gruber, C. E., et al., Focus 15:59 (1993)). Vector lafmid BA (Bento Soares, Columbia University, NY) contains an ampicillin resistance gene and can be transformed into E. coli strain XL-1 Blue. Vector pCR®2.1, which is available from Invitrogen, 1600 Faraday Avenue, Carlsbad, Calif. 92008, contains an ampicillin resistance gene and may be transformed into E. coli strain DH10B, available from Life Technologies. (See, for instance, Clark, J. M., Nuc. Acids Res. 16:9677-9686 (1988) and Mead, D. et al., Bio/Technology 9: (1991)). Preferably, a polynucleotide of the present invention does not comprise the phage vector sequences identified for the particular clone in Table 7, as well as the corresponding plasmid vector sequences designated above.

[0695] The deposited material in the sample assigned the ATCC Deposit Number cited by reference to Table 1A, Table 2, Table 6 and Table 7 for any given cDNA clone also may contain one or more additional plasmids, each comprising a cDNA clone different from that given clone. Thus, deposits sharing the same ATCC Deposit Number contain at least a plasmid for each ATCC Deposit No:Z.

TABLE 7

| | | | ATCC |
|---|---|---|---|
| Libraries owned by Catalog | Catalog Description | Vector | Deposit |
| HUKA HUKB HUKC HUKD | Human Uterine Cancer | Lambda ZAP II | LP01 |
| HUKE HUKF HUKG | | | |
| HCNA HCNB | Human Colon | Lambda Zap II | LP01 |
| HFFA | Human Fetal Brain, random | Lambda Zap II | LP01 |
| | primed | | |
| HTWA | Resting T-Cell | Lambda ZAP II | LP01 |
| HBQA | Early Stage Human Brain, | Lambda ZAP II | LP01 |
| | random primed | | |
| HLMB HLMF HLMG HLMH | breast lymph node CDNA library | Lambda ZAP II | LP01 |
| HLMI HLMJ HLMM HLMN | | | |
| HCQA HCQB | human colon cancer | Lamda ZAP II | LP01 |
| HMEA HMEC HMED HMEE | Human Microvascular | Lambda ZAP II | LP01 |
| HMEF HMEG HMEI HMEJ | Endothelial Cells, fract. A | | |
| HMEK HMEL | | | |
| HUSA HUSC | Human Umbilical Vein | Lambda ZAP II | LP01 |
| | Endothelial Cells, fract. A | | |
| HLQA HLQB | Hepatocellular Tumor | Lambda ZAP II | LP01 |
| HHGA HHGB HHGC HHGD | Hemangiopericytoma | Lambda ZAP II | LP01 |
| HSDM | Human Striatum Depression, re- | Lambda ZAP II | LP01 |
| | rescue | | |
| HUSH | H Umbilical Vein Endothelial | Lambda ZAP II | LP01 |
| | Cells, frac A, re-excision | | |
| HSGS | Salivary gland, subtracted | Lambda ZAP II | LP01 |
| HFXA HFXB HFXC HFXD | Brain frontal cortex | Lambda ZAP II | LP01 |
| HFXE HFXF HFXG HFXH | | | |
| HPQA HPQB HPQC | PERM TF274 | Lambda ZAP II | LP01 |
| HFXJ HFXK | Brain Frontal Cortex, re-excision | Lambda ZAP II | LP01 |
| HCWA HCWB HCWC HCWD | CD34 positive cells (Cord Blood) | ZAP Express | LP02 |
| HCWE HCWF HCWG HCWH | | | |
| HCWI HCWJ HCWK | | | |
| HCUA HCUB HCUC | CD34 depleted Buffy Coat (Cord | ZAP Express | LP02 |
| | Blood) | | |
| HRSM | A-14 cell line | ZAP Express | LP02 |
| HRSA | A1-CELL LINE | ZAP Express | LP02 |
| HCUD HCUE HCUF HCUG | CD34 depleted Buffy Coat (Cord | ZAP Express | LP02 |
| HCUH HCUI | Blood), re-excision | | |
| HBXE HBXF HBXG | H. Whole Brain #2, re-excision | ZAP Express | LP02 |
| HRLM | L8 cell line | ZAP Express | LP02 |
| HBXA HBXB HBXC HBXD | Human Whole Brain #2 - Oligo | ZAP Express | LP02 |
| | dT > 1.5 Kb | | |
| HUDA HUDB HUDC | Testes | ZAP Express | LP02 |
| HHTM HHTN HHTO | H. hypothalamus, frac A; re- | ZAP Express | LP02 |
| | excision | | |
| HHTL | H. hypothalamus, frac A | ZAP Express | LP02 |
| HASA HASD | Human Adult Spleen | Uni-ZAP XR | LP03 |
| HFKC HFKD HFKE HFKF | Human Fetal Kidney | Uni-ZAP XR | LP03 |
| HFKG | | | |
| HE8A HE8B HE8C HE8D | Human 8 Week Whole Embryo | Uni-ZAP XR | LP03 |
| HE8E HE8F HE8M HE8N | | | |
| HGBA HGBD HGBE HGBF | Human Gall Bladder | Uni-ZAP XR | LP03 |
| HGBG HGBH HGBI | | | |
| HLHA HLHB HLHC HLHD | Human Fetal Lung III | Uni-ZAP XR | LP03 |
| HLHE HLHF HLHG HLHH | | | |
| HLHQ | | | |
| HPMA HPMB HPMC HPMD | Human Placenta | Uni-ZAP XR | LP03 |
| HPME HPMF HPMG HPMH | | | |
| HPRA HPRB HPRC HPRD | Human Prostate | Uni-ZAP XR | LP03 |
| HSIA HSIC HSID HSIE | Human Adult Small Intestine | Uni-ZAP XR | LP03 |
| HTEA HTEB HTEC HTED | Human Testes | Uni-ZAP XR | LP03 |
| HTEE HTEF HTEG HTEH | | | |
| HTEI HTEJ HTEK | | | |
| HTPA HTPB HTPC HTPD | Human Pancreas Tumor | Uni-ZAP XR | LP03 |
| HTPE | | | |
| HTTA HTTB HTTC HTTD | Human Testes Tumor | Uni-ZAP XR | LP03 |
| HTTE HTTF | | | |
| HAPA HAPB HAPC HAPM | Human Adult Pulmonary | Uni-ZAP XR | LP03 |
| HETA HETB HETC HETD | Human Endometrial Tumor | Uni-ZAP XR | LP03 |
| HETE HETF HETG HETH | | | |
| HETI | | | |
| HHFB HHFC HHFD HHFE | Human Fetal Heart | Uni-ZAP XR | LP03 |
| HHFF HHFG HHFH HHFI | | | |
| HHPB HHPC HHPD HHPE | Human Hippocampus | Uni-ZAP XR | LP03 |
| HHPF HHPG HHPH | | | |
| HCE1 HCE2 HCE3 HCE4 | Human Cerebellum | Uni-ZAP XR | LP03 |
| HCE5 HCEB HCEC HCED | | | |
| HCEE HCEF HCEG | | | |
| HUVB HUVC HUVD HUVE | Human Umbilical Vein, Endo. | Uni-ZAP XR | LP03 |
| | remake | | |
| HSTA HSTB HSTC HSTD | Human Skin Tumor | Uni-ZAP XR | LP03 |
| HTAA HTAB HTAC HTAD | Human Activated T-Cells | Uni-ZAP XR | LP03 |
| HTAE | | | |
| HFEA HFEB HFEC | Human Fetal Epithelium (Skin) | Uni-ZAP XR | LP03 |
| HJPA HJPB HJPC HJPD | HUMAN JURKAT | Uni-ZAP XR | LP03 |
| | MEMBRANE BOUND | | |
| | POLYSOMES | | |
| HESA | Human epithelioid sarcoma | Uni-Zap XR | LP03 |
| HLTA HLTB HLTC HLTD | Human T-Cell Lymphoma | Uni-ZAP XR | LP03 |
| HLTE HLTF | | | |
| HFTA HFTB HFTC HFTD | Human Fetal Dura Mater | Uni-ZAP XR | LP03 |
| HRDA HRDB HRDC HRDD | Human Rhabdomyosarcoma | Uni-ZAP XR | LP03 |
| HRDE HRDF | | | |
| HCAA HCAB HCAC | Cem cells cyclohexamide treated | Uni-ZAP XR | LP03 |
| HRGA HRGB HRGC HRGD | Raji Cells, cyclohexamide treated | Uni-ZAP XR | LP03 |
| HSUA HSUB HSUC HSUM | Supt Cells, cyclohexamide treated | Uni-ZAP XR | LP03 |
| HT4A HT4C HT4D | Activated T-Cells, 12 hrs. | Uni-ZAP XR | LP03 |
| HE9A HE9B HE9C HE9D | Nine Week Old Early Stage | Uni-ZAP XR | LP03 |
| HE9E HE9F HE9G HE9H | Human | | |
| HE9M HE9N | | | |
| HATA HATB HATC HATD | Human Adrenal Gland Tumor | Uni-ZAP XR | LP03 |
| HATE | | | |
| HT5A | Activated T-Cells, 24 hrs. | Uni-ZAP XR | LP03 |
| HFGA HFGM | Human Fetal Brain | Uni-ZAP XR | LP03 |
| HNEA HNEB HNEC HNED | Human Neutrophil | Uni-ZAP XR | LP03 |
| HNEE | | | |
| HBGB HBGD | Human Primary Breast Cancer | Uni-ZAP XR | LP03 |
| HBNA HBNB | Human Normal Breast | Uni-ZAP XR | LP03 |
| HCAS | Cem Cells, cyclohexamide | Uni-ZAP XR | LP03 |
| | treated, subtra | | |
| HHPS | Human Hippocampus, subtracted | pBS | LP03 |
| HKCS HKCU | Human Colon Cancer, subtracted | pBS | LP03 |
| HRGS | Raji cells, cyclohexamide treated, | pBS | LP03 |
| | subtracted | | |
| HSUT | Supt cells, cyclohexamide treated, | pBS | LP03 |
| | differentially expressed | | |
| HT4S | Activated T-Cells, 12 hrs, | Uni-ZAP XR | LP03 |
| | subtracted | | |
| HCDA HCDB HCDC HCDD | Human Chondrosarcoma | Uni-ZAP XR | LP03 |
| HCDE | | | |
| HOAA HOAB HOAC | Human Osteosarcoma | Uni-ZAP XR | LP03 |
| HTLA HTLB HTLC HTLD | Human adult testis, large inserts | Uni-ZAP XR | LP03 |
| HTLE HTLF | | | |
| HLMA HLMC HLMD | Breast Lymph node cDNA library | Uni-ZAP XR | LP03 |
| H6EA H6EB H6EC | HL-60, PMA 4 H | Uni-ZAP XR | LP03 |
| HTXA HTXB HTXC HTXD | Activated T-Cell | Uni-ZAP XR | LP03 |
| HTXE HTXF HTXG HTXH | (12 hs)/Thiouridine labelledEco | | |
| HNFA HNFB HNFC HNFD | Human Neutrophil, Activated | Uni-ZAP XR | LP03 |
| HNFE HNFF HNFG HNFH | | | |
| HNFJ | | | |
| HTOB HTOC | HUMAN TONSILS, FRACTION 2 | Uni-ZAP XR | LP03 |
| HMGB | Human OB MG63 control | Uni-ZAP XR | LP03 |
| | fraction I | | |
| HOPB | Human OB HOS control fraction I | Uni-ZAP XR | LP03 |
| HORB | Human OB HOS treated (10 nM | Uni-ZAP XR | LP03 |
| | E2) fraction I | | |
| HSVA HSVB HSVC | Human Chronic Synovitis | Uni-ZAP XR | LP03 |
| HROA | HUMAN STOMACH | Uni-ZAP XR | LP03 |
| HBJA HBJB HBJC HBJD | HUMAN B CELL LYMPHOMA | Uni-ZAP XR | LP03 |
| HBJE HBJF HBJG HBJH HBJI | | | |
| HBJJ HBJK | | | |
| HCRA HCRB HCRC | human corpus colosum | Uni-ZAP XR | LP03 |
| HODA HODB HODC HODD | human ovarian cancer | Uni-ZAP XR | LP03 |
| HDSA | Dermatofibrosarcoma | Uni-ZAP XR | LP03 |
| | Protuberance | | |
| HMWA HMWB HMWC | Bone Marrow Cell Line (RS4; 11) | Uni-ZAP XR | LP03 |
| HMWD HMWE HMWF | | | |
| HMWG HMWH HMWI | | | |
| HMWJ | | | |
| HSOA | stomach cancer (human) | Uni-ZAP XR | LP03 |
| HERA | SKIN | Uni-ZAP XR | LP03 |
| HMDA | Brain-medulloblastoma | Uni-ZAP XR | LP03 |
| HGLA HGLB HGLD | Glioblastoma | Uni-ZAP XR | LP03 |
| HEAA | H. Atrophic Endometrium | Uni-ZAP XR | LP03 |
| HBCA HBCB | H. Lymph node breast Cancer | Uni-ZAP XR | LP03 |
| HPWT | Human Prostate BPH, re-excision | Uni-ZAP XR | LP03 |
| HFVG HFVH HFVI | Fetal Liver, subtraction II | pBS | LP03 |
| HNFI | Human Neutrophils, Activated, | pBS | LP03 |
| | re-excision | | |
| HBMB HBMC HBMD | Human Bone Marrow, re-excision | pBS | LP03 |
| HKML HKMM HKMN | H. Kidney Medulla, re-excision | pBS | LP03 |
| HKIX HKIY | H. Kidney Cortex, subtracted | pBS | LP03 |
| HADT | H. Amygdala Depression, | pBS | LP03 |
| | subtracted | | |
| H6AS | HI-60, untreated, subtracted | Uni-ZAP XR | LP03 |
| H6ES | HL-60, PMA 4 H, subtracted | Uni-ZAP XR | LP03 |
| H6BS | HL-60, RA 4 h, Subtracted | Uni-ZAP XR | LP03 |
| H6CS | HL-60, PMA 1 d, subtracted | Uni-ZAP XR | LP03 |
| HTXJ HTXK | Activated T- | Uni-ZAP XR | LP03 |
| | cell(12 h)/Thiouridine-re-excision | | |
| HMSA HMSB HMSC HMSD | Monocyte activated | Uni-ZAP XR | LP03 |
| HMSE HMSF HMSG HMSH | | | |
| HMSI HMSJ HMSK | | | |
| HAGA HAGB HAGC HAGD | Human Amygdala | Uni-ZAP XR | LP03 |
| HAGE HAGF | | | |
| HSRA HSRB HSRE | STROMAL - | Uni-ZAP XR | LP03 |
| | OSTEOCLASTOMA | | |
| HSRD HSRF HSRG HSRH | Human Osteoclastoma Stromal | Uni-ZAP XR | LP03 |
| | Cells - unamplified | | |
| HSQA HSQB HSQC HSQD | Stromal cell TF274 | Uni-ZAP XR | LP03 |
| HSQE HSQF HSQG | | | |
| HSKA HSKB HSKC HSKD | Smooth muscle, serum treated | Uni-ZAP XR | LP03 |
| HSKE HSKF HSKZ | | | |
| HSLA HSLB HSLC HSLD | Smooth muscle, control | Uni-ZAP XR | LP03 |
| HSLE HSLF HSLG | | | |
| HSDA HSDD HSDE HSDF | Spinal cord | Uni-ZAP XR | LP03 |
| HSDG HSDH | | | |
| HPWS | Prostate-BPH subtracted II | pBS | LP03 |
| HSKW HSKX HSKY | Smooth Muscle - HASTE | pBS | LP03 |
| | normalized | | |
| HFPB HFPC HFPD | H. Frontal cortex, epileptic; re- | Uni-ZAP XR | LP03 |
| | excision | | |
| HSDI HSDJ HSDK | Spinal Cord, re-excision | Uni-ZAP XR | LP03 |
| HSKN HSKO | Smooth Muscle Serum Treated, | pBS | LP03 |
| | Norm | | |
| HSKG HSKH HSKI | Smooth muscle, serum | pBS | LP03 |
| | induced, re-exc | | |
| HFCA HFCB HFCC HFCD | Human Fetal Brain | Uni-ZAP XR | LP04 |
| HFCE HFCF | | | |
| HPTA HPTB HPTD | Human Pituitary | Uni-ZAP XR | LP04 |
| HTHB HTHC HTHD | Human Thymus | Uni-ZAP XR | LP04 |
| HE6B HE6C HE6D HE6E | Human Whole Six Week Old | Uni-ZAP XR | LP04 |
| HE6F HE6G HE6S | Embryo | | |
| HSSA HSSB HSSC HSSD | Human Synovial Sarcoma | Uni-ZAP XR | LP04 |
| HSSE HSSF HSSG HSSH | | | |
| HSSI HSSJ HSSK | | | |
| HB7T | 7 Week Old Early Stage Human, | Uni-ZAP XR | LP04 |
| | subtracted | | |
| HEPA HEPB HEPC | Human Epididymus | Uni-ZAP XR | LP04 |
| HSNA HSNB HSNC HSNM | Human Synovium | Uni-ZAP XR | LP04 |
| HSNN | | | |
| HPFB HPFC HPFD HPFE | Human Prostate Cancer, Stage C | Uni-ZAP XR | LP04 |
| | fraction | | |
| HE2A HE2D HE2E HE2H | 12 Week Old Early Stage Human | Uni-ZAP XR | LP04 |
| HE2I HE2M HE2N HE2O | | | |
| HE2B HE2C HE2F HE2G | 12 Week Old Early Stage Human, | Uni-ZAP XR | LP04 |
| HE2P HE2Q | II | | |
| HPTS HPTT HPTU | Human Pituitary, subtracted | Uni-ZAP XR | LP04 |
| HAUA HAUB HAUC | Amniotic Cells - TNF induced | Uni-ZAP XR | LP04 |
| HAQA HAQB HAQC HAQD | Amniotic Cells - Primary Culture | Uni-ZAP XR | LP04 |
| HWTA HWTB HWTC | wilm's tumor | Uni-ZAP XR | LP04 |
| HBSD | Bone Cancer, re-excision | Uni-ZAP XR | LP04 |
| HSGB | Salivary gland, re-excision | Uni-ZAP XR | LP04 |
| HSJA HSJB HSJC | Smooth muscle-ILb induced | Uni-ZAP XR | LP04 |
| HSXA HSXB HSXC HSXD | Human Substantia Nigra | Uni-ZAP XR | LP04 |
| HSHA HSHB HSHC | Smooth muscle, IL1b induced | Uni-ZAP XR | LP04 |
| HOUA HOUB HOUC HOUD | Adipocytes | Uni-ZAP XR | LP04 |
| HOUE | | | |
| HPWA HPWB HPWC HPWD | Prostate BPH | Uni-ZAP XR | LP04 |
| HPWE | | | |
| HELA HELB HELC HELD | Endothelial cells-control | Uni-ZAP XR | LP04 |
| HELE HELF HELG HELH | | | |
| HEMA HEMB HEMC HEMD | Endothelial-induced | Uni-ZAP XR | LP04 |
| HEME HEMF HEMG HEMH | | | |
| HBIA HBIB HBIC | Human Brain, Striatum | Uni-ZAP XR | LP04 |
| HHSA HHSB HHSC HHSD | Human | Uni-ZAP XR | LP04 |
| HHSE | Hypothalmus, Schizophrenia | | |
| HNGA HNGB HNGC HNGD | neutrophils control | Uni-ZAP XR | LP04 |
| HNGE HNGF HNGG HNGH | | | |
| HNGI HNGJ | | | |
| HNHA HNHB HNHC HNHD | Neutrophils IL-1 and LPS | Uni-ZAP XR | LP04 |
| HNHE HNHF HNHG HNHH | induced | | |
| HNHI HNHJ | | | |
| HSDB HSDC | STRIATUM DEPRESSION | Uni-ZAP XR | LP04 |
| HHPT | Hypothalamus | Uni-ZAP XR | LP04 |
| HSAT HSAU HSAV HSAW | Anergic T-cell | Uni-ZAP XR | LP04 |
| HSAX HSAY HSAZ | | | |
| HBMS HBMT HBMU HBMV | Bone marrow | Uni-ZAP XR | LP04 |
| HBMW HBMX | | | |
| HOEA HOEB HOEC HOED | Osteoblasts | Uni-ZAP XR | LP04 |
| HOEE HOEF HOEJ | | | |
| HAIA HAIB HAIC HAID | Epithelial-TNFa and INF induced | Uni-ZAP XR | LP04 |
| HAIE HAIF | | | |
| HTGA HTGB HTGC HTGD | Apoptotic T-cell | Uni-ZAP XR | LP04 |
| HMCA HMCB HMCC HMCD | Macrophage-oxLDL | Uni-ZAP XR | LP04 |
| HMCE | | | |
| HMAA HMAB HMAC HMAD | Macrophage (GM-CSF treated) | Uni-ZAP XR | LP04 |
| HMAE HMAF HMAG | | | |
| HPHA | Normal Prostate | Uni-ZAP XR | LP04 |
| HPIA HPIB HPIC | LNCAP prostate cell line | Uni-ZAP XR | LP04 |
| HPJA HPJB HPJC | PC3 Prostate cell line | Uni-ZAP XR | LP04 |
| HOSE HOSF HOSG | Human Osteoclastoma, re- | Uni-ZAP XR | LP04 |
| | excision | | |
| HTGE HTGF | Apoptotic T-cell, re-excision | Uni-ZAP XR | LP04 |
| HMAJ HMAK | H Macrophage (GM-CSF | Uni-ZAP XR | LP04 |
| | treated), re-excision | | |
| HACB HACC HACD | Human Adipose Tissue, re- | Uni-ZAP XR | LP04 |
| | excision | | |
| HFPA | H. Frontal Cortex, Epileptic | Uni-ZAP XR | LP04 |
| HFAA HFAB HFAC HFAD | Alzheimer's, spongy change | Uni-ZAP XR | LP04 |
| HFAE | | | |
| HFAM | Frontal Lobe, Dementia | Uni-ZAP XR | LP04 |
| HMIA HMIB HMIC | Human Manic Depression Tissue | Uni-ZAP XR | LP04 |
| HTSA HTSE HTSF HTSG | Human Thymus | pBS | LP05 |
| HTSH | | | |
| HPBA HPBB HPBC HPBD | Human Pineal Gland | pBS | LP05 |
| HPBE | | | |
| HSAA HSAB HSAC | HSA 172 Cells | pBS | LP05 |
| HSBA HSBB HSBC HSBM | HSC172 cells | pBS | LP05 |
| HJAA HJAB HJAC HJAD | Jurkat T-cell G1 phase | pBS | LP05 |
| HJBA HJBB HJBC HJBD | Jurkat T-Cell, S phase | pBS | LP05 |
| HAFA HAFB | Aorta endothelial cells + TNF-a | pBS | LP05 |
| HAWA HAWB HAWC | Human White Adipose | pBS | LP05 |
| HTNA HTNB | Human Thyroid | pBS | LP05 |
| HONA | Normal Ovary, Premenopausal | pBS | LP05 |
| HARA HARB | Human Adult Retina | pBS | LP05 |
| HLJA HLJB | Human Lung | pCMVSport 1 | LP06 |
| HOFM HOFN HOFO | H. Ovarian Tumor, II, OV5232 | pCMVSport 2.0 | LP07 |
| HOGA HOGB HOGC | OV 10-3-95 | pCMVSport 2.0 | LP07 |
| HCGL | CD34+cells, II | pCMVSport 2.0 | LP07 |
| HDLA | Hodgkin's Lymphoma I | pCMVSport 2.0 | LP07 |
| HDTA HDTB HDTC HDTD | Hodgkin's Lymphoma II | pCMVSport 2.0 | LP07 |
| HDTE | | | |
| HKAA HKAB HKAC HKAD | Keratinocyte | pCMVSport2.0 | LP07 |
| HKAE HKAF HKAG HKAH | | | |
| HCIM | CAPFINDER, Crohn's Disease, | pCMVSport 2.0 | LP07 |
| | lib 2 | | |
| HKAL | Keratinocyte, lib 2 | pCMVSport2.0 | LP07 |
| HKAT | Keratinocyte, lib 3 | pCMVSport2.0 | LP07 |
| HNDA | Nasal polyps | pCMVSport2.0 | LP07 |
| HDRA | H. Primary Dendritic Cells, lib 3 | pCMVSport2.0 | LP07 |
| HOHA HOHB HOHC | Human Osteoblasts II | pCMVSport2.0 | LP07 |
| HLDA HLDB HLDC | Liver, Hepatoma | pCMVSport3.0 | LP08 |
| HLDN HLDO HLDP | Human Liver, normal | pCMVSport3.0 | LP08 |
| HMTA | pBMC stimulated w/ poly I/C | pCMVSport3.0 | LP08 |
| HNTA | NTERA2, control | pCMVSport3.0 | LP08 |
| HDPA HDPB HDPC HDPD | Primary Dendritic Cells, lib 1 | pCMVSport3.0 | LP08 |
| HDPF HDPG HDPH HDPI | | | |
| HDPJ HDPK | | | |
| HDPM HDPN HDPO HDPP | Primary Dendritic cells, frac 2 | pCMVSport3.0 | LP08 |
| HMUA HMUB HMUC | Myoloid Progenitor Cell Line | pCMVSport3.0 | LP08 |
| HHEA HHEB HHEC HHED | T Cell helper I | pCMVSport3.0 | LP08 |
| HHEM HHEN HHEO HHEP | T cell helper II | pCMVSport3.0 | LP08 |
| HEQA HEQB HEQC | Human endometrial stromal cells | pCMVSport3.0 | LP08 |
| HJMA HJMB | Human endometrial stromal cells- | pCMVSport3.0 | LP08 |
| | treated with progesterone | | |
| HSWA HSWB HSWC | Human endometrial stromal cells- | pCMVSport3.0 | LP08 |
| | treated with estradiol | | |
| HSYA HSYB HSYC | Human Thymus Stromal Cells | pCMVSport3.0 | LP08 |
| HLWA HLWB HLWC | Human Placenta | pCMVSport3.0 | LP08 |
| HRAA HRAB HRAC | Rejected Kidney, lib 4 | pCMVSport3.0 | LP08 |
| HMTM | PCR, pBMC I/C treated | PCRII | LP09 |
| HMJA | H. Meniingima, M6 | pSport 1 | LP10 |
| HMKA HMKB HMKC HMKD | H. Meningima, M1 | pSport 1 | LP10 |
| HMKE | | | |
| HUSG HUSI | Human umbilical vein endothelial | pSport 1 | LP10 |
| | cells, IL-4 induced | | |
| HUSX HUSY | Human Umbilical Vein | pSport 1 | LP10 |
| | Endothelial Cells, uninduced | | |
| HOFA | Ovarian Tumor I, OV5232 | pSport 1 | LP10 |
| HCFA HCFB HCFC HCFD | T-Cell PHA 16 hrs | pSport 1 | LP10 |
| HCFL HCFM HCFN HCFO | T-Cell PHA 24 hrs | pSport 1 | LP10 |
| HADA HADC HADD HADE | Human Adipose | pSport 1 | LP10 |
| HADF HADG | | | |
| HOVA HOVB HOVC | Human Ovary | pSport 1 | LP10 |
| HTWB HTWC HTWD HTWE | Resting T-Cell Library, II | pSport 1 | LP10 |
| HTWF | | | |
| HMMA | Spleen metastic melanoma | pSport 1 | LP10 |
| HLYA HLYB HLYC HLYD | Spleen, Chronic lymphocytic | pSport 1 | LP10 |
| HLYE | leukemia | | |
| HCGA | CD34+ cell, I | pSport 1 | LP10 |
| HEOM HEON | Human Eosinophils | pSport 1 | LP10 |
| HTDA | Human Tonsil, Lib 3 | pSport 1 | LP10 |
| HSPA | Salivary Gland, Lib 2 | pSport 1 | LP10 |
| HCHA HCHB HCHC | Breast Cancer cell line, MDA 36 | pSport 1 | LP10 |
| HCHM HCHN | Breast Cancer Cell line, | pSport 1 | LP10 |
| | angiogenic | | |
| HCIA | Crohn's Disease | pSport 1 | LP10 |
| HDAA HDAB HDAC | HEL cell line | pSport 1 | LP10 |
| HABA | Human Astrocyte | pSport 1 | LP10 |
| HUFA HUFB HUFC | Ulcerative Colitis | pSport 1 | LP10 |
| HNTM | NTERA2 + retinoic acid, 14 days | pSport 1 | LP10 |
| HDQA | Primary Dendritic | pSport 1 | LP10 |
| | cells, CapFinder2, frac 1 | | |
| HDQM | Primary Dendritic Cells, | pSport 1 | LP10 |
| | CapFinder, frac 2 | | |
| HLDX | Human Liver, normal, CapFinder | pSport 1 | LP10 |
| HULA HULB HULC | Human Dermal Endothelial | pSport1 | LP10 |
| | Cells, untreated | | |
| HUMA | Human Dermal Endothelial | pSport1 | LP10 |
| | cells, treated | | |
| HCJA | Human Stromal Endometrial | pSport1 | LP10 |
| | fibroblasts, untreated | | |
| HCJM | Human Stromal endometrial | pSport1 | LP10 |
| | fibroblasts, treated w/ estradiol | | |
| HEDA | Human Stromal endometrial | pSport1 | LP10 |
| | fibroblasts, treated with | | |
| | progesterone | | |
| HFNA | Human ovary tumor cell | pSport1 | LP10 |
| | OV350721 | | |
| HKGA HKGB HKGC HKGD | Merkel Cells | pSport1 | LP10 |
| HISA HISB HISC | Pancreas Islet Cell Tumor | pSport1 | LP10 |
| HLSA | Skin, burned | pSport1 | LP10 |
| HBZA | Prostate, BPH, Lib 2 | pSport 1 | LP10 |
| HBZS | Prostate BPH, Lib 2, subtracted | pSport 1 | LP10 |
| HFIA HFIB HFIC | Synovial Fibroblasts (control) | pSport 1 | LP10 |
| HFIH HFII HFIJ | Synovial hypoxia | pSport 1 | LP10 |
| HFIT HFIU HFIV | Synovial IL-1/TNF stimulated | pSport 1 | LP10 |
| HGCA | Messangial cell, frac 1 | pSport1 | LP10 |
| HMVA HMVB HMVC | Bone Marrow Stromal Cell, | pSport1 | LP10 |
| | untreated | | |
| HFIX HFIY HFIZ | Synovial Fibroblasts (Il1/TNF), | pSport1 | LP10 |
| | subt | | |
| HFOX HFOY HFOZ | Synovial hypoxia-RSF subtracted | pSport1 | LP10 |
| HMQA HMQB HMQC HMQD | Human Activated Monocytes | Uni-ZAP XR | LP11 |
| HLIA HLIB HLIC | Human Liver | pCMVSport 1 | LP012 |
| HHBA HHBB HHBC HHBD | Human Heart | pCMVSport 1 | LP012 |
| HHBE | | | |
| HBBA HBBB | Human Brain | pCMVSport 1 | LP012 |
| HLJA HLJB HLJC HLJD | Human Lung | pCMVSport 1 | LP012 |
| HLJE | | | |
| HOGA HOGB HOGC | Ovarian Tumor | pCMVSport 2.0 | LP012 |
| HTJM | Human Tonsils, Lib 2 | pCMVSport 2.0 | LP012 |
| HAMF HAMG | KMH2 | pCMVSport 3.0 | LP012 |
| HAJA HAJB HAJC | L428 | pCMVSport 3.0 | LP012 |
| HWBA HWBB HWBC HWBD | Dendritic cells, pooled | pCMVSport 3.0 | LP012 |
| HWBE | | | |
| HWAA HWAB HWAC | Human Bone Marrow, treated | pCMVSport 3.0 | LP012 |
| HWAD HWAE | | | |
| HYAA HYAB HYAC | B Cell lymphoma | pCMVSport 3.0 | LP012 |
| HWHG HWHH HWHI | Healing groin wound, 6.5 hours | pCMVSport 3.0 | LP012 |
| | post incision | | |
| HWHP HWHQ HWHR | Healing groin wound; 7.5 hours | pCMVSport 3.0 | LP012 |
| | post incision | | |
| HARM | Healing groin wound - zero hr | pCMVSport 3.0 | LP012 |
| | post-incision (control) | | |
| HBIM | Olfactory epithelium; nasalcavity | pCMVSport 3.0 | LP012 |
| HWDA | Healing Abdomen wound; 70&90 min | pCMVSport 3.0 | LP012 |
| | post incision | | |
| HWEA | Healing Abdomen Wound; 15 | pCMVSport 3.0 | LP012 |
| | days post incision | | |
| HWJA | Healing Abdomen Wound; 21&29 | pCMVSport 3.0 | LP012 |
| | days | | |
| HNAL | Human Tongue, frac 2 | pSport1 | LP012 |
| HMJA | H. Meniingima, M6 | pSport1 | LP012 |
| HMKA HMKB HMKC HMKD | H. Meningima, M1 | pSport1 | LP012 |
| HMKE | | | |
| HOFA | Ovarian Tumor I, OV5232 | pSport1 | LP012 |
| HCFA HCFB HCFC HCFD | T-Cell PHA 16 hrs | pSport1 | LP012 |
| HCFL HCFM HCFN HCFO | T-Cell PHA 24 hrs | pSport1 | LP012 |
| HMMA HMMB HMMC | Spleen metastic melanoma | pSport1 | LP012 |
| HTDA | Human Tonsil, Lib 3 | pSport1 | LP012 |
| HDBA | Human Fetal Thymus | pSport1 | LP012 |
| HDUA | Pericardium | pSport1 | LP012 |
| HBZA | Prostate, BPH, Lib 2 | pSport1 | LP012 |
| HWCA | Larynx tumor | pSport1 | LP012 |
| HWKA | Normal lung | pSport1 | LP012 |
| HSMB | Bone marrow stroma, treated | pSport1 | LP012 |
| HBHM | Normal trachea | pSport1 | LP012 |
| HLFC | Human Larynx | pSport1 | LP012 |
| HLRB | Siebben Polyposis | pSport1 | LP012 |
| HNIA | Mammary Gland | pSport1 | LP012 |
| HNJB | Palate carcinoma | pSport1 | LP012 |
| HNKA | Palate normal | pSport1 | LP012 |
| HMZA | Pharynx carcinoma | pSport1 | LP012 |
| HABG | Cheek Carcinoma | pSport1 | LP012 |
| HMZM | Pharynx Carcinoma | pSport1 | LP012 |
| HDRM | Larynx Carcinoma | pSport1 | LP012 |
| HVAA | Pancreas normal PCA4 No | pSport1 | LP012 |
| HICA | Tongue carcinoma | pSport1 | LP012 |
| HUKA HUKB HUKC HUKD | Human Uterine Cancer | Lambda ZAP II | LP013 |
| HUKE | | | |
| HFFA | Human Fetal Brain, random | Lambda ZAP II | LP013 |
| | primed | | |
| HTUA | Activated T-cell labeled with 4- | Lambda ZAP II | LP013 |
| | thioluri | | |
| HBQA | Early Stage Human Brain, | Lambda ZAP II | LP013 |
| | random primed | | |
| HMEB | Human microvascular Endothelial | Lambda ZAP II | LP013 |
| | cells, fract. B | | |
| HUSH | Human Umbilical Vein | Lambda ZAP II | LP013 |
| | Endothelial cells, fract. A, re- | | |
| | excision | | |
| HLQC HLQD | Hepatocellular tumor, re-excision | Lambda ZAP II | LP013 |
| HTWJ HTWK HTWL | Resting T-cell, re-excision | Lambda ZAP II | LP013 |
| HF6S | Human Whole 6 week Old | pBluescript | LP013 |
| | Embryo (II), subt | | |
| HHPS | Human Hippocampus, subtracted | pBluescript | LP013 |
| HL1S | LNCAP, differential expression | pBluescript | LP013 |
| HLHS HLHT | Early Stage Human Lung, | pBluescript | LP013 |
| | Subtracted | | |
| HSUS | Supt cells, cyclohexamide treated, | pBluescript | LP013 |
| | subtracted | | |
| HSUT | Supt cells, cyclohexamide treated, | pBluescript | LP013 |
| | differentially expressed | | |
| HSDS | H. Striatum Depression, | pBluescript | LP013 |
| | subtracted | | |
| HPTZ | Human Pituitary, Subtracted VII | pBluescript | LP013 |
| HSDX | H. Striatum Depression, subt II | pBluescript | LP013 |
| HSDZ | H. Striatum Depression, subt | pBluescript | LP013 |
| HPBA HPBB HPBC HPBD | Human Pineal Gland | pBluescript SK− | LP013 |
| HPBE | | | |
| HRTA | Colorectal Tumor | pBluescript SK− | LP013 |
| HSBA HSBB HSBC HSBM | HSC172 cells | pBluescript SK− | LP013 |
| HJAA HJAB HJAC HJAD | Jurkat T-cell G1 phase | pBluescript SK− | LP013 |
| HJBA HJBB HJBC HJBD | Jurkat T-cell, S1 phase | pBluescript SK− | LP013 |
| HTNA HTNB | Human Thyroid | pBluescript SK− | LP013 |
| HAHA HAHB | Human Adult Heart | Uni-ZAP XR | LP013 |
| HE6A | Whole 6 week Old Embryo | Uni-ZAP XR | LP013 |
| HFCA HFCB HFCC HFCD | Human Fetal Brain | Uni-ZAP XR | LP013 |
| HFCE | | | |
| HFKC HFKD HFKE HFKF | Human Fetal Kidney | Uni-ZAP XR | LP013 |
| HFKG | | | |
| HGBA HGBD HGBE HGBF | Human Gall Bladder | Uni-ZAP XR | LP013 |
| HGBG | | | |
| HPRA HPRB HPRC HPRD | Human Prostate | Uni-ZAP XR | LP013 |
| HTEA HTEB HTEC HTED | Human Testes | Uni-ZAP XR | LP013 |
| HTEE | | | |
| HTTA HTTB HTTC HTTD | Human Testes Tumor | Uni-ZAP XR | LP013 |
| HTTE | | | |
| HYBA HYBB | Human Fetal Bone | Uni-ZAP XR | LP013 |
| HFLA | Human Fetal Liver | Uni-ZAP XR | LP013 |
| HHFB HHFC HHFD HHFE | Human Fetal Heart | Uni-ZAP XR | LP013 |
| HHFF | | | |
| HUVB HUVC HUVD HUVE | Human Umbilical Vein, End. | Uni-ZAP XR | LP013 |
| | remake | | |
| HTHB HTHC HTHD | Human Thymus | Uni-ZAP XR | LP013 |
| HSTA HSTB HSTC HSTD | Human Skin Tumor | Uni-ZAP XR | LP013 |
| HTAA HTAB HTAC HTAD | Human Activated T-cells | Uni-ZAP XR | LP013 |
| HTAE | | | |
| HFEA HFEB HFEC | Human Fetal Epithelium (skin) | Uni-ZAP XR | LP013 |
| HJPA HJPB HJPC HJPD | Human Jurkat Membrane Bound | Uni-ZAP XR | LP013 |
| | Polysomes | | |
| HESA | Human Epithelioid Sarcoma | Uni-ZAP XR | LP013 |
| HALS | Human Adult Liver, Subtracted | Uni-ZAP XR | LP013 |
| HFTA HFTB HFTC HFTD | Human Fetal Dura Mater | Uni-ZAP XR | LP013 |
| HCAA HCAB HCAC | Cem cells, cyclohexamide treated | Uni-ZAP XR | LP013 |
| HRGA HRGB HRGC HRGD | Raji Cells, cyclohexamide treated | Uni-ZAP XR | LP013 |
| HE9A HE9B HE9C HE9D | Nine Week Old Early Stage | Uni-ZAP XR | LP013 |
| HE9E | Human | | |
| HSFA | Human Fibrosarcoma | Uni-ZAP XR | LP013 |
| HATA HATB HATC HATD | Human Adrenal Gland Tumor | Uni-ZAP XR | LP013 |
| HATE | | | |
| HTRA | Human Trachea Tumor | Uni-ZAP XR | LP013 |
| HE2A HE2D HE2E HE2H | 12 Week Old Early Stage Human | Uni-ZAP XR | LP013 |
| HE2I | | | |
| HE2B HE2C HE2F HE2G | 12 Week Old Early Stage Human, | Uni-ZAP XR | LP013 |
| HE2P | II | | |
| HNEA HNEB HNEC HNED | Human Neutrophil | Uni-ZAP XR | LP013 |
| HNEE | | | |
| HBGA | Human Primary Breast Cancer | Uni-ZAP XR | LP013 |
| HPTS HPTT HPTU | Human Pituitary, subtracted | Uni-ZAP XR | LP013 |
| HMQA HMQB HMQC HMQD | Human Activated Monocytes | Uni-ZAP XR | LP013 |
| HOAA HOAB HOAC | Human Osteosarcoma | Uni-ZAP XR | LP013 |
| HTOA HTOD HTOE HTOF | human tonsils | Uni-ZAP XR | LP013 |
| HTOG | | | |
| HMGB | Human OB MG63 control | Uni-ZAP XR | LP013 |
| | fraction I | | |
| HOPB | Human OB HOS control fraction I | Uni-ZAP XR | LP013 |
| HOQB | Human OB HOS treated (1 nM | Uni-ZAP XR | LP013 |
| | E2) fraction I | | |
| HAUA HAUB HAUC | Amniotic Cells - TNF induced | Uni-ZAP XR | LP013 |
| HAQA HAQB HAQC HAQD | Amniotic Cells - Primary Culture | Uni-ZAP XR | LP013 |
| HROA HROC | HUMAN STOMACH | Uni-ZAP XR | LP013 |
| HBJA HBJB HBJC HBJD | HUMAN B CELL LYMPHOMA | Uni-ZAP XR | LP013 |
| HBJE | | | |
| HODA HODB HODC HODD | human ovarian cancer | Uni-ZAP XR | LP013 |
| HCPA | Corpus Callosum | Uni-ZAP XR | LP013 |
| HSOA | stomach cancer (human) | Uni-ZAP XR | LP013 |
| HERA | SKIN | Uni-ZAP XR | LP013 |
| HMDA | Brain-medulloblastoma | Uni-ZAP XR | LP013 |
| HGLA HGLB HGLD | Glioblastoma | Uni-ZAP XR | LP013 |
| HWTA HWTB HWTC | wilm's tumor | Uni-ZAP XR | LP013 |
| HEAA | H. Atrophic Endometrium | Uni-ZAP XR | LP013 |
| HAPN HAPO HAPP HAPQ | Human Adult Pulmonary; re- | Uni-ZAP XR | LP013 |
| HAPR | excision | | |
| HLTG HLTH | Human T-cell lymphoma; re- | Uni-ZAP XR | LP013 |
| | excision | | |
| HAHC HAHD HAHE | Human Adult Heart; re-excision | Uni-ZAP XR | LP013 |
| HAGA HAGB HAGC HAGD | Human Amygdala | Uni-ZAP XR | LP013 |
| HAGE | | | |
| HSJA HSJB HSJC | Smooth muscle-ILb induced | Uni-ZAP XR | LP013 |
| HSHA HSHB HSHC | Smooth muscle, IL1b induced | Uni-ZAP XR | LP013 |
| HPWA HPWB HPWC HPWD | Prostate BPH | Uni-ZAP XR | LP013 |
| HPWE | | | |
| HPIA HPIB HPIC | LNCAP prostate cell line | Uni-ZAP XR | LP013 |
| HPJA HPJB HPJC | PC3 Prostate cell line | Uni-ZAP XR | LP013 |
| HBTA | Bone Marrow Stroma, TNF&LPS | Uni-ZAP XR | LP013 |
| | ind | | |
| HMCF HMCG HMCH HMCI | Macrophage-oxLDL; re-excision | Uni-ZAP XR | LP013 |
| HMCJ | | | |
| HAGG HAGH HAGI | Human Amygdala; re-excision | Uni-ZAP XR | LP013 |
| HACA | H. Adipose Tissue | Uni-ZAP XR | LP013 |
| HKFB | K562 + PMA (36 hrs), re-excision | ZAP Express | LP013 |
| HCWT HCWU HCWV | CD34 positive cells (cord | ZAP Express | LP013 |
| | blood), re-ex | | |
| HBWA | Whole brain | ZAP Express | LP013 |
| HBXA HBXB HBXC HBXD | Human Whole Brain #2 - Oligo | ZAP Express | LP013 |
| | dT > 1.5 Kb | | |
| HAVM | Temporal cortex-Alzheizmer | pT-Adv | LP014 |
| HAVT | Hippocampus, Alzheimer | pT-Adv | LP014 |
| | Subtracted | | |
| HHAS | CHME Cell Line | Uni-ZAP XR | LP014 |
| HAJR | Larynx normal | pSport 1 | LP014 |
| HWLE HWLF HWLG HWLH | Colon Normal | pSport 1 | LP014 |
| HCRM HCRN HCRO | Colon Carcinoma | pSport 1 | LP014 |
| HWLI HWLJ HWLK | Colon Normal | pSport 1 | LP014 |
| HWLQ HWLR HWLS HWLT | Colon Tumor | pSport 1 | LP014 |
| HBFM | Gastrocnemius Muscle | pSport 1 | LP014 |
| HBOD HBOE | Quadriceps Muscle | pSport 1 | LP014 |
| HBKD HBKE | Soleus Muscle | pSport 1 | LP014 |
| HCCM | Pancreatic Langerhans | pSport 1 | LP014 |
| HWGA | Larynx carcinoma | pSport 1 | LP014 |
| HWGM HWGN | Larynx carcinoma | pSport 1 | LP014 |
| HWLA HWLB HWLC | Normal colon | pSport 1 | LP014 |
| HWLM HWLN | Colon Tumor | pSport 1 | LP014 |
| HVAM HVAN HVAO | Pancreas Tumor | pSport 1 | LP014 |
| HWGQ | Larynx carcinoma | pSport 1 | LP014 |
| HAQM HAQN | Salivary Gland | pSport 1 | LP014 |
| HASM | Stomach; normal | pSport 1 | LP014 |
| HBCM | Uterus; normal | pSport 1 | LP014 |
| HCDM | Testis; normal | pSport 1 | LP014 |
| HDJM | Brain; normal | pSport 1 | LP014 |
| HEFM | Adrenal Gland, normal | pSport 1 | LP014 |
| HBAA | Rectum normal | pSport 1 | LP014 |
| HFDM | Rectum tumour | pSport 1 | LP014 |
| HGAM | Colon, normal | pSport 1 | LP014 |
| HHMM | Colon, tumour | pSport 1 | LP014 |
| HCLB HCLC | Human Lung Cancer | Lambda Zap II | LP015 |
| HRLA | L1 Cell line | ZAP Express | LP015 |
| HHAM | Hypothalamus, Alzheimer's | pCMVSport 3.0 | LP015 |
| HKBA | Ku 812F Basophils Line | pSport 1 | LP015 |
| HS2S | Saos2, Dexamethosome Treated | pSport 1 | LP016 |
| HA5A | Lung Carcinoma A549 TNFalpha | pSport 1 | LP016 |
| | activated | | |
| HTFM | TF-1 Cell Line GM-CSF Treated | pSport 1 | LP016 |
| HYAS | Thyroid Tumour | pSport 1 | LP016 |
| HUTS | Larynx Normal | pSport 1 | LP016 |
| HXOA | Larynx Tumor | pSport 1 | LP016 |
| HEAH | Ea.hy.926 cell line | pSport 1 | LP016 |
| HINA | Adenocarcinoma Human | pSport 1 | LP016 |
| HRMA | Lung Mesothelium | pSport 1 | LP016 |
| HLCL | Human Pre-Differentiated | Uni-Zap XR | LP017 |
| | Adipocytes | | |
| HS2A | Saos2 Cells | pSport 1 | LP020 |
| HS2I | Saos2 Cells; Vitamin D3 Treated | pSport 1 | LP020 |
| HUCM | CHME Cell Line, untreated | pSport 1 | LP020 |
| HEPN | Aryepiglottis Normal | pSport 1 | LP020 |
| HPSN | Sinus Piniformis Tumour | pSport 1 | LP020 |
| HNSA | Stomach Normal | pSport 1 | LP020 |
| HNSM | Stomach Tumour | pSport 1 | LP020 |
| HNLA | Liver Normal Met5No | pSport 1 | LP020 |
| HUTA | Liver Tumour Met 5 Tu | pSport 1 | LP020 |
| HOCN | Colon Normal | pSport 1 | LP020 |
| HOCT | Colon Tumor | pSport 1 | LP020 |
| HTNT | Tongue Tumour | pSport 1 | LP020 |
| HLXN | Larynx Normal | pSport 1 | LP020 |
| HLXT | Larynx Tumour | pSport 1 | LP020 |
| HTYN | Thymus | pSport 1 | LP020 |
| HPLN | Placenta | pSport 1 | LP020 |
| HTNG | Tongue Normal | pSport 1 | LP020 |
| HZAA | Thyroid Normal (SDCA2 No) | pSport 1 | LP020 |
| HWES | Thyroid Thyroiditis | pSport 1 | LP020 |
| HFHD | Ficolled Human Stromal Cells, | pTrip1Ex2 | LP021 |
| | 5Fu treated | | |
| HFHM, HFHN | Ficolled Human Stromal Cells, | pTrip1Ex2 | LP021 |
| | Untreated | | |
| HPCI | Hep G2 Cells, lambda library | lambda Zap- | LP021 |
| | | CMV XR | |
| HBCA, HBCB, HBCC | H. Lymph node breast Cancer | Uni-ZAP XR | LP021 |
| HCOK | Chondrocytes | pSPORT1 | LP022 |
| HDCA, HDCB, HDCC | Dendritic Cells From CD34 Cells | pSPORT1 | LP022 |
| HDMA, HDMB | CD40 activated monocyte | pSPORT1 | LP022 |
| | dendritic cells | | |
| HDDM, HDDN, HDDO | LPS activated derived dendritic | pSPORT1 | LP022 |
| | cells | | |
| HPCR | Hep G2 Cells, PCR library | lambda Zap- | LP022 |
| | | CMV XR | |
| HAAA, HAAB, HAAC | Lung, Cancer (4005313A3): | pSPORT1 | LP022 |
| | Invasive Poorly Differentiated | | |
| | Lung Adenocarcinoma | | |
| HIPA, HIPB, HIPC | Lung, Cancer (4005163 B7): | pSPORT1 | LP022 |
| | Invasive, Poorly Diff. | | |
| | Adenocarcinoma, Metastatic | | |
| HOOH, HOOI | Ovary, Cancer: (4004562 B6) | pSPORT1 | LP022 |
| | Papillary Serous Cystic | | |
| | Neoplasm, Low Malignant Pot | | |
| HIDA | Lung, Normal: (4005313 B1) | pSPORT1 | LP022 |
| HUJA, HUJB, HUJC, HUJD, HUJE | B-Cells | pCMVSport 3.0 | LP022 |
| HNOA, HNOB, HNOC, HNOD | Ovary, Normal: (9805C040R) | pSPORT1 | LP022 |
| HNLM | Lung, Normal: (4005313 B1) | pSPORT1 | LP022 |
| HSCL | Stromal Cells | pSPORT1 | LP022 |
| HAAX | Lung, Cancer: (4005313 A3) | pSPORT1 | LP022 |
| | Invasive Poorly-differentiated | | |
| | Metastatic lung adenocarcinoma | | |
| HUUA, HUUB, HUUC, HUUD | B-cells (unstimulated) | pTrip1Ex2 | LP022 |
| HWWA, HWWB, HWWC, HWWD, | B-cells (stimulated) | pSPORT1 | LP022 |
| HWWE, HWWF, HWWG | | | |
| HCCC | Colon, Cancer: (9808C064R) | pCMVSport 3.0 | LP023 |
| HPDO HPDP HPDQ HPDR | Ovary, Cancer (9809C332): | pSport 1 | LP023 |
| HPD | Poorly differentiated | | |
| | adenocarcinoma | | |
| HPCO HPCP HPCQ HPCT | Ovary, Cancer (15395A1F): | pSport 1 | LP023 |
| | Grade II Papillary Carcinoma | | |
| HOCM HOCO HOCP HOCQ | Ovary, Cancer: (15799A1F) | pSport 1 | LP023 |
| | Poorly differentiated carcinoma | | |
| HCBM HCBN HCBO | Breast, Cancer: (4004943 A5) | pSport 1 | LP023 |
| HNBT HNBU HNBV | Breast, Normal: (4005522B2) | pSport 1 | LP023 |
| HBCP HBCQ | Breast, Cancer: (4005522 A2) | pSport 1 | LP023 |
| HBCJ | Breast, Cancer: (9806C012R) | pSport 1 | LP023 |
| HSAM HSAN | Stromal cells 3.88 | pSport 1 | LP023 |
| HVCA HVCB HVCC HVCD | Ovary, Cancer: (4004332 A2) | pSport 1 | LP023 |
| HSCK HSEN HSEO | Stromal cells (HBM3.18) | pSport 1 | LP023 |
| HSCP HSCQ | stromal cell clone 2.5 | pSport 1 | LP023 |
| HUXA | Breast Cancer: (4005385 A2) | pSport 1 | LP023 |
| HCOM HCON HCOO HCOP | Ovary, Cancer (4004650 A3): | pSport 1 | LP023 |
| HCOQ | Well-Differentiated | | |
| | Micropapillary Serous Carcinoma | | |
| HBNM | Breast, Cancer: (9802C020E) | pSport 1 | LP023 |
| HVVA HVVB HVVC HVVD | Human Bone Marrow, treated | pSport 1 | LP023 |
| HVVE | | | |

[0696] Two nonlimiting examples are provided below for isolating a particular clone from the deposited sample of plasmid cDNAs cited for that clone in Table 7. First, a plasmid is directly isolated by screening the clones using a polynucleotide probe corresponding to the nucleotide sequence of SEQ ID NO:X.

[0697] Particularly, a specific polynucleotide with 3040 nucleotides is synthesized using an Applied Biosystems DNA synthesizer according to the sequence reported. The oligonucleotide is labeled, for instance, with ³²P-γ-ATP using T4 polynucleotide kinase and purified according to routine methods. (E.g., Maniatis et al., Molecular Cloning: A Laboratory Manual, Cold Spring Harbor Press, Cold Spring, N.Y. (1982)). The plasmid mixture is transformed into a suitable host, as indicated above (such as XL-1 Blue (Stratagene)) using techniques known to those of skill in the art, such as those provided by the vector supplier or in related publications or patents cited above. The transformants are plated on 1.5% agar plates (containing the appropriate selection agent, e.g., ampicillin) to a density of about 150 transformants (colonies) per plate. These plates are screened using Nylon membranes according to routine methods for bacterial colony screening (e.g., Sambrook et al., Molecular Cloning: A Laboratory Manual, 2nd Edit., (1989), Cold Spring Harbor Laboratory Press, pages 1.93 to 1.104), or other techniques known to those of skill in the art.

[0698] Alternatively, two primers of 17-20 nucleotides derived from both ends of the nucleotide sequence of SEQ ID NO:X are synthesized and used to amplify the desired cDNA using the deposited cDNA plasmid as a template. The polymerase chain reaction is carried out under routine conditions, for instance, in 25 μl of reaction mixture with 0.5 ug of the above cDNA template. A convenient reaction mixture is 1.5-5 mM MgCl₂, 0.01% (w/v) gelatin, 20 μM each of dATP, dCTP, dGTP, dTTP, 25 pmol of each primer and 0.25 Unit of Taq polymerase. Thirty five cycles of PCR (denaturation at 94° C. for 1 min; annealing at 55° C. for 1 min; elongation at 72° C. for 1 min) are performed with a Perkin-Elmer Cetus automated thermal cycler. The amplified product is analyzed by agarose gel electrophoresis and the DNA band with expected molecular weight is excised and purified. The PCR product is verified to be the selected sequence by subcloning and sequencing the DNA product.

[0699] Several methods are available for the identification of the 5′ or 3′ non-coding portions of a gene which may not be present in the deposited clone. These methods include but are not limited to, filter probing, clone enrichment using specific probes, and protocols similar or identical to 5′ and 3′ “RACE” protocols which are well known in the art. For instance, a method similar to 5′ RACE is available for generating the missing 5′ end of a desired full-length transcript. (Fromont-Racine et al., Nucleic Acids Res. 21(7):1683-1684 (1993)).

[0700] Briefly, a specific RNA oligonucleotide is ligated to the 5′ ends of a population of RNA presumably containing full-length gene RNA transcripts. A primer set containing a primer specific to the ligated RNA oligonucleotide and a primer specific to a known sequence of the gene of interest is used to PCR amplify the 5′ portion of the desired full-length gene. This amplified product may then be sequenced and used to generate the full length gene.

[0701] This above method starts with total RNA isolated from the desired source, although poly-A+ RNA can be used. The RNA preparation can then be treated with phosphatase if necessary to eliminate 5′ phosphate groups on degraded or damaged RNA which may interfere with the later RNA ligase step. The phosphatase should then be inactivated and the RNA treated with tobacco acid pyrophosphatase in order to remove the cap structure present at the 5′ ends of messenger RNAs. This reaction leaves a 5′ phosphate group at the 5′ end of the cap cleaved RNA which can then be ligated to an RNA oligonucleotide using T4 RNA ligase.

[0702] This modified RNA preparation is used as a template for first strand cDNA synthesis using a gene specific oligonucleotide. The first strand synthesis reaction is used as a template for PCR amplification of the desired 5′ end using a primer specific to the ligated RNA oligonucleotide and a primer specific to the known sequence of the gene of interest. The resultant product is then sequenced and analyzed to confirm that the 5′ end sequence belongs to the desired gene.

### Example 2

### Isolation of Genomic Clones Corresponding to a Polynucleotide

[0703] A human genomic P1 library (Genomic Systems, Inc.) is screened by PCR using primers selected for the sequence corresponding to SEQ ID NO:X according to the method described in Example 1. (See also, Sambrook.)

### Example 3

### Tissue Specific Expression Analysis

[0704] The Human Genome Sciences, Inc. (HGS) database is derived from sequencing tissue and/or disease specific cDNA libraries. Libraries generated from a particular tissue are selected and the specific tissue expression pattern of EST groups or assembled contigs within these libraries is determined by comparison of the expression patterns of those groups or contigs within the entire database. ESTs and assembled contigs which show tissue specific expression are selected.

[0705] The original clone from which the specific EST sequence was generated, or in the case of an assembled contig, the clone from which the 5′ most EST sequence was generated, is obtained from the catalogued library of clones and the insert amplified by PCR using methods known in the art. The PCR product is denatured and then transferred in 96 or 384 well format to a nylon membrane (Schleicher and Scheull) generating an array filter of tissue specific clones. Housekeeping genes, maize genes, and known tissue specific genes are included on the filters. These targets can be used in signal normalization and to validate assay sensitivity. Additional targets are included to monitor probe length and specificity of hybridization.

[0706] Radioactively labeled hybridization probes are generated by first strand cDNA synthesis per the manufacturer's instructions (Life Technologies) from mRNA/RNA samples prepared from the specific tissue being analyzed (e.g., prostate, prostate cancer, ovarian, ovarian cancer, etc.). The hybridization probes are purified by gel exclusion chromatography, quantitated, and hybridized with the array filters in hybridization bottles at 65° C. overnight. The filters are washed under stringent conditions and signals are captured using a Fuji phosphorimager.

[0707] Data is extracted using AIS software and following background subtraction, signal normalization is performed. This includes a normalization of filter-wide expression levels between different experimental runs. Genes that are differentially expressed in the tissue of interest are identified.

### Example 4

### Chromosomal Mapping of the Polynucleotides

[0708] An oligonucleotide primer set is designed according to the sequence at the 5′ end of SEQ ID NO:X. This primer preferably spans about 100 nucleotides. This primer set is then used in a polymerase chain reaction under the following set of conditions: 30 seconds, 95° C.; 1 minute, 56° C.; 1 minute, 70° C. This cycle is repeated 32 times followed by one 5 minute cycle at 70° C. Human, mouse, and hamster DNA is used as template in addition to a somatic cell hybrid panel containing individual chromosomes or chromosome fragments (Bios, Inc). The reactions are analyzed on either 8% polyacrylamide gels or 3.5% agarose gels. Chromosome mapping is determined by the presence of an approximately 100 bp PCR fragment in the particular somatic cell hybrid.

### Example 5

### Bacterial Expression of a Polypeptide

[0709] A polynucleotide encoding a polypeptide of the present invention is amplified using PCR oligonucleotide primers corresponding to the 5′ and 3′ ends of the DNA sequence, as outlined in Example 1, to synthesize insertion fragments. The primers used to amplify the cDNA insert should preferably contain restriction sites, such as BamHI and XbaI, at the 5′ end of the primers in order to clone the amplified product into the expression vector. For example, BamHI and XbaI correspond to the restriction enzyme sites on the bacterial expression vector pQE-9. (Qiagen, Inc., Chatsworth, Calif.). This plasmid vector encodes antibiotic resistance (Amp^{r}), a bacterial origin of replication (ori), an IPTG-regulatable promoter/operator (P/O), a ribosome binding site (RBS), a 6-histidine tag (6-His), and restriction enzyme cloning sites.

[0710] The pQE-9 vector is digested with BamHI and XbaI and the amplified fragment is ligated into the pQE-9 vector maintaining the reading frame initiated at the bacterial RBS. The ligation mixture is then used to transform the E. coli strain M15/rep4 (Qiagen, Inc.) which contains multiple copies of the plasmid pREP4, which expresses the lacI repressor and also confers kanamycin resistance (Kan^{r}). Transformants are identified by their ability to grow on LB plates and ampicillin/kanamycin resistant colonies are selected. Plasmid DNA is isolated and confirmed by restriction analysis.

[0711] Clones containing the desired constructs are grown overnight (O/N) in liquid culture in LB media supplemented with both Amp (100 ug/ml) and Kan (25 ug/ml). The O/N culture is used to inoculate a large culture at a ratio of 1:100 to 1:250. The cells are grown to an optical density 600 (O.D.⁶⁰⁰) of between 0.4 and 0.6. IPTG (Isopropyl-B-D-thiogalacto pyranoside) is then added to a final concentration of 1 mM. IPTG induces by inactivating the lacI repressor, clearing the P/O leading to increased gene expression.

[0712] Cells are grown for an extra 3 to 4 hours. Cells are then harvested by centrifugation (20 mins at 6000×g). The cell pellet is solubilized in the chaotropic agent 6 Molar Guanidine HCl by stirring for 3-4 hours at 4° C. The cell debris is removed by centrifugation, and the supernatant containing the polypeptide is loaded onto a nickel-nitrilo-tri-acetic acid (“Ni-NTA”) affinity resin column (available from QIAGEN, Inc., supra). Proteins with a 6×His tag bind to the Ni-NTA resin with high affinity and can be purified in a simple one-step procedure (for details see: The QIAexpressionist (1995) QIAGEN, Inc., supra).

[0713] Briefly, the supernatant is loaded onto the column in 6 M guanidine-HCl, pH 8. The column is first washed with 10 volumes of 6 M guanidine-HCl, pH 8, then washed with 10 volumes of 6 M guanidine-HCl pH 6, and finally the polypeptide is eluted with 6 M guanidine-HCl, pH 5.

[0714] The purified protein is then renatured by dialyzing it against phosphate-buffered saline (PBS) or 50 mM Na-acetate, pH 6 buffer plus 200 mM NaCl. Alternatively, the protein can be successfully refolded while immobilized on the Ni-NTA column. The recommended conditions are as follows: renature using a linear 6M-1M urea gradient in 500 mM NaCl, 20% glycerol, 20 mM Tris/HCl pH 7.4, containing protease inhibitors. The renaturation should be performed over a period of 1.5 hours or more. After renaturation the proteins are eluted by the addition of 250 mM immidazole. Immidazole is removed by a final dialyzing step against PBS or 50 mM sodium acetate pH 6 buffer plus 200 mM NaCl. The purified protein is stored at 4° C. or frozen at −80° C.

[0715] In addition to the above expression vector, the present invention further includes an expression vector, called pHE4a (ATCC Accession Number 209645, deposited on Feb. 25, 1998) which contains phage operator and promoter elements operatively linked to a polynucleotide of the present invention, called pHE4a. (ATCC Accession Number 209645, deposited on Feb. 25, 1998.) This vector contains: 1) a neomycinphosphotransferase gene as a selection marker, 2) an E. coli origin of replication, 3) a T5 phage promoter sequence, 4) two lac operator sequences, 5) a Shine-Delgarno sequence, and 6) the lactose operon repressor gene (lacIq). The origin of replication (oriC) is derived from pUC19 (LTI, Gaithersburg, Md.). The promoter and operator sequences are made synthetically.

[0716] DNA can be inserted into the pHE4a by restricting the vector with NdeI and XbaI, BamHI, XhoI, or Asp718, running the restricted product on a gel, and isolating the larger fragment (the stuffer fragment should be about 310 base pairs). The DNA insert is generated according to the PCR protocol described in Example 1, using PCR primers having restriction sites for NdeI (5′ primer) and XbaI, BamHI, XhoI, or Asp718 (3′ primer). The PCR insert is gel purified and restricted with compatible enzymes. The insert and vector are ligated according to standard protocols.

[0717] The engineered vector could easily be substituted in the above protocol to express protein in a bacterial system.

### Example 6

### Purification of a Polypeptide from an Inclusion Body

[0718] The following alternative method can be used to purify a polypeptide expressed in E coli when it is present in the form of inclusion bodies. Unless otherwise specified, all of the following steps are conducted at 4-10° C.

[0719] Upon completion of the production phase of the E. coli fermentation, the cell culture is cooled to 4-10° C. and the cells harvested by continuous centrifugation at 15,000 rpm (Heraeus Sepatech). On the basis of the expected yield of protein per unit weight of cell paste and the amount of purified protein required, an appropriate amount of cell paste, by weight, is suspended in a buffer solution containing 100 mM Tris, 50 mM EDTA, pH 7.4. The cells are dispersed to a homogeneous suspension using a high shear mixer.

[0720] The cells are then lysed by passing the solution through a microfluidizer (Microfuidics, Corp. or APV Gaulin, Inc.) twice at 4000-6000 psi. The homogenate is then mixed with NaCl solution to a final concentration of 0.5 M NaCl, followed by centrifugation at 7000×g for 15 min. The resultant pellet is washed again using 0.5M NaCl, 100 mM Tris, 50 mM EDTA, pH 7.4.

[0721] The resulting washed inclusion bodies are solubilized with 1.5 M guanidine hydrochloride (GuHCl) for 24 hours. After 7000×g centrifugation for 15 min., the pellet is discarded and the polypeptide containing supernatant is incubated at 4° C. overnight to allow further GuHCl extraction.

[0722] Following high speed centrifugation (30,000×g) to remove insoluble particles, the GuHCl solubilized protein is refolded by quickly mixing the GuHCl extract with 20 volumes of buffer containing 50 mM sodium, pH 4.5, 150 mM NaCl, 2 mM EDTA by vigorous stirring. The refolded diluted protein solution is kept at 4° C. without mixing for 12 hours prior to further purification steps.

[0723] To clarify the refolded polypeptide solution, a previously prepared tangential filtration unit equipped with 0.16 μm membrane filter with appropriate surface area (e.g., Filtron), equilibrated with 40 mM sodium acetate, pH 6.0 is employed. The filtered sample is loaded onto a cation exchange resin (e.g., Poros HS-50, Perseptive Biosystems). The column is washed with 40 mM sodium acetate, pH 6.0 and eluted with 250 mM, 500 mM, 1000 mM, and 1500 mM NaCl in the same buffer, in a stepwise manner. The absorbance at 280 nm of the effluent is continuously monitored. Fractions are collected and further analyzed by SDS-PAGE.

[0724] Fractions containing the polypeptide are then pooled and mixed with 4-volumes of water. The diluted sample is then loaded onto a previously prepared set of tandem columns of strong anion (Poros HQ-50, Perseptive Biosystems) and weak anion (Poros CM-20, Perseptive Biosystems) exchange resins. The columns are equilibrated with 40 mM sodium acetate, pH 6.0. Both columns are washed with 40 mM sodium acetate, pH 6.0, 200 mM NaCl. The CM-20 column is then eluted using a 10 column volume linear gradient ranging from 0.2 M NaCl, 50 mM sodium acetate, pH 6.0 to 1.0 M NaCl, 50 mM sodium acetate, pH 6.5. Fractions are collected under constant A₂₈₀ monitoring of the effluent. Fractions containing the polypeptide (determined, for instance, by 16% SDS-PAGE) are then pooled.

[0725] The resultant polypeptide should exhibit greater than 95% purity after the above refolding and purification steps. No major contaminant bands should be observed from Commassie blue stained 16% SDS-PAGE gel when 5 μg of purified protein is loaded. The purified protein can also be tested for endotoxin/LPS contamination, and typically the LPS content is less than 0.1 ng/ml according to LAL assays.

### Example 7

### Cloning and Expression of a Polypeptide in a Baculovirus Expression System

[0726] In this example, the plasmid shuttle vector pA2 is used to insert a polynucleotide into a baculovirus to express a polypeptide. This expression vector contains the strong polyhedrin promoter of the Autographa californica nuclear polyhedrosis virus (AcMNPV) followed by convenient restriction sites such as BamHI, Xba I and Asp718. The polyadenylation site of the simian virus 40 (“SV40”) is used for efficient polyadenylation. For easy selection of recombinant virus, the plasmid contains the beta-galactosidase gene from E. coli under control of a weak Drosophila promoter in the same orientation, followed by the polyadenylation signal of the polyhedrin gene. The inserted genes are flanked on both sides by viral sequences for cell-mediated homologous recombination with wild-type viral DNA to generate a viable virus that express the cloned polynucleotide.

[0727] Many other baculovirus vectors can be used in place of the vector above, such as pAc373, pVL941, and pAcIM1, as one skilled in the art would readily appreciate, as long as the construct provides appropriately located signals for transcription, translation, secretion and the like, including a signal peptide and an in-frame AUG as required. Such vectors are described, for instance, in Luckow et al., Virology 170:31-39 (1989).

[0728] Specifically, the cDNA sequence contained in the deposited clone, including the AUG initiation codon, is amplified using the PCR protocol described in Example 1. If a naturally occurring signal sequence is used to produce the polypeptide of the present invention, the pA2 vector does not need a second signal peptide. Alternatively, the vector can be modified (pA2 GP) to include a baculovirus leader sequence, using the standard methods described in Summers et al., “A Manual of Methods for Baculovirus Vectors and Insect Cell Culture Procedures,” Texas Agricultural Experimental Station Bulletin No. 1555 (1987).

[0729] The amplified fragment is isolated from a 1% agarose gel using a commercially available kit (“Geneclean,” BIO 101 Inc., La Jolla, Calif.). The fragment then is digested with appropriate restriction enzymes and again purified on a 1% agarose gel.

[0730] The plasmid is digested with the corresponding restriction enzymes and optionally, can be dephosphorylated using calf intestinal phosphatase, using routine procedures known in the art. The DNA is then isolated from a 1% agarose gel using a commercially available kit (“Geneclean” BIO 101 Inc., La Jolla, Calif.).

[0731] The fragment and the dephosphorylated plasmid are ligated together with T4 DNA ligase. E. coli HB101 or other suitable E. coli hosts such as XL-1 Blue (Stratagene Cloning Systems, La Jolla, Calif.) cells are transformed with the ligation mixture and spread on culture plates. Bacteria containing the plasmid are identified by digesting DNA from individual colonies and analyzing the digestion product by gel electrophoresis. The sequence of the cloned fragment is confirmed by DNA sequencing.

[0732] Five μg of a plasmid containing the polynucleotide is co-transfected with 1.0 μg of a commercially available linearized baculovirus DNA (“BaculoGold™ baculovirus DNA, Pharmingen, San Diego, Calif.), using the lipofection method described by Felgner et al., Proc. Natl. Acad. Sci. USA 84:7413-7417 (1987). One μg of BaculoGold™ virus DNA and 5 μg of the plasmid are mixed in a sterile well of a microtiter plate containing 50/1 of serum-free Grace's medium (Life Technologies Inc., Gaithersburg, Md.). Afterwards, 10 μl Lipofectin plus 90 μl Grace's medium are added, mixed and incubated for 15 minutes at room temperature. Then the transfection mixture is added drop-wise to Sf9 insect cells (ATCC CRL 1711) seeded in a 35 mm tissue culture plate with 1 ml Grace's medium without serum. The plate is then incubated for 5 hours at 27° C. The transfection solution is then removed from the plate and 1 ml of Grace's insect medium supplemented with 10% fetal calf serum is added. Cultivation is then continued at 27° C. for four days.

[0733] After four days the supernatant is collected and a plaque assay is performed, as described by Summers and Smith, supra. An agarose gel with “Blue Gal” (Life Technologies Inc., Gaithersburg) is used to allow easy identification and isolation of gal-expressing clones, which produce blue-stained plaques. (A detailed description of a “plaque assay” of this type can also be found in the user's guide for insect cell culture and baculovirology distributed by Life Technologies Inc., Gaithersburg, page 9-10.) After appropriate incubation, blue stained plaques are picked with the tip of a micropipettor (e.g., Eppendorf). The agar containing the recombinant viruses is then resuspended in a microcentrifuge tube containing 200 μl of Grace's medium and the suspension containing the recombinant baculovirus is used to infect Sf9 cells seeded in 35 mm dishes. Four days later the supernatants of these culture dishes are harvested and then they are stored at 4° C.

[0734] To verify the expression of the polypeptide, Sf9 cells are grown in Grace's medium supplemented with 10% heat-inactivated FBS. The cells are infected with the recombinant baculovirus containing the polynucleotide at a multiplicity of infection (“MOI”) of about 2. If radiolabeled proteins are desired, 6 hours later the medium is removed and is replaced with SF900 II medium minus methionine and cysteine (available from Life Technologies Inc., Rockville, Md.). After 42 hours, 5 μCi of ³⁵S-methionine and 5 μCi ³⁵S-cysteine (available from Amersham) are added. The cells are further incubated for 16 hours and then are harvested by centrifugation. The proteins in the supernatant as well as the intracellular proteins are analyzed by SDS-PAGE followed by autoradiography (if radiolabeled).

[0735] Microsequencing of the amino acid sequence of the amino terminus of purified protein may be used to determine the amino terminal sequence of the produced protein.

### Example 8

### Expression of a Polypeptide in Mammalian Cells

[0736] The polypeptide of the present invention can be expressed in a mammalian cell. A typical mammalian expression vector contains a promoter element, which mediates the initiation of transcription of mRNA, a protein coding sequence, and signals required for the termination of transcription and polyadenylation of the transcript Additional elements include enhancers, Kozak sequences and intervening sequences flanked by donor and acceptor sites for RNA splicing. Highly efficient transcription is achieved with the early and late promoters from SV40, the long terminal repeats (LTRs) from Retroviruses, e.g., RSV, HILVI, HIVI and the early promoter of the cytomegalovirus (CMV). However, cellular elements can also be used (e.g., the human actin promoter).

[0737] Suitable expression vectors for use in practicing the present invention include, for example, vectors such as pSVL and pMSG (Pharmacia, Uppsala, Sweden), pRSVcat (ATCC 37152), pSV2dhfr (ATCC 37146), pBC12MI (ATCC 67109), pCMVSport 2.0, and pCMVSport 3.0. Mammalian host cells that could be used include, human Hela, 293, H9 and Jurkat cells, mouse NIH3T3 and C127 cells, Cos 1, Cos 7 and CV1, quail QC1-3 cells, mouse L cells and Chinese hamster ovary (CHO) cells.

[0738] Alternatively, the polypeptide can be expressed in stable cell lines containing the polynucleotide integrated into a chromosome. The co-transfection with a selectable marker such as DHFR, gpt, neomycin, or hygromycin allows the identification and isolation of the transfected cells.

[0739] The transfected gene can also be amplified to express large amounts of the encoded protein. The DHFR (dihydrofolate reductase) marker is useful in developing cell lines that carry several hundred or even several thousand copies of the gene of interest. (See, e.g., Alt, F. W., et al., J. Biol. Chem. 253:1357-1370 (1978); Hamlin, J. L. and Ma, C., Biochem. et Biophys. Acta, 1097:107-143 (1990); Page, M. J. and Sydenham, M. A., Biotechnology 9:64-68 (1991)). Another useful selection marker is the enzyme glutamine synthase (GS) (Murphy et al., Biochem J. 227:277-279 (1991); Bebbington et al., Bio/Technology 10:169-175 (1992). Using these markers, the mammalian cells are grown in selective medium and the cells with the highest resistance are selected. These cell lines contain the amplified gene(s) integrated into a chromosome. Chinese hamster ovary (CHO) and NSO cells are often used for the production of proteins.

[0740] Derivatives of the plasmid pSV2-dhfr (ATCC Accession No. 37146), the expression vectors pC4 (ATCC Accession No. 209646) and pC6 (ATCC Accession No.209647) contain the strong promoter (LTR) of the Rous Sarcoma Virus (Cullen et al., Molecular and Cellular Biology, 438447 (March, 1985)) plus a fragment of the CMV-enhancer (Boshart et al., Cell 41:521-530 (1985)). Multiple cloning sites, e.g., with the restriction enzyme cleavage sites BamHI, XbaI and Asp718, facilitate the cloning of the gene of interest. The vectors also contain the 3′ intron, the polyadenylation and termination signal of the rat preproinsulin gene, and the mouse DHFR gene under control of the SV40 early promoter.

[0741] Specifically, the plasmid pC6, for example, is digested with appropriate restriction enzymes and then dephosphorylated using calf intestinal phosphates by procedures known in the art. The vector is then isolated from a 1% agarose gel.

[0742] A polynucleotide of the present invention is amplified according to the protocol outlined in Example 1. If a naturally occurring signal sequence is used to produce the polypeptide of the present invention, the vector does not need a second signal peptide. Alternatively, if a naturally occurring signal sequence is not used, the vector can be modified to include a heterologous signal sequence. (See, e.g., International Publication No. WO 96/34891.)

[0743] The amplified fragment is isolated from a 1% agarose gel using a commercially available kit (“Geneclean,” BIO 101 Inc., La Jolla, Calif.). The fragment then is digested with appropriate restriction enzymes and again purified on a 1% agarose gel.

[0744] The amplified fragment is then digested with the same restriction enzyme and purified on a 1% agarose gel. The isolated fragment and the dephosphorylated vector are then ligated with T4 DNA ligase. E coli HB101 or XL-1 Blue cells are then transformed and bacteria are identified that contain the fragment inserted into plasmid pC6 using, for instance, restriction enzyme analysis.

[0745] Chinese hamster ovary cells lacking an active DHFR gene is used for transfection. Five μg of the expression plasmid pC6 or pC4 is cotransfected with 0.5 μg of the plasmid pSVneo using lipofectin (Felgner et al., supra). The plasmid pSV2-neo contains a dominant selectable marker, the neo gene from Tn5 encoding an enzyme that confers resistance to a group of antibiotics including G418. The cells are seeded in alpha minus MEM supplemented with 1 mg/ml G418. After 2 days, the cells are trypsinized and seeded in hybridoma cloning plates (Greiner, Germany) in alpha minus MEM supplemented with 10, 25, or 50 ng/ml of methotrexate plus 1 mg/ml G418. After about 10-14 days single clones are trypsinized and then seeded in 6-well petri dishes or 10 ml flasks using different concentrations of methotrexate (50 nM, 100 nM, 200 nM, 400 nM, 800 nM). Clones growing at the highest concentrations of methotrexate are then transferred to new 6-well plates containing even higher concentrations of methotrexate (1 μM, 2 μM, 5 μM, 10 mM, 20 mM). The same procedure is repeated until clones are obtained which grow at a concentration of 100-200 μM. Expression of the desired gene product is analyzed, for instance, by SDS-PAGE and Western blot or by reversed phase HPLC analysis.

### Example 9

### Protein Fusions

[0746] The polypeptides of the present invention are preferably fused to other proteins. These fusion proteins can be used for a variety of applications. For example, fusion of the present polypeptides to His-tag, HA-tag, protein A, IgG domains, and maltose binding protein facilitates purification. (See Example 5; see also EP A 394,827; Traunecker, et al., Nature 331:84-86 (1988)). Similarly, fusion to IgG-1, IgG-3, and albumin increases the halflife time in vivo. Nuclear localization signals fused to the polypeptides of the present invention can target the protein to a specific subcellular localization, while covalent heterodimer or homodimers can increase or decrease the activity of a fusion protein. Fusion proteins can also create chimeric molecules having more than one function. Finally, fusion proteins can increase solubility and/or stability of the fused protein compared to the non-fused protein. All of the types of fusion proteins described above can be made by modifying the following protocol, which outlines the fusion of a polypeptide to an IgG molecule, or the protocol described in Example 5.

[0747] Briefly, the human Fc portion of the IgG molecule can be PCR amplified, using primers that span the 5′ and 3′ ends of the sequence described below. These primers also should have convenient restriction enzyme sites that will facilitate cloning into an expression vector, preferably a mammalian expression vector.

[0748] For example, if pC4 (ATCC Accession No. 209646) is used, the human Fc portion can be ligated into the BamHI cloning site. Note that the 3′ BamHI site should be destroyed. Next, the vector containing the human Fc portion is re-restricted with BamHI, linearizing the vector, and a polynucleotide of the present invention, isolated by the PCR protocol described in Example 1, is ligated into this BamHI site. Note that the polynucleotide is cloned without a stop codon, otherwise a fusion protein will not be produced.

[0749] If the naturally occurring signal sequence is used to produce the polypeptide of the present invention, pC4 does not need a second signal peptide. Alternatively, if the naturally occurring signal sequence is not used, the vector can be modified to include a heterologous signal sequence. (See, e.g., International Publication No. WO 96/34891.)

[0750] Human IgG Fc region:

| | |
|---|---|
| GGGATCCGGAGCCCAAATCTTCTGACAAAACTCACACATGCCCACCGTGCCCAGCAC | (SEQ ID NO: 1) |
| CTGAATTCGAGGGTGCACCGTCAGTCTTCCTCTTCCCCCCAAAACCCAAGGACACCCT | |
| CATGATCTCCCGGACTCCTGAGGTCACATGCGTGGTGGTGGACGTAAGCCACGAAGA | |
| CCCTGAGGTCAAGTTCAAGTGGTACGTGGACGGCGTGGAGGTGCATAATGCCAAGAC | |
| AAAGCCGCGGGAGGAGCAGTACAACAGCACGTACCGTGTGGTCAGCGTCCTCACCGT | |
| CCTGCACCAGGACTGGCTGAATGGCAAGGAGTACAAGTGCAAGGTCTCCAACAAAGC | |
| CCTCCCAACCCCCATCGAGAAAACCATCTCCAAAGCCAAAGGGCAGCCCCGAGAACC | |
| ACAGGTGTACACCCTGCCCCCATCCCGGGATGAGCTGACCAAGAACCAGGTCAGCCT | |
| GACCTGCCTGGTCAAAGGCTTCTATCCAAGCGACATCGCCGTGGAGTGGGAGAGCAA | |
| TGGGCAGCCGGAGAACAACTACAAGACCACGCCTCCCGTGCTGGACTCCGACGGCTC | |
| CTTCTTCCTCTACAGCAAGCTCACCGTGGACAAGAGCAGGTGGCAGCAGGGGAACGT | |
| CTTCTCATGCTCCGTGATGCATGAGGCTCTGCACAACCACTACACGCAGAAGAGCCTC | |
| TCCCTGTCTCCGGGTAAATGAGTGCGACGGCCGCGACTCTAGAGGAT | |

### Example 10

### Production of an Antibody from a Polypeptide

a) Hybridoma Technology

[0751] The antibodies of the present invention can be prepared by a variety of methods. (See, Current Protocols, Chapter 2.) As one example of such methods, cells expressing a polypeptide of the present invention are administered to an animal to induce the production of sera containing polyclonal antibodies. In a preferred method, a preparation of a polypeptide of the present invention is prepared and purified to render it substantially free of natural contaminants. Such a preparation is then introduced into an animal in order to produce polyclonal antisera of greater specific activity.

[0752] Monoclonal antibodies specific for a polypeptide of the present invention are prepared using hybridoma technology (Kohler et al., Nature 256:495 (1975); Kohler et al., Eur. J. Immunol. 6:511 (1976); Kohler et al., Eur. J. Immunol. 6:292 (1976); Hammerling et al., in: Monoclonal Antibodies and T-Cell Hybridomas, Elsevier, N.Y., pp. 563-681 (1981)). In general, an animal (preferably a mouse) is immunized with a polypeptide of the present invention or, more preferably, with a secreted polypeptide-expressing cell. Such polypeptide-expressing cells are cultured in any suitable tissue culture medium, preferably in Earle's modified Eagle's medium supplemented with 10% fetal bovine serum (inactivated at about 56° C.), and supplemented with about 10 g/l of nonessential amino acids, about 1,000 U/ml of penicillin, and about 100 μg/ml of streptomycin.

[0753] The splenocytes of such mice are extracted and fused with a suitable myeloma cell line. Any suitable myeloma cell line may be employed in accordance with the present invention; however, it is preferable to employ the parent myeloma cell line (SP20), available from the ATCC. After fusion, the resulting hybridoma cells are selectively maintained in HAT medium, and then cloned by limiting dilution as described by Wands et al. (Gastroenterology 80:225-232 (1981)). The hybridoma cells obtained through such a selection are then assayed to identify clones which secrete antibodies capable of binding the polypeptide of the present invention.

[0754] Alternatively, additional antibodies capable of binding to a polypeptide of the present invention can be produced in a two-step procedure using anti-idiotypic antibodies. Such a method makes use of the fact that antibodies are themselves antigens, and therefore, it is possible to obtain an antibody which binds to a second antibody. In accordance with this method, protein specific antibodies are used to immunize an animal, preferably a mouse. The splenocytes of such an animal are then used to produce hybridoma cells, and the hybridoma cells are screened to identify clones which produce an antibody whose ability to bind to the polypeptide-specific antibody can be blocked by said polypeptide. Such antibodies comprise anti-idiotypic antibodies to the polypeptide-specific antibody and are used to immunize an animal to induce formation of further polypeptide-specific antibodies.

[0755] For in vivo use of antibodies in humans, an antibody is “humanized”. Such antibodies can be produced using genetic constructs derived from hybridoma cells producing the monoclonal antibodies described above. Methods for producing chimeric and humanized antibodies are known in the art and are discussed herein. (See, for review, Morrison, Science 229:1202 (1985); Oi et al., BioTecbniques 4:214 (1986); Cabilly et al., U.S. Pat. No. 4,816,567; Taniguchi et al., EP 171496; Morrison et al., EP 173494; Neuberger et al., WO 8601533; Robinson et al., International Publication No. WO 8702671; Boulianne et al., Nature 312:643 (1984); Neuberger et al., Nature 314:268 (1985)).

b) Isolation Of Antibody Fragments Directed Against a Polypeptide of the Present Invention From A Library Of scFvs

[0756] Naturally occurring V-genes isolated from human PBLs are constructed into a library of antibody fragments which contain reactivities against a polypeptide of the present invention to which the donor may or may not have been exposed (see e.g., U.S. Pat. No. 5,885,793 incorporated herein by reference in its entirety).

[0757] Rescue of the Library. A library of scFvs is constructed from the RNA of human PBLs as described in International Publication No. WO 92/01047. To rescue phage displaying antibody fragments, approximately 10⁹ E. coli harboring the phagemid are used to inoculate 50 ml of 2×TY containing 1% glucose and 100 μg/ml of ampicillin (2xTY-AMP-GLU) and grown to an O.D. of 0.8 with shaking. Five ml of this culture is used to inoculate 50 ml of 2×TY-AMP-GLU, 2×108 TU of delta gene 3 helper (M13 delta gene III, see International Publication No. WO 92/01047) are added and the culture incubated at 37° C. for 45 minutes without shaking and then at 37° C. for 45 minutes with shaking. The culture is centrifuged at 4000 r.p.m. for 10 min. and the pellet resuspended in 2 liters of 2×TY containing 100 μg/ml ampicillin and 50 ug/ml kanamycin and grown overnight. Phage are prepared as described in International Publication No. WO 92/01047.

[0758] M13 delta gene III is prepared as follows: M13 delta gene III helper phage does not encode gene III protein, hence the phage(mid) displaying antibody fragments have a greater avidity of binding to antigen. Infectious M13 delta gene III particles are made by growing the helper phage in cells harboring a pUC19 derivative supplying the wild type gene III protein during phage morphogenesis. The culture is incubated for 1 hour at 37° C. without shaking and then for a further hour at 37° C. with shaking. Cells are spun down (IEC-Centra 8,400 r.p.m for 10 min), resuspended in 300 ml 2×TY broth containing 100 μg ampicillin/ml and 25 μg kanamycin/ml (2×TY-AMP-KAN) and grown overnight, shaking at 37° C. Phage particles are purified and concentrated from the culture medium by two PEG-precipitations (Sambrook et al., 1990), resuspended in 2 ml PBS and passed through a 0.45 ium filter (Mnisart NML; Sartorius) to give a final concentration of approximately 10¹³ transducing units/ml (ampicillin-resistant clones).

[0759] Panning of the Library. Immunotubes (Nunc) are coated overnight in PBS with 4 ml of either 100 μg/ml or 10 μg/ml of a polypeptide of the present invention. Tubes are blocked with 2% Marvel-PBS for 2 hours at 37° C. and then washed 3 times in PBS. Approximately 10¹³ TU of phage is applied to the tube and incubated for 30 minutes at room temperature tumbling on an over and under turntable and then left to stand for another 1.5 hours. Tubes are washed 10 times with PBS 0.1% Tween-20 and 10 times with PBS. Phage are eluted by adding 1 ml of 100 mM triethylamine and rotating 15 minutes on an under and over turntable after which the solution is immediately neutralized with 0.5 ml of 1.0M Tris-HCl, pH 7.4. Phage are then used to infect 10 ml of mid-log E. coli TG1 by incubating eluted phage with bacteria for 30 minutes at 37° C. The E. coli are then plated on TYE plates containing 1% glucose and 100 μg/ml ampicillin. The resulting bacterial library is then rescued with delta gene 3 helper phage as described above to prepare phage for a subsequent round of selection. This process is then repeated for a total of 4 rounds of affinity purification with tube-washing increased to 20 times with PBS, 0.1% Tween-20 and 20 times with PBS for rounds 3 and 4.

[0760] Characterization of Binders. Eluted phage from the 3rd and 4th rounds of selection are used to infect E. coli BB 2151 and soluble scFv is produced (Marks, et al., 1991) from single colonies for assay. ELISAs are performed with microtitre plates coated with either 10 pg/ml of the polypeptide of the present invention in 50 mM bicarbonate pH 9.6. Clones positive in ELISA are further characterized by PCR fingerprinting (see, e.g., International Publication No. WO 92/01047) and then by sequencing. These ELISA positive clones may also be further characterized by techniques known in the art, such as, for example, epitope mapping, binding affinity, receptor signal transduction, ability to block or competitively inhibit antibody/antigen binding, and competitive agonistic or antagonistic activity.

### Example 11

### Method of Determining Alterations in a Gene Corresponding to a Polynucleotide

[0761] RNA isolated from entire families or individual patients presenting with a cardiovascular disease or disorder is isolated. cDNA is then generated from these RNA samples using protocols known in the art. (See, Sambrook.) The cDNA is then used as a template for PCR, employing primers surrounding regions of interest in SEQ ID NO:X; and/or the nucleotide sequence of the cDNA contained in ATCC Deposit No:Z. Suggested PCR conditions consist of 35 cycles at 95 degrees C. for 30 seconds; 60-120 seconds at 52-58 degrees C.; and 60-120 seconds at 70 degrees C., using buffer solutions described in Sidransky et al., Science 252:706 (1991).

[0762] PCR products are then sequenced using primers labeled at their 5′ end with T4 polynucleotide kinase, employing SequiTherm Polymerase (Epicentre Technologies). The intron-exon boundaries of selected exons is also determined and genomic PCR products analyzed to confirm the results. PCR products harboring suspected mutations are then cloned and sequenced to validate the results of the direct sequencing.

[0763] PCR products are cloned into T-tailed vectors as described in Holton et al., Nucleic Acids Research, 19:1156 (1991) and sequenced with T7 polymerase (United States Biochemical). Affected individuals are identified by mutations not present in unaffected individuals.

[0764] Genomic rearrangements are also observed as a method of determining alterations in a gene corresponding to a polynucleotide. Genomic clones isolated according to Example 2 are nick-translated with digoxigenindeoxy-uridine 5′-triphosphate (Boehringer Manheim), and FISH performed as described in Johnson et al., Methods Cell Biol. 35:73-99 (1991). Hybridization with the labeled probe is carried out using a vast excess of human cot-I DNA for specific hybridization to the corresponding genomic locus.

[0765] Chromosomes are counterstained with 4,6-diamino-2-phenylidole and propidium iodide, producing a combination of C- and R-bands. Aligned images for precise mapping are obtained using a triple-band filter set (Chroma Technology, Brattleboro, Vt.) in combination with a cooled charge-coupled device camera (Photometrics, Tucson, Ariz.) and variable excitation wavelength filters. (Johnson et al., Genet. Anal. Tech. Appl., 8:75 (1991)). Inage collection, analysis and chromosomal fractional length measurements are performed using the ISee Graphical Program System. (Inovision Corporation, Durham, N.C.) Chromosome alterations of the genomic region hybridized by the probe are identified as insertions, deletions, and translocations. These alterations are used as a diagnostic marker for an associated disease.

### Example 12

### Method of Detecting Abnormal Levels of a Polypeptide in a Biological Sample

[0766] A polypeptide of the present invention can be detected in a biological sample, and if an increased or decreased level of the polypeptide is detected, this polypeptide is a marker for a particular phenotype. Methods of detection are numerous, and thus, it is understood that one skilled in the art can modify the following assay to fit their particular needs.

[0767] For example, antibody-sandwich ELISAs are used to detect polypeptides in a sample, preferably a biological sample. Wells of a microtiter plate are coated with specific antibodies, at a final concentration of 0.2 to 10 ug/ml. The antibodies are either monoclonal or polyclonal and are produced by the method described in Example 10. The wells are blocked so that non-specific binding of the polypeptide to the well is reduced.

[0768] The coated wells are then incubated for >2 hours at RT with a sample containing the polypeptide. Preferably, serial dilutions of the sample should be used to validate results. The plates are then washed three times with deionized or distilled water to remove unbound polypeptide.

[0769] Next, 50 ul of specific antibody-alkaline phosphatase conjugate, at a concentration of 25400 ng, is added and incubated for 2 hours at room temperature. The plates are again washed three times with deionized or distilled water to remove unbound conjugate.

[0770] Add 75 ul of 4-methylumbelliferyl phosphate (MUP) or p-nitrophenyl phosphate (NPP) substrate solution to each well and incubate 1 hour at room temperature. Measure the reaction by a microtiter plate reader. Prepare a standard curve, using serial dilutions of a control sample, and plot polypeptide concentration on the X-axis (log scale) and fluorescence or absorbance of the Y-axis (linear scale). Interpolate the concentration of the polypeptide in the sample using the standard curve.

### Example 13

### Formulation

[0771] The invention also provides methods of preventing, treating and/or ameliorating a cardiovascular disease or disorder by administration to a subject of an effective amount of a Therapeutic. By therapeutic is meant polynucleotides or polypeptides of the invention (including fragments and variants), agonists or antagonists thereof, and/or antibodies thereto, in combination with a pharmaceutically acceptable carrier type (e.g., a sterile carrier).

[0772] The Therapeutic will be formulated and dosed in a fashion consistent with good medical practice, taking into account the clinical condition of the individual patient (especially the side effects of treatment with the Therapeutic alone), the site of delivery, the method of administration, the scheduling of administration, and other factors known to practitioners. The “effective amount” for purposes herein is thus determined by such considerations.

[0773] As a general proposition, the total pharmaceutically effective amount of the Therapeutic administered parenterally per dose will be in the range of about lug/kg/day to 10 mg/kg/day of patient body weight, although, as noted above, this will be subject to therapeutic discretion. More preferably, this dose is at least 0.01 mg/kg/day, and most preferably for humans between about 0.01 and 1 mg/kg/day for the hormone. If given continuously, the Therapeutic is typically administered at a dose rate of about 1 ug/kg/hour to about 50 ug/kg/hour, either by 14 injections per day or by continuous subcutaneous infusions, for example, using a mini-pump. An intravenous bag solution may also be employed. The length of treatment needed to observe changes and the interval following treatment for responses to occur appears to vary depending on the desired effect.

[0774] Therapeutics can be are administered orally, rectally, parenterally, intracistemally, intravaginally, intraperitoneally, topically (as by powders, ointments, gels, drops or transdermal patch), bucally, or as an oral or nasal spray. “Pharmaceutically acceptable carrier” refers to a non-toxic solid, semisolid or liquid filler, diluent, encapsulating material or formulation auxiliary of any. The term “parenteral” as used herein refers to modes of administration which include intravenous, intramuscular, intraperitoneal, intrasternal, subcutaneous and intraarticular injection and infusion.

[0775] Therapeutics of the invention are also suitably administered by sustained-release systems. Suitable examples of sustained-release Therapeutics are administered orally, rectally, parenterally, intracistemally, intravaginally, intraperitoneally, topically (as by powders, ointments, gels, drops or transdermal patch), bucally, or as an oral or nasal spray. “Pharmaceutically acceptable carrier” refers to a non-toxic solid, semisolid or liquid filler, diluent, encapsulating material or formulation auxiliary of any type. The term “parenteral” as used herein refers to modes of administration which include intravenous, intramuscular, intraperitoneal, intrasternal, subcutaneous and intraarticular injection and infusion.

[0776] Therapeutics of the invention are also suitably administered by sustained-release systems. Suitable examples of sustained-release Therapeutics include suitable polymeric materials (such as, for example, semi-permeable polymer matrices in the form of shaped articles, e.g., films, or microcapsules), suitable hydrophobic materials (for example as an emulsion in an acceptable oil) or ion exchange resins, and sparingly soluble derivatives (such as, for example, a sparingly soluble salt).

[0777] Sustained-release matrices include polylactides (U.S. Pat. No. 3,773,919, EP 58,481), copolymers of L-glutamic acid and gamma-ethyl-L-glutamate (Sidman et al., Biopolymers 22:547-556 (1983)), poly (2-hydroxyethyl methacrylate) (Langer et al., J. Biomed. Mater. Res. 15:167-277 (1981), and Langer, Chem. Tech. 12:98-105 (1982)), ethylene vinyl acetate (Langer et al., Id.) or poly-D-(−)-3-hydroxybutyric acid (EP 133,988).

[0778] In a preferred embodiment, polypeptide, polynucleotide, and antibody compositions of the invention are formulated in a biodegradable, polymeric drug delivery system, for example as described in U.S. Pat. Nos. 4,938,763, 5,278,201; 5,278,202; 5,324,519; 5,340,849; and 5,487,897 and in International Publication Numbers WO01/35929, WO00/24374, and WO00/06117 which are hereby incorporated by reference in their entirety. In specific preferred embodiments the polypeptide, polynucleotide, and antibody compositions of the invention are formulated using the ATRIGEL® Biodegradable System of Atrix Laboratories, Inc. (Fort Collins, Colo.).

[0779] Examples of biodegradable polymers which can be used in the formulation of polypeptide, polynucleotide, and antibody compositions, include but are not limited to, polylactides, polyglycolides, polycaprolactones, polyanhydrides, polyamides, polyurethanes, polyesteramides, polyorthoesters, polydioxanones, polyacetals, polyketals, polycarbonates, polyorthocarbonates, polyphosphazenes, polyhydroxybutyrates, polyhydroxyvalerates, polyallylene oxalates, polyalkylene succinates, poly(malic acid), poly(amino acids), poly(methyl vinyl ether), poly(maleic anhydride), polyvinylpyrrolidone, polyethylene glycol, polyhydroxycellulose, chitin, chitosan, and copolymers, terpolymers, or combinations or mixtures of the above materials. The preferred polymers are those that have a lower degree of crystallization and are more hydrophobic. These polymers and copolymers are more soluble in the biocompatible solvents than the highly crystalline polymers such as polyglycolide and chitin which also have a high degree of hydrogen-bonding. Preferred materials with the desired solubility parameters are the polylactides, polycaprolactones, and copolymers of these with glycolide in which there are more amorphous regions to enhance solubility. In specific preferred embodiments, the biodegradable polymers which can be used in the formulation of polypeptide, polynucleotide, and antibody compositions are poly(lactide-co-glycolides). Polymer properties such as molecular weight, hydrophobicity, and lactide/glycolide ratio may be modified to obtain the desired polypeptide, polynucleotide, or antibody release profile (See, e.g., Ravivarapu et al., Journal of Pharmaceutical Sciences 89:732-741 (2000), which is hereby incorporated by reference in its entirety).

[0780] It is also preferred that the solvent for the biodegradable polymer be non-toxic, water miscible, and otherwise biocompatible. Examples of such solvents include, but are not limited to, N-methyl-2-pyrrolidone, 2-pyrrolidone, C2 to C6 alkanols, C1 to C15 alchohols, dils, triols, and tetraols such as ethanol, glycerine propylene glycol, butanol; C3 to C15 alkyl ketones such as acetone, diethyl ketone and methyl ethyl ketone; C3 to C15 esters such as methyl acetate, ethyl acetate, ethyl lactate; alkyl ketones such as methyl ethyl ketone, C1 to C15 amides such as dimethylformamide, dimethylacetamide and caprolactam; C3 to C20 ethers such as tetrahydrofuran, or solketal; tweens, triacetin, propylene carbonate, decylmethylsulfoxide, dimethyl sulfoxide, oleic acid, 1-dodecylazacycloheptan-2-one, Other preferred solvents are benzyl alchohol, benzyl benzoate, dipropylene glycol, tributyrin, ethyl oleate, glycerin, glycofural, isopropyl myristate, isopropyl palmitate, oleic acid, polyethylene glycol, propylene carbonate, and triethyl citrate. The most preferred solvents are N-methyl-2-pyrrolidone, 2-pyrrolidone, dimethyl sulfoxide, triacetin, and propylene carbonate because of the solvating ability and their compatibility.

[0781] Additionally, formulations comprising polypeptide, polynucleotide, and antibody compositions and a biodegradable polymer may also include release-rate modification agents and/or pore-forming agents. Examples of release-rate modification agents include, but are not limited to, fatty acids, triglycerides, other like hydrophobic compounds, organic solvents, plasticizing compounds and hydrophilic compounds. Suitable release rate modification agents include, for example, esters of mono-, di-, and tricarboxylic acids, such as 2-ethoxyethyl acetate, methyl acetate, ethyl acetate, diethyl phthalate, dimethyl phthalate, dibutyl phthalate, dimethyl adipate, dimethyl succinate, dimethyl oxalate, dimethyl citrate, triethyl citrate, acetyl tributyl citrate, acetyl triethyl citrate, glycerol triacetate, di(n-butyl) sebecate, and the like; polyhydroxy alcohols, such as propylene glycol, polyethylene glycol, glycerin, sorbitol, and the like; fatty acids; triesters of glycerol, such as triglycerides, epoxidized soybean oil, and other epoxidized vegetable oils; sterols, such as cholesterol; alcohols, such as C.sub.6-C.sub.12 alkanols, 2-ethoxyethanol. The release rate modification agent may be used singly or in combination with other such agents. Suitable combinations of release rate modification agents include, but are not limited to, glycerin/propylene glycol, sorbitol/glycerine, ethylene oxide/propylene oxide, butylene glycol/adipic acid, and the like. Preferred release rate modification agents include, but are not limited to, dimethyl citrate, triethyl citrate, ethyl heptanoate, glycerin, and hexanediol. Suitable pore-forming agents that may be used in the polymer composition include, but are not limited to, sugars such as sucrose and dextrose, salts such as sodium chloride and sodium carbonate, polymers such as hydroxylpropylcellulose, carboxymethylcellulose, polyethylene glycol, and polyvinylpyrrolidone. Solid crystals that will provide a defined pore size, such as salt or sugar, are preferred.

[0782] In specific preferred embodiments the polypeptide, polynucleotide, and antibody compositions of the invention are formulated using the BEMA™ BioErodible Mucoadhesive System, MCA™ MucoCutaneous Absorption System, SMP™ Solvent MicroParticle System, or BCP™ BioCompatible Polymer System of Atrix Laboratories, Inc. (Fort Collins, Colo.).

[0783] Sustained-release Therapeutics also include liposomally entrapped Therapeutics of the invention (see generally, Langer, Science 249:1527-1533 (1990); Treat et al., in Liposomes in the Therapy of Infectious Disease and Cancer, Lopez-Berestein and Fidler (eds.), Liss, New York, pp. 317-327 and 353-365 (1989)). Liposomes containing the Therapeutic are prepared by methods known per se: DE 3,218,121; Epstein et al., Proc. Natl. Acad. Sci. (USA) 82:3688-3692 (1985); Hwang et al., Proc. Natl. Acad. Sci.(USA) 77:4030-4034 (1980); EP 52,322; EP 36,676; EP 88,046; EP 143,949; EP 142,641; Japanese Pat. Appl. 83-118008; U.S. Pat. Nos. 4,485,045 and 4,544,545; and EP 102,324. Ordinarily, the liposomes are of the small (about 200-800 Angstroms) unilamellar type in which the lipid content is greater than about 30 mol. percent cholesterol, the selected proportion being adjusted for the optimal Therapeutic.

[0784] In yet an additional embodiment, the Therapeutics of the invention are delivered by way of a pump (see Langer, supra; Sefton, CRC Crit. Ref. Biomed. Eng. 14:201 (1987); Buchwald et al., Surgery 88:507 (1980); Saudek et al., N. Engl. J. Med. 321:574 (1989)).

[0785] Other controlled release systems are discussed in the review by Langer (Science 249:1527-1533 (1990)).

[0786] For parenteral administration, in one embodiment, the Therapeutic is formulated generally by mixing it at the desired degree of purity, in a unit dosage injectable form (solution, suspension, or emulsion), with a pharmaceutically acceptable carrier, i.e., one that is non-toxic to recipients at the dosages and concentrations employed and is compatible with other ingredients of the formulation. For example, the formulation preferably does not include oxidizing agents and other compounds that are known to be deleterious to the Therapeutic.

[0787] Generally, the formulations are prepared by contacting the Therapeutic uniformly and intimately with liquid carriers or finely divided solid carriers or both. Then, if necessary, the product is shaped into the desired formulation. Preferably the carrier is a parenteral carrier, more preferably a solution that is isotonic with the blood of the recipient Examples of such carrier vehicles include water, saline, Ringer's solution, and dextrose solution. Non-aqueous vehicles such as fixed oils and ethyl oleate are also useful herein, as well as liposomes.

[0788] The carrier suitably contains minor amounts of additives such as substances that enhance isotonicity and chemical stability. Such materials are non-toxic to recipients at the dosages and concentrations employed, and include buffers such as phosphate, citrate, succinate, acetic acid, and other organic acids or their salts; antioxidants such as ascorbic acid; low molecular weight (less than about ten residues) polypeptides, e.g., polyarginine or tripeptides; proteins, such as serum albumin, gelatin, or immunoglobulins; hydrophilic polymers such as polyvinylpyrrolidone; amino acids, such as glycine, glutamic acid, aspartic acid, or arginine; monosaccharides, disaccharides, and other carbohydrates including cellulose or its derivatives, glucose, manose, or dextrins; chelating agents such as EDTA; sugar alcohols such as mannitol or sorbitol; counterions such as sodium; and/or nonionic surfactants such as polysorbates, poloxamers, or PEG.

[0789] The Therapeutic is typically formulated in such vehicles at a concentration of about 0.1 mg/ml to 100 mg/ml, preferably 1-10 mg/ml, at a pH of about 3 to 8. It will be understood that the use of certain of the foregoing excipients, carriers, or stabilizers will result in the formation of polypeptide salts.

[0790] Any pharmaceutical used for therapeutic administration can be sterile. Sterility is readily accomplished by filtration through sterile filtration membranes (e.g., 0.2 micron membranes). Therapeutics generally are placed into a container having a sterile access port, for example, an intravenous solution bag or vial having a stopper pierceable by a hypodermic injection needle.

[0791] Therapeutics ordinarily will be stored in unit or multi-dose containers, for example, sealed ampoules or vials, as an aqueous solution or as a lyophilized formulation for reconstitution. As an example of a lyophilized formulation, 10-ml vials are filled with 5 ml of sterile-filtered 1% (w/v) aqueous Therapeutic solution, and the resulting mixture is lyophilized. The infusion solution is prepared by reconstituting the lyophilized Therapeutic using bacteriostatic Water-for-Injection.

[0792] The invention also provides a pharmaceutical pack or kit comprising one or more containers filled with one or more of the ingredients of the Therapeutics of the invention. Associated with such container(s) can be a notice in the form prescribed by a governmental agency regulating the manufacture, use or sale of pharmaceuticals or biological products, which notice reflects approval by the agency of manufacture, use or sale for human administration. In addition, the Therapeutics may be employed in conjunction with other therapeutic compounds.

[0793] The Therapeutics of the invention may be administered alone or in combination with adjuvants. Adjuvants that may be administered with the Therapeutics of the invention include, but are not limited to, alum, alum plus deoxycholate (ImmunoAg), MTP-PE (Biocine Corp.), QS21 (Genentech, Inc.), BCG (e.g., THERACYS®), MPL and nonviable preparations of Corynebacterium parvum. In a specific embodiment, Therapeutics of the invention are administered in combination with alum. In another specific embodiment, Therapeutics of the invention are administered in combination with QS-21. Further adjuvants that may be administered with the Therapeutics of the invention include, but are not limited to, Monophosphoryl lipid immunomodulator, AdjuVax 100a, QS-21, QS-18, CRL1005, Aluminum salts, MF-59, and Virosomal adjuvant technology. Vaccines that may be administered with the Therapeutics of the invention include, but are not limited to, vaccines directed toward protection against MMR (measles, mumps, rubella), polio, varicella, tetanus/diptheria, hepatitis A, hepatitis B, haemophilus influenzae B, whooping cough, pneumonia, influenza, Lyme's Disease, rotavirus, cholera, yellow fever, Japanese encephalitis, poliomyelitis, rabies, typhoid fever, and pertussis. Combinations may be administered either concomitantly, e.g., as an admixture, separately but simultaneously or concurrently; or sequentially. This includes presentations in which the combined agents are administered together as a therapeutic mixture, and also procedures in which the combined agents are administered separately but simultaneously, e.g., as through separate intravenous lines into the same individual. Administration “in combination” further includes the separate administration of one of the compounds or agents given first, followed by the second.

[0794] The Therapeutics of the invention may be administered alone or in combination with other therapeutic agents. Therapeutic agents that may be administered in combination with the Therapeutics of the invention, include but not limited to, chemotherapeutic agents, antibiotics, steroidal and non-steroidal anti-inflammatories, conventional immunotherapeutic agents, and/or therapeutic treatments described below. Combinations may be administered either concomitantly, e.g., as an admixture, separately but simultaneously or concurrently; or sequentially. This includes presentations in which the combined agents are administered together as a therapeutic mixture, and also procedures in which the combined agents are administered separately but simultaneously, e.g., as through separate intravenous lines into the same individual. Administration “in combination” further includes the separate administration of one of the compounds or agents given first, followed by the second.

[0795] In one embodiment, the Therapeutics of the invention are administered in combination with an anticoagulant. Anticoagulants that may be administered with the compositions of the invention include, but are not limited to, heparin, low molecular weight heparin, warfarin sodium (e.g., COUMADIN®), dicumarol, 4-hydroxycoumarin, anisindione (e.g., MIRADON™), acenocoumarol (e.g., nicoumalone, SINTHROME™), indan-1,3-dione, phenprocoumon (e.g., MARCUMAR™), ethyl biscoumacetate (e.g., TROMEXAN™), and aspirin. In a specific embodiment, compositions of the invention are administered in combination with heparin and/or warfarin. In another specific embodiment, compositions of the invention are administered in combination with warfarin. In another specific embodiment, compositions of the invention are administered in combination with warfarin and aspirin. In another specific embodiment, compositions of the invention are administered in combination with heparin. In another specific embodiment, compositions of the invention are administered in combination with heparin and aspirin.

[0796] In another embodiment, the Therapeutics of the invention are administered in combination with thrombolytic drugs. Thrombolytic drugs that may be administered with the compositions of the invention include, but are not limited to, plasminogen, lys-plasmninogen, alpha2-antiplasmin, streptokinae (e.g., KABIKINASE™), antiresplace (e.g., EMINASE™), tissue plasminogen activator (t-PA, altevase, ACTIVASE™), urokinase (e.g., ABBOKINASE™), sauruplase, (Prourokinase, single chain urolinase), and aminocaproic acid (e.g., AMICAR™). In a specific embodiment, compositions of the invention are administered in combination with tissue plasminogen activator and aspirin.

[0797] In another embodiment, the Therapeutics of the invention are administered in combination with antiplatelet drugs. Antiplatelet drugs that may be administered with the compositions of the invention include, but are not limited to, aspirin, dipyridamole (e.g., PERSANTINE™), and ticlopidine (e.g., TICLID™).

[0798] In specific embodiments, the use of anticoagulants, thrombolytic and/or antiplatelet drugs in combination with Therapeutics of the invention is contemplated for the detection, prevention, diagnosis, prognostication, treatment, and/or amelioration of thrombosis, arterial thrombosis, venous thrombosis, thromboembolism, pulmonary embolism, atherosclerosis, myocardial infarction, transient ischemic attack, unstable angina. In specific embodiments, the use of anticoagulants, thrombolytic drugs and/or antiplatelet drugs in combination with Therapeutics of the invention is contemplated for the prevention of occulsion of saphenous grafts, for reducing the risk of periprocedural thrombosis as might accompany angioplasty procedures, for reducing the risk of stroke in patients with atrial fibrillation including nonrheumatic atrial fibrillation, for reducing the risk of embolism associated with mechanical heart valves and or mitral valves disease. Other uses for the therapeutics of the invention, alone or in combination with antiplatelet, anticoagulant, and/or thrombolytic drugs, include, but are not limited to, the prevention of occlusions in extracorporeal devices (e.g., intravascular canulas, vascular access shunts in hemodialysis patients, hemodialysis machines, and cardiopulmonary bypass machines).

[0799] Therapeutics of the invention may also be administered in combination with additional cardiovascular agents, such as, for example, beta-adrenergic blockers, calcium channel blockers, ACE inhibitors, angiotensin II blockers, alpha adrenergic blockers, hypotensive agents, antilipemic agents, and vasodilating agents.

[0800] Non-limiting examples of beta-adrenergic blockers includes TENORMINT (atenolol), BREVIBLOC™ (esmolol), NORMODYNE™ (labetalol), TRANDATE™, LOPRESSOR™ (metoprolol), INDERAL™ (propranolol), and BETApp96™ (sotalol). Calcium channel blockers includes, for example, NORVASC™ (amnlodipine), CARDIZEM™ (diltiazem), PLENDIL™ (felodipine), DYNACRIC™ (isradipine), CARDENE™ (nicardipine), ADALAT™ (nifedipine), and CALAN™ (verapamil). ACE inhibitors includes, for example, LOTENSIN™ (benazepril), CAPOTEN™ (captopril), VASOTEC™ (enalapril), MONOPRIL™ (fosinopril), PRINIVIL™ (lisinopril), ACCUPRIL™ (quinapril), and ALTACE™ (ramipril). Non-limiting examples of angiotensin II blockers includes AVAPRO™ (irbesartan), COZAAR™ (losartan), and DIOVAN™ (valsartan). Alpha adrenergic blockers includes, for example, CARDURA™ (doxazosin), MINIPRESSm (prazosin), FLOMAX™ (tamsulosin), and terazosin. Hypotensive agents include, for example, CATAPRES™ (clonidine), APRESOLINE™ (hydralazine), ALDOMET™ (methyldopa), LONITEN™ (minoxidil), NIPRIDE™ (nitroprusside) and reserpine. Antilipemic agents include, for example, LIPITOR™ (atorvastatin), QUESTRAN™ (cholestyramine), LOLESTID™ (colestipol), TRICOR™ (fenofibrate), LOPID™ (gemfibrate), MEVACOR™ (lovstatin), PRAVACHOL™ (pravastatin), and ZOCOR™ (simvastatin). Non-limiting examples of vasodilating agents include alprostadil, amyl nitrite, PERSANTIN™ (dipyridamole), FLONAN™ (epoprostenol), ISORDIL™ (isosorbide dinitrate), IMDUR™ (isosorbide mononitrate), NIMOTOP™ (nimodipine), INOmax™ (nitric oxide gas), nitroglycerin, papaverine, and PRISCOLINE™ (tolazoline).

[0801] In certain embodiments, Therapeutics of the invention are administered in combination with antiretroviral agents, nucleoside/nucleotide reverse transcriptase inhibitors (NRTIs), non-nucleoside reverse transcriptase inhibitors (NNRTIs), and/or protease inhibitors (PIs). NRTIs that may be administered in combination with the Therapeutics of the invention, include, but are not limited to, RETROVIR™ (zidovudine/AZT), VIDEX™ (didanosine/ddI), HIVID™ (zalcitabine/ddC), ZERIT™ (stavudine/d4T), EPIVIR™ (lamivudine/3TC), and COMBIVIR™ (zidovudine/lamivudine). NNRTIs that may be administered in combination with the Therapeutics of the invention, include, but are not limited to, VIRAMUN™ (nevirapine), RESCRIPTOR™ (delavirdine), and SUSTIVA™ (efavirenz). Protease inhibitors that may be administered in combination with the Therapeutics of the invention, include, but are not limited to, CRIXIVAN™ (indinavir), NORVIR™ (ritonavir), INVIRASE™ (saquinavir), and VIRACEPT™ (nelfinavir). In a specific embodiment, antiretroviral agents, nucleoside reverse transcriptase inhibitors, non-nucleoside reverse transcriptase inhibitors, and/or protease inhibitors may be used in any combination with Therapeutics of the invention to treat AIDS and/or to prevent or treat HIV infection.

[0802] Additional NRTIs include LODENOSINE™ (F-ddA; an acid-stable adenosine NRTI; Triangle/Abbott; COVIRACIL™ (emtricitabine/FTC; structurally related to lamivudine (3TC) but with 3- to 10-fold greater activity in vitro; Triangle/Abbott); dOTC (BCH-10652, also structurally related to lamivudine but retains activity against a substantial proportion of lamivudine-resistant isolates; Biochem Pharma); Adefovir (refused approval for anti-HIV therapy by FDA; Gilead Sciences); PREVEON® (Adefovir Dipivoxil, the active prodrug of adefovir; its active form is PMEA-pp); TENOFOVIR™ (bis-POC PMPA, a PMPA prodrug; Gilead); DAPD/DXG (active metabolite of DAPD; Triangle/Abbott); D-D4FC (related to 3TC, with activity against AZT/3TC-resistant virus); GW420867X (Glaxo Wellcome); ZIAGEN™ (abacavir/159U89; Glaxo Wellcome Inc.); CS-87 (3′azido-2′,3′-dideoxyuridine; WO 99/66936); and S-acyl-2-thioethyl (SATE)-bearing prodrug forms of β-L-FD4C and β-L-FddC (WO 98/17281).

[0803] Additional NNRTIs include COACTINON™ (Emivirine/MKC442, potent NNRTI of the HEPT class; Triangle/Abbott); CAPRAVRINE™ (AG-1549/S-1153, a next generation NNRTI with activity against viruses containing the K103N mutation; Agouron); PNU-142721 (has 20- to 50-fold greater activity than its predecessor delavirdine and is active against K103N mutants; Pharmacia & Upjohn); DPC-961 and DPC-963 (second-generation derivatives of efavirenz, designed to be active against viruses with the K103N mutation; DuPont); GW-420867X (has 25-fold greater activity than HBY097 and is active against K103N mutants; Glaxo Wellcome); CALANOLIDE A (naturally occurring agent from the latex tree; active against viruses containing either or both the Y181C and K103N mutations); and Propolis (WO 99/49830).

[0804] Additional protease inhibitors include LOPINAVIR™ (ABT378/r; Abbott Laboratories); BMS-232632 (an azapeptide; Bristol-Myres Squibb); TIPRANAVIR™ (PNU-140690, a non-peptic dihydropyrone; Pharmacia & Upjohn); PD-178390 (a nonpeptidic dihydropyrone; Parke-Davis); BMS 232632 (an azapeptide; Bristol-Myers Squibb); L-756,423 (an indinavir analog; Merck); DMP-450 (a cyclic urea compound; Avid & DuPont); AG-1776 (a peptidonimetic with in vitro activity against protease inhibitor-resistant viruses; Agouron); VX-175/GW433908 (phosphate prodrug of amprenavir, Vertex & Glaxo Welcome); CGP61755 (Ciba); and AGENERASE™ (amprenavir; Glaxo Wellcome Inc.).

[0805] Additional antiretroviral agents include fusion inhibitors/gp41 binders. Fusion inhibitors/gp41 binders include T-20 (a peptide from residues 643-678 of the HIV gp41 transmembrane protein ectodomain which binds to gp41 in its resting state and prevents transformation to the fusogenic state; Trimeris) and T-1249 (a second-generation fusion inhibitor; Trimeris).

[0806] Additional antiretroviral agents include fusion inhibitors/chemokine receptor antagonists. Fusion inhibitors/chemokine receptor antagonists include CXCR4 antagonists such as AMD 3100 (a bicyclam), SDF-1 and its analogs, and ALX40-4C (a cationic peptide), T22 (an 18 amino acid peptide; Trimeris) and the T22 analogs T134 and T140; CCR5 antagonists such as RANTES (9-68), AOP-RANTES, NNY-RANTES, and TAK-779; and CCR5/CXCR4 antagonists such as NSC 651016 (a distamycin analog). Also included are CCR2B, CCR3, and CCR6 antagonists. Chemokine receptor agonists such as RANTES, SDF-1, MIP-1α, MIP-1β, etc., may also inhibit fusion.

[0807] Additional antiretroviral agents include integrase inhibitors. Integrase inhibitors include dicaffeoylquinic (DFQA) acids; L-chicoric acid (a dicaffeoyltartaric (DCTA) acid); quinalizarin (QLC) and related anthraquinones; ZINTEVIR™ (AR 177, an oligonucleotide that probably acts at cell surface rather than being a true integrase inhibitor; Arondex); and naphthols such as those disclosed in WO 98/50347.

[0808] Additional antiretroviral agents include hydroxyurea-like compounds such as BCX-34 (a purine nucleoside phosphorylase inhibitor; Biocryst); ribonucleotide reductase inhibitors such as DIDOX™ (Molecules for Health); inosine monophosphate dehydrogenase (IMPDH) inhibitors sucha as VX-497 (Vertex); and mycopholic acids such as CellCept (mycophenolate mofetil; Roche).

[0809] Additional antiretroviral agents include inhibitors of viral integrase, inhibitors of viral genome nuclear translocation such as arylene bis(methylketone) compounds; inhibitors of H1V entry such as AOP-RANTES, NNY-RANTES, RANTES-IgG fusion protein, soluble complexes of RANTES and glycosaminoglycans (GAG), and AMD-3100; nucleocapsid zinc finger inhibitors such as dithiane compounds; targets of HIV Tat and Rev; and pharmacoenhancers such as ABT-378.

[0810] Other antiretroviral therapies and adjunct therapies include cytokines and lymphokines such as MIP-1α, MIP-1β, SDF-1α, IL-2, PROLEUKIN™ (aldesleukin/L2-7001; Chiron), IL-4, IL-10, IL-12, and IL-13; interferons such as IFN-α2a; antagonists of TNFs, NFκB, GM-CSF, M-CSF, and IL-10; agents that modulate immune activation such as cyclosporin and prednisone; vaccines such as Remune™ (HIV Immunogen), APL 400-003 (Apollon), recombinant gp120 and fragments, bivalent (B/E) recombinant envelope glycoprotein, rgp120CM235, MN rgp120, SF-2 rgp120, gp120/soluble CD4 complex, Delta JR-FL protein, branched synthetic peptide derived from discontinuous gp120 C31C4 domain, fusion-competent immunogens, and Gag, Pol, Nef, and Tat vaccines; gene-based therapies such as genetic suppressor elements (GSEs; WO 98/54366), and intralines (genetically modified CC chemokines targetted to the ER to block surface expression of newly synthesized CCR5 (Yang et al., PNAS 94:11567-72 (1997); Chen et al., Nat. Med. 3:1110-16 (1997)); antibodies such as the anti-CXCR4 antibody 12G5, the anti-CCR5 antibodies 2D7, 5C7, PA8, PA9, PA10, PA11, PA12, and PA14, the anti-CD4 antibodies Q4120 and RPA-T4, the anti-CCR3 antibody 7B11, the anti-gp120 antibodies 17b, 48d, 447-52D, 257-D, 268-D and 50.1, anti-Tat antibodies, anti-TNF-α antibodies, and monoclonal antibody 33A; aryl hydrocarbon (AH) receptor agonists and antagonists such as TCDD, 3,3′,4,4′,5-pentachlorobiphenyl, 3,3′,4,4′-tetrachlorobiphenyl, and α-naphthoflavone (WO 98/30213); and antioxidants such as γ-L-glutamyl-L-cysteine ethyl ester (γ-GCE; WO 99/56764).

[0811] In a further embodiment, the Therapeutics of the invention are administered in combination with an antiviral agent. Antiviral agents that may be administered with the Therapeutics of the invention include, but are not limited to, acyclovir, ribavirin, amantadine, and remantidine.

[0812] In other embodiments, Therapeutics of the invention may be administered in combination with anti-opportunistic infection agents. Anti-opportunistic agents that may be administered in combination with the Therapeutics of the invention, include, but are not limited to, TRIMETHOPRIM-SULFAMETHOXAZOLE™, DAPSONE™, PENTAMINE™, ATOVAQUONE™, ISONIAZID™, RIFAMPIN™, PYRAZINAMIDE™, ETHAMBUTOL™, RIFABUTIN™, CLARITROMYCIN™, AZITHROMYCIN™, GANCICLOVIR™, FOSCARNET™, CIDOFOVIR™, FLUCONAZOLE™, ITRACONAZOLE™, KETOCONAZOLE™, ACYCLOVIR™, FAMCICOLVIR™, PYRIMETHAMINE™, LEUCOVORINM, NEUPOGEN™ (filgrastim/G-CSF), and LEUKINE™ (sargramostim/GM-CSF). In a specific embodiment, Therapeutics of the invention are used in any combination with TRIMETHOPRIMSULFAMETHOXAZOLE™, DAPSONE™, PENTAMDINE™, and/or ATOVAQUONE™ to prophylactically treat or prevent an opportunistic Pneumocystis carinii pneumonia infection. In another specific embodiment, Therapeutics of the invention are used in any combination with ISONIAZID™, RIFAMPIN™, PYRAZINAMIDE™, and/or ETHAMBUTOL™ to prophylactically treat or prevent an opportunistic Mycobacterium avium complex infection. In another specific embodiment, Therapeutics of the invention are used in any combination with RIFABUTIN™, CLARITHROMYCIN™, and/or AZNMOMYCIN™ to prophylactically treat or prevent an opportunistic Mycobacterium tuberculosis infection. In another specific embodiment, Therapeutics of the invention are used in any combination with GANCICLOVIR™, FOSCARNET™, and/or CIDOFOVIR™ to prophylactically treat or prevent an opportunistic cytomegalovirus infection. In another specific embodiment, Therapeutics of the invention are used in any combination with FLUCONAZOLE™, ITRACONAZOLE™, and/or KETOCONAZOLE™ to prophylactically treat or prevent an opportunistic fungal infection. In another specific embodiment, Therapeutics of the invention are used in any combination with ACYCLOVIR™ and/or FAMCICOLVIR™ to prophylactically treat or prevent an opportunistic herpes simplex virus type I and/or type II infection. In another specific embodiment, Therapeutics of the invention are used in any combination with PYRIMETHAMINE™ and/or LEUCOVORIN™ to prophylactically treat or prevent an opportunistic Toxoplasma gondii infection. In another specific embodiment, Therapeutics of the invention are used in any combination with LEUCOVORIN™ and/or NEUPOGEN™ to prophylactically treat or prevent an opportunistic bacterial infection.

[0813] In a further embodiment, the Therapeutics of the invention are administered in combination with an antibiotic agent. Antibiotic agents that may be administered with the Therapeutics of the invention include, but are not limited to, amoxicillin, beta-lactamases, aminoglycosides, beta-lactam (glycopeptide), beta-lactamases, Clindamycin, chloramphenicol, cephalosporins, ciprofioxacin, erythromycin, fluoroquinolones, macrolides, metronidazole, penicillins, quinolones, rapamycin, rifampin, streptomycin, sulfonamide, tetracyclines, trimethoprim, trimethoprim-sulfamethoxazole, and vancomycin.

[0814] In other embodiments, the Therapeutics of the invention are administered in combination with immunestimulants. Immunostimulants that may be administered in combination with the Therapeutics of the invention include, but are not limited to, levamisole (e.g., ERGAMISOL™), isoprinosine (e.g. INOSIPLEX™), interferons (e.g. interferon alpha), and interleutins (e.g., EL-2).

[0815] In other embodiments, Therapeutics of the invention are administered in combination with immunosuppressive agents. Immunosuppressive agents that may be administered in combination with the Therapeutics of the invention include, but are not limited to, steroids, cyclosporine, cyclosporine analogs, cyclophosphamide methylprednisone, prednisone, azathioprine, FK-506, 15-deoxyspergualin, and other immunosuppressive agents that act by suppressing the function of responding T cells. Other immunosuppressive agents that may be administered in combination with the Therapeutics of the invention include, but are not limited to, prednisolone, methotrexate, thalidomide, methoxsalen, rapamycin, leflunomide, mizoribine (BREDININ™), brequinar, deoxyspergualin, and azaspirane (SKF 105685), ORTHOCLONE OKT® 3 (muromonab-CD3), SANDIMMUNE™, NEORAL™, SANGDYA™ (cyclosporine), PROGRAF® (FK506, tacrolimus), CELLCEPT® (mycophenolate motefil, of which the active metabolite is mycophenolic acid), IMURAN™ (azathioprine), glucocorticosteroids, adrenocortical steroids such as DELTASONET (prednisone) and HYDELTRASOL™ (prednisolone), FOLEX™ and MEXATE™ (methotrxate), OXSORALEN-ULTRA™ (methoxsalen) and RAPAMUNE™ (sirolimus). In a specific embodiment, immunosuppressants may be used to prevent rejection of organ or bone marrow transplantation.

[0816] In an additional embodiment, Therapeutics of the invention are administered alone or in combination with one or more intravenous immune globulin preparations. Intravenous immune globulin preparations that may be administered with the Therapeutics of the invention include, but not limited to, GAMMAR™, IVEEGAM™, SANDOGLOBULIN™, GAMMAGARD S/D™, ATGAM™(antithymocyte glubulin), and GAMIMUNE™. In a specific embodiment, Therapeutics of the invention are administered in combination with intravenous immune globulin preparations in transplantation therapy (e.g., bone marrow transplant).

[0817] In certain embodiments, the Therapeutics of the invention are administered alone or in combination with an anti-inflammatory agent. Anti-inflammatory agents that may be administered with the Therapeutics of the invention include, but are not limited to, corticosteroids (e.g. betamethasone, budesonide, cortisone, dexamethasone, hydrocortisone, methylprednisolone, prednisolone, prednisone, and triamcinolone), nonsteroidal anti-inflammatory drugs (e.g., diclofenac, diflunisal, etodolac, fenoprofen, floctafenine, flurbiprofen, ibuprofen, indomethacin, ketoprofen, meclofenamate, mefenamic acid, meloxicam, nabumetone, naproxen, oxaprozin, phenylbutazone, piroxicam, sulindac, tenoxicam, tiaprofenic acid, and tolmetin.), as well as antihistamines, aminoarylcarboxylic acid derivatives, arylacetic acid derivatives, arylbutyric acid derivatives, arylcarboxylic acids, arylpropionic acid derivatives, pyrazoles, pyrazolones, salicylic acid derivatives, thiazinecarboxamides, e-acetamidocaproic acid, S-adenosylmethionine, 3-amino-4-hydroxybutyric acid, amixetrine, bendazac, benzydamine, bucolome, difenpiramide, ditazol, emorfazone, guaiazulene, nabumetone, nimesulide, orgotein, oxaceprol, paranyline, perisoxal, pifoxime, proquazone, proxazole, and tenidap.

[0818] In an additional embodiment, the compositions of the invention are administered alone or in combination with an anti-angiogenic agent. Anti-angiogenic agents that may be administered with the compositions of the invention include, but are not limited to, Angiostatin (Entremed, Rockville, Md.), Troponin-1 (Boston Life Sciences, Boston, Mass.), anti-Invasive Factor, retinoic acid and derivatives thereof, paclitaxel (Taxol), Suramin, Tissue Inhibitor of Metalloproteinase-1, Tissue Inhibitor of Metalloproteinase-2, VEGI, Plasminogen Activator Inhibitor-1, Plasminogen Activator Inhibitor-2, and various forms of the lighter “d group” transition metals.

[0819] Lighter “d group” transition metals include, for example, vanadium, molybdenum, tungsten, titanium, niobium, and tantalum species. Such transition metal species may form transition metal complexes. Suitable complexes of the above-mentioned transition metal species include oxo transition metal complexes.

[0820] Representative examples of vanadium complexes include oxo vanadium complexes such as vanadate and vanadyl complexes. Suitable vanadate complexes include metavanadate and orthovanadate complexes such as, for example, ammonium metavanadate, sodium metavanadate, and sodium orthovanadate. Suitable vanadyl complexes include, for example, vanadyl acetylacetonate and vanadyl sulfate including vanadyl sulfate hydrates such as vanadyl sulfate mono- and trihydrates.

[0821] Representative examples of tungsten and molybdenum complexes also include oxo complexes. Suitable oxo tungsten complexes include tungstate and tungsten oxide complexes. Suitable tungstate complexes include ammonium tungstate, calcium tungstate, sodium tungstate dihydrate, and tungstic acid. Suitable tungsten oxides include tungsten (I) oxide and tungsten (VI) oxide. Suitable oxo molybdenum complexes include molybdate, molybdenum oxide, and molybdenyl complexes. Suitable molybdate complexes include ammonium molybdate and its hydrates, sodium molybdate and its hydrates, and potassium molybdate and its hydrates. Suitable molybdenum oxides include molybdenum (VI) oxide, molybdenum (VI) oxide, and molybdic acid. Suitable molybdenyl complexes include, for example, molybdenyl acetylacetonate. Other suitable tungsten and molybdenum complexes include hydroxo derivatives derived from, for example, glycerol, tartaric acid, and sugars.

[0822] A wide variety of other anti-angiogenic factors may also be utilized within the context of the present invention. Representative examples include, but are not limited to, platelet factor 4; protamine sulphate; sulphated chitin derivatives (prepared from queen crab shells), (Murata et al., Cancer Res. 51:22-26, (1991)); Sulphated Polysaccharide Peptidoglycan Complex (SP-PG) (the function of this compound may be enhanced by the presence of steroids such as estrogen, and tamoxifen citrate); Staurosporine; modulators of matrix metabolism, including for example, proline analogs, cishydroxyproline, d,L-3,4-dehydroproline, Thiaproline, alpha,alpha-dipyridyl, aminopropionitrile furate; 4-propyl-54-pyridinyl)-2(3H)-oxazolone; Methotrexate; Mitoxantrone; Heparin; Interferons; 2 Macroglobulin-serum; ChIMP-3 (Pavloff et al., J. Bio. Chem. 267:17321-17326, (1992)); Chymostatin (Tomkinson et al., Biochem J. 286:475480, (1992)); Cyclodextrin Tetradecasulfate; Eponemycin; Camptothecin; Fumagillin (Ingber et al., Nature 348:555-557, (1990)); Gold Sodium Thiomalate (“GST”; Matsubara and Ziff, J. Clin. Invest. 79:1440-1446, (1987)); anticollagenase-serum; alpha2-antiplasmin (Holmes et al., J. Biol. Chem. 262(4):1659-1664, (1987)); Bisantrene (National Cancer Institute); Lobenzarit disodium (N2)-carboxyphenyl-4-chloroanthronilic acid disodium or “CCA”; (Takeuchi et al., Agents Actions 36:312-316, (1992)); and metalloproteinase inhibitors such as BB94.

[0823] Additional anti-angiogenic factors that may also be utilized within the context of the present invention include Thalidomide, (Celgene, Warren, N.J.); Angiostatic steroid; AGM-1470 (H. Brem and J. Folkman J Pediatr. Surg. 28:445-51 (1993)); an integrin alpha v beta 3 antagonist (C. Storgard et al., J Clint. Invest. 103:47-54 (1999)); carboxynaminolmidazole; Carboxyanidotriazole (CAI) (National Cancer Institute, Bethesda, Md.); Conbretastatin A-4 (CA4P) (OXiGENE, Boston, Mass.); Squalamine (Magainin Pharmaceuticals, Plymouth Meeting, Pa.); TNP470, (Tap Pharmaceuticals, Deerfield, Ill.); ZD-0101 AstraZeneca (London, UK); APRA (CT2584); Benefin, Byrostatin-1 (SC339555); CGP41251 (PKC 412); CM101; Dexrazoxane (ICRF187); DMXAA; Endostatin; Flavopridiol; Genestein; GTE; ImmTher; Iressa (ZD1839); Octreotide (Somatostatin); Panretin; Penacillamine; Photopoint; PI-88; Prinomastat (AG-3340) Purlytin; Suradista (FCE26644); Tamoxifen (Nolvadex); Tazarotene; Tetrathiomolybdate; Xeloda (Capecitabine); and 5-Fluorouracil.

[0824] Anti-angiogenic agents that may be administed in combination with the compounds of the invention may work through a variety of mechanisms including, but not limited to, inhibiting proteolysis of the extracellular matrix, blocking the function of endothelial cell-extracellular matrix adhesion molecules, by antagonizing the function of angiogenesis inducers such as growth factors, and inhibiting integrin receptors expressed on proliferating endothelial cells. Examples of anti-angiogenic inhibitors that interfere with extracellular matrix proteolysis and which may be administered in combination with the compositons of the invention include, but are not limited to, AG-3340 (Agouron, La Jolla, Calif.), BAY-12-9566 (Bayer, West Haven, Conn.), BMS-275291 (Bristol Myers Squibb, Princeton, N.J.), CGS-27032A (Novartis, East Hanover, N.J.), Marimastat (British Biotech, Oxford, UK), and Metastat (Aeterna, St-Foy, Quebec). Examples of anti-angiogenic inhibitors that act by blocking the function of endothelial cell-extracellular matrix adhesion molecules and which may be administered in combination with the compositons of the invention include, but are not limited to, EMD-121974 (Merck KcgaA Darmstadt, Germany) and Vitaxin (Ixsys, La Jolla, Calif./Medimmune, Gaithersburg, Md.). Examples of anti-angiogenic agents that act by directly antagonizing or inhibiting angiogenesis inducers and which may be administered in combination with the compositons of the invention include, but are not limited to, Angiozyme (Ribozyme, Boulder, Colo.), Anti-VEGF antibody (Genentech, S. San Francisco, Calif.), PTK-787/ZK-225846 (Novartis, Basel, Switzerland), SU-101 (Sugen, S. San Francisco, Calif.), SU-5416 (Sugen/Pharmacia Upjohn, Bridgewater, N.J.), and SU-6668 (Sugen). Other anti-angiogenic agents act to indirectly inhibit angiogenesis. Examples of indirect inhibitors of angiogenesis which may be administered in combination with the compositons of the invention include, but are not limited to, IM-862 (Cytran, Kirkland, Wash.), Interferon-alpha, IL-12 (Roche, Nutley, N.J.), and Pentosan polysulfate (Georgetown University, Washington, D.C.).

[0825] In particular embodiments, the use of compositions of the invention in combination with anti-angiogenic agents is contemplated for the treatment, prevention, and/or amelioration of an autoimmune disease, such as for example, an autoimmune disease described herein.

[0826] In a particular embodiment, the use of compositions of the invention in combination with anti-angiogenic agents is contemplated for the treatment, prevention, and/or amelioration of arthritis. In a more particular embodiment, the use of compositions of the invention in combination with anti-angiogenic agents is contemplated for the treatment, prevention, and/or amelioration of rheumatoid arthritis.

[0827] In another embodiment, the polynucleotides encoding a polypeptide of the present invention are administered in combination with an angiogenic protein, or polynucleotides encoding an angiogenic protein. Examples of angiogenic proteins that may be administered with the compositions of the invention include, but are not limited to, acidic and basic fibroblast growth factors, VEGF-1, VEGF-2, VEGF-3, epidermal growth factor alpha and beta, platelet-derived endothelial cell growth factor, platelet-derived growth factor, tumor necrosis factor alpha, hepatocyte growth factor, insulin-like growth factor, colony stimulating factor, macrophage colony stimulating factor, granulocyte/macrophage colony stimulating factor, and nitric oxide synthase.

[0828] In additional embodiments, compositions of the invention are administered in combination with a chemotherapeutic agent. Chemotherapeutic agents that may be administered with the Therapeutics of the invention include, but are not limited to alkylating agents such as nitrogen mustards (for example, Mechlorethamine, cyclophosphamide, Cyclophosphamide Ifosfamide, Melphalan (L-sarcolysin), and Chlorambucil), ethyleninines and methylmelamines (for example, Hexamethylmelamine and Thiotepa), alkyl sulfonates (for example, Busulfan), nitrosoureas (for example, Carmustine (BCNU), Lomustine (CCNU), Semustine (methyl-CCNU), and Streptozocin (streptozotocin)), triazenes (for example, Dacarbazine (DTIC; dimethyltriazenoimidazolecarboxamide)), folic acid analogs (for example, Methotrexate (amethopterin)), pyrimidine analogs (for example, Fluorouacil (5-fluorouracil; 5-FU), Floxuridine (fluorodeoxyuridine; FudR), and Cytarabine (cytosine arabinoside)), purine analogs and related inhibitors (for example, Mercaptopurine (6-mercaptopurine; 6-MP), Thioguanine (6-thioguanine; TG), and Pentostatin (2′-deoxycoformycin)), vinca alkaloids (for example, Vinblastine (VLB, vinblastine sulfate)) and Vincristine (vincristine sulfate)), epipodophyllotoxins (for example, Etoposide and Teniposide), antibiotics (for example, Dactinomycin (actinomycin D), Daunorubicin (daunomycin; rubidomycin), Doxorubicin, Bleomycin, Plicamycin (mithramycin), and Mitomycin (mitomycin C), enzymes (for example, L-Asparaginase), biological response modifiers (for example, Interferon-alpha and interferon-alpha-2b), platinum coordination compounds (for example, Cisplatin (cis-DDP) and Carboplatin), anthracenedione (Mitoxantrone), substituted ureas (for example, Hydroxyurea), methylhydrazine derivatives (for example, Procarbazine (N-methylhydrazine; MIH), adrenocorticosteroids (for example, Prednisone), progestins (for example, Hydroxyprogesterone caproate, Medroxyprogesterone, Medroxyprogesterone acetate, and Megestrol acetate), estrogens (for example, Diethylstilbestrol (DES), Diethylstilbestrol diphosphate, Estradiol, and Ethinyl estradiol), antiestrogens (for example, Tamoxifen), androgens (Testosterone proprionate, and Fluoxymesterone), antiandrogens (for example, Flutamide), gonadotropin-releasing horomone analogs (for example, Leuprolide), other hormones and hormone analogs (for example, methyltestosterone, estramustine, estramustine phosphate sodium, chlorotrianisene, and testolactone), and others (for example, dicarbazine, glutamic acid, and mitotane).

[0829] In one embodiment, the compositions of the invention are administered in combination with one or more of the following drugs: inflimab (also known as Remicade™ Centocor, Inc.), Trocade (Roche, RO-32-3555), Leflunomide (also known as Arava™ from Hoechst Marion Roussel), Kineret™ (an IL-1 Receptor antagonist also known as Anakinra from Amgen, Inc.)

[0830] In a specific embodiment, compositions of the invention are administered in combination with CHOP (cyclophosphamide, doxorubicin, vincristine, and prednisone) or combination of one or more of the components of CHOP. In one embodiment, the compositions of the invention are administered in combination with anti-CD20 antibodies, human monoclonal anti-CD20 antibodies. In another embodiment, the compositions of the invention are administered in combination with anti-CD20 antibodies and CHOP, or anti-CD20 antibodies and any combination of one or more of the components of CHOP, particularly cyclophosphamide and/or prednisone. In a specific embodiment, compositions of the invention are administered in combination with Rituximab. In a further embodiment, compositions of the invention are administered with Rituximab and CHOP, or Rituximab and any combination of one or more of the components of CHOP, particularly cyclophosphamide and/or prednisone. In a specific embodiment, compositions of the invention are administered in combination with tositumomab. In a further embodiment, compositions of the invention are administered with tositumomab and CHOP, or tositumomab and any combination of one or more of the components of CHOP, particularly cyclophosphamide and/or prednisone. The anti-CD20 antibodies may optionally be associated with radioisotopes, toxins or cytotoxic prodrugs.

[0831] In another specific embodiment, the compositions of the invention are administered in combination Zevalin™. In a further embodiment, compositions of the invention are administered with Zevalin™ and CHOP, or Zevalin™ and any combination of one or more of the components of CHOP, particularly cyclophosphamide and/or prednisone. Zevalin™ may be associated with one or more radisotopes. Particularly preferred isotopes are ⁹⁰Y and ¹¹¹In.

[0832] In an additional embodiment, the Therapeutics of the invention are administered in combination with cytokines. Cytokines that may be administered with the Therapeutics of the invention include, but are not limited to, IL2, IL3, IL4, IL5, IL6, IL7, IL10, IL12, IL13, IL15, anti-CD40, CD40L, IFN-gamma and TNF-alpha. In another embodiment, Therapeutics of the invention may be administered with any interleukin, including, but not limited to, IL-1alpha, IL-1beta, IL-2, IL-3, IL4, IL-5, IL-6, IL-7, IL-8, IL-9, IL-10, IL-li, IL-12, IL-13, IL-14, IL-15, IL-16, IL-17, IL-18, IL-19, IL-20, and IL-21.

[0833] In one embodiment, the Therapeutics of the invention are administered in combination with members of the TNF family. TNF, TNF-related or TNF-like molecules that may be administered with the Therapeutics of the invention include, but are not limited to, soluble forms of TNF-alpha, lymphotoxin-alpha (LT-alpha, also known as TNF-beta), LT-beta (found in complex heterotrimer LT-alpha2-beta), OPGL, FasL, CD27L, CD30L, CD40L, 4-1BBL, DcR3, OX40L, TNP-gamma (International Publication No. WO 96/14328), AIM-I (International Publication No. WO 97/33899), endokine-alpha (International Publication No. WO 98/07880), OPG, and neutrokine-alpha (International Publication No. WO 98/18921, OX40, and nerve growth factor (NGF), and soluble forms of Fas, CD30, CD27, CD40 and 4-IBB, TR2 (International Publication No. WO 96/34095), DR3 (International Publication No. WO 97/33904), DR4 (International Publication No. WO 98/32856), TR5 (International Publication No. WO 98/30693), TRANK, TR9 (International Publication No. WO 98/56892),TR10 (International Publication No. WO 98/54202), 312C2 (International Publication No. WO 98/06842), and TR12, and soluble forms CD154, CD70, and CD153.

[0834] In an additional embodiment, the Therapeutics of the invention are administered in combination with angiogenic proteins. Angiogenic proteins that may be administered with the Therapeutics of the invention include, but are not limited to, Glioma Derived Growth Factor (GDGF), as disclosed in European Patent Number EP-399816; Platelet Derived Growth Factor-A (PDGF-A), as disclosed in European Patent Number EP-682110; Platelet Derived Growth Factor-B (PDGF-B), as disclosed in European Patent Number EP-282317; Placental Growth Factor (P1GF), as disclosed in International Publication Number WO 92/06194; Placental Growth Factor-2 (P1GF-2), as disclosed in Hauser et al., Growth Factors, 4:259-268 (1993); Vascular Endothelial Growth Factor (VEGF), as disclosed in International Publication Number WO 90/13649; Vascular Endothelial Growth Factor-A (VEGF-A), as disclosed in European Patent Number EP-506477; Vascular Endothelial Growth Factor-2 (VEGF-2), as disclosed in International Publication Number WO 96/39515; Vascular Endothelial Growth Factor B (VEGF-3); Vascular Endothelial Growth Factor B-186 (VEGF-B186), as disclosed in International Publication Number WO 96/26736; Vascular Endothelial Growth Factor-D (VEGF-D), as disclosed in International Publication Number WO 98/02543; Vascular Endothelial Growth Factor-D (VEGF-D), as disclosed in International Publication Number WO 98/07832; and Vascular Endothelial Growth Factor-E (VEGF-E), as disclosed in German Patent Number DE19639601. The above mentioned references are herein incorporated by reference in their entireties.

[0835] In an additional embodiment, the Therapeutics of the invention are administered in combination with Fibroblast Growth Factors. Fibroblast Growth Factors that may be administered with the Therapeutics of the invention include, but are not limited to, FGF-1, FGF-2, FGF-3, FGF-4, FGF-5, FGF-6, FGF-7, FGF-8, FGF-9, FGF-10, FGF-11, FGF-12, FGF-13, FGF-14, and FGF-15.

[0836] In an additional embodiment, the Therapeutics of the invention are administered in combination with hematopoietic growth factors. Hematopoietic growth factors that may be administered with the Therapeutics of the invention include, but are not limited to, granulocyte macrophage colony stimulating factor (GM-CSF) (sargramostim, LEUKINE™, PROKINE™), granulocyte colony stimulating factor (G-CSF) (filgrastim, NEUPOGEN™), macrophage colony stimulating factor (M-CSF, CSF-1) erythropoietin (epoetin alfa, EPOGEN™, PROCRIT™), stem cell factor (SCF, c-kit ligand, steel factor), megakaryocyte colony stimulating factor, PIXY321 (a GMCSF/IL-3 fusion protein), interleukins, especially any one or more of IL-1 through IL-12, interferon-gamma, or thrombopoietin.

[0837] In certain embodiments, Therapeutics of the present invention are administered in combination with adrenergic blockers, such as, for example, acebutolol, atenolol, betaxolol, bisoprolol, carteolol, labetalol, metoprolol, nadolol, oxprenolol, penbutolol, pindolol, propranolol, sotalol, and timolol.

[0838] In another embodiment, the Therapeutics of the invention are administered in combination with an antiarrhythmic drug (e.g., adenosine, amidoarone, bretylium, digitalis, digoxin, digitoxin, diliazem, disopyramide, esmolol, flecainide, lidocaine, mexiletine, moricizine, phenyloin, procainamide, N-acetyl procainamide, propafenone, propranolol, quinidine, sotalol, tocainide, and verapamil).

[0839] In another embodiment, the Therapeutics of the invention are administered in combination with diuretic agents, such as carbonic anhydrase-inhibiting agents (e.g., acetazolamide, dichlorphenamide, and methazolamide), osmotic diuretics (e.g., glycerin, isosorbide, mannitol, and urea), diuretics that inhibit Na⁺-K⁺-2Cl⁻ symport (e.g., furosemide, bumetanide, azosemide, piretanide, tripamide, ethacrynic acid, muzolimine, and torsemide), thiazide and thiazide-like diuretics (e.g., bendroflumethiazide, benzthiazide, chlorothiazide, hydrochlorothiazide, hydroflumethiazide, methyclothiazide, polythiazide, trichormethiazide, chlorthalidone, indapamide, metolazone, and quinethazone), potassium sparing diuretics (e.g., amiloride and triamterene), and mineralcorticoid receptor antagonists (e.g., spironolactone, canrenone, and potassium canrenoate).

[0840] In one embodiment, the Therapeutics of the invention are administered in combination with treatments for endocrine and/or hormone imbalance disorders. Treatments for endocrine and/or hormone imbalance disorders include, but are not limited to, ¹²⁷I, radioactive isotopes of iodine such as ¹³¹I and ¹²³I; recombinant growth hormone, such as HUMATROPE™ (recombinant somatropin); growth hormone analogs such as PROTROPIN™ (somatrem); dopamine agonists such as PARLODEL™ (bromocriptine); somatostatin analogs such as SANDOSTATIN™ (octreotide); gonadotropin preparations such as PREGNYL™, A.P.L.™ and PROFASI™ (chorionic gonadotropin (CG)), PERGONAL™ (menotropins), and METRODIN™ (urofollitropin (uFSH)); synthetic human gonadotropin releasing hormone preparations such as FACTREL™ and LUTREPULSE™ (gonadorelin hydrochloride); synthetic gonadotropin agonists such as LUPRON™ (leuprolide acetate), SUPPRELIN™ (histrelin acetate), SYNAREL™ (nafarelin acetate), and ZOLADEX™ (goserelin acetate); synthetic preparations of thyrotropin-releasing hormone such as RELEFACT TRH™ and THYPINONE™ (protirelin); recombinant human TSH such as THYROGEN™; synthetic preparations of the sodium salts of the natural isomers of thyroid hormones such as L-T₄™, SYNTHROID™ and LEVOTHROID™ (levothyroxine sodium), L-T₃™, CYTOMEL™ and TRIOSTAT™ (liothyroine sodium), and THYROLAR™ (liotrix); antithyroid compounds such as 6-n-propylthiouracil (propylthiouracil), 1-methyl-2-mercaptoimidazole and TAPAZOLE™ (methimazole), NEO-MERCAZOLE™ (carbimazole); beta-adrenergic receptor antagonists such as propranolol and esmolol; Ca²⁺ channel blockers; dexamethasone and iodinated radiological contrast agents such as TELEPAQUE™ (iopanoic acid) and ORAGRAFIN™ (sodium ipodate).

[0841] Additional treatments for endocrine and/or hormone imbalance disorders include, but are not limited to, estrogens or congugated estrogens such as ESTRACE™ (estradiol), ESTINYL™ (ethinyl estradiol), PREMARIN™, ESTRATAB™, ORTHO-EST™, OGEN™ and estropipate (estrone), ESTROVIS™ (quinestrol), ESTRADERM™ (estradiol), DELESTROGEN™ and VALERGEN™ (estradiol valerate), DEPO-ESTRADIOL CYPIONATE™ and ESTROJECT LA™ (estradiol cypionate); antiestrogens such as NOLVADEX™ (tamnoxifen), SEROPHBENE™ and CLOMID™ (clomiphene); progestins such as DURALUTIN™ (hydroxyprogesterone caproate), MPA™ and DEPO-PROVERA™ (medroxyprogesterone acetate), PROVERA™ and CYCRIN™ (MPA), MEGACE™ (megestrol acetate), NORLUTIN™ (norethindrone), and NORLUTATE™ and AYGESTIN™ (norethindrone acetate); progesterone implants such as NORPLANT SYSTEM™ (subdermal implants of norgestrel); antiprogestins such as RU 486™ (mifepristone); hormonal contraceptives such as ENOVID™ (norethynodrel plus mestranol), PROGESTASERT™ (intrauterine device that releases progesterone), LOESTRIN™, BREVICON™, MODICON™, GENORA™, NELONA™, NORINYL™, OVACON-35™ and OVACON-50™ (ethinyl estradiol/norethindrone), LEVLEN™, NORDETTE™, TR1-LEVLEN™ and TRIPHASIL-21™ (ethinyl estradiol/levonorgestrel) LO/OVRAL™ and OVRAL™ (ethinyl estradiol/norgestrel), DEMULEN™ (ethinyl estradiol/ethynodiol diacetate), NORINYL™, ORTHO-NOVUM™, NORETHIN™, GENORA™, and NELOVA™ (norethindrone/mestranol), DESOGEN™ and ORTHO-CEPT™ (ethinyl estradiol/desogestrel), ORTHO-CYCLEN™ and ORTHO-TRICYCLEN™ (ethinyl estradiol/norgestimate), MICRONOR™ and NOR-QD™ (norethindrone), and OVRETTE™ (norgestrel).

[0842] Additional treatments for endocrine and/or hormone imbalance disorders include, but are not limited to, testosterone esters such as methenolone acetate and testosterone undecanoate; parenteral and oral androgens such as TESTOJECT-50™ (testosterone), TESTEX™ (testosterone propionate), DELATESTRYL™ (testosterone enanthate), DEPO-TESTOSTERONE™ (testosterone cypionate), DANOCRINE™ (danazol), HALOTESTIN™ (fluoxymesterone), ORETON METHYL™, TESTRED™ and VIRILON™ (methyltestosterone), and OXANDRIN™ (oxandrolone); testosterone transdermal systems such as TESTODERM™; androgen receptor antagonist and 5-alpha-reductase inhibitors such as ANDROCUR™ (cyproterone acetate), EULEXIN™ (flutamide), and PROSCAR™ (finasteride); adrenocorticotropic hormone preparations such as CORTROSYN™ (cosyntropin); adrenocortical steroids and their synthetic analogs such as ACLOVATE™ (alclometasone dipropionate), CYCLOCORT™ (amcinonide), BECLOVENT™ and VANCERIL™ (beclomethasone dipropionate), CELESTONE™ (betamethasone), BENISONE™ and UTICORT™ (betamethasone benzoate), DIPROSONE™ (betamethasone dipropionate), CELESTONE PHOSPHATE™ (betamethasone sodium phosphate), CELESTONE SOLUSPAN™ (betamethasone sodium phosphate and acetate), BETA-VAL™ and VALISONET (betamethasone valerate), TEMOVATE™ (clobetasol propionate), CLODERM™ (clocortolone pivalate), CORTIF™ and HYDROCORTONE™ (cortisol (hydrocortisone)), HYDROCORTONE ACETATE™ (cortisol (hydrocortisone)acetate), LOCOD™ (cortisol (hydrocortisone)butyrate), HYDROCORTONE PHOSPHATE™ (cortisol (hydrocortisone) sodium phosphate), A-HYDROCORT™ and SOLU CORTEF™ (cortisol (hydrocortisone) sodium succinate), WESTCORT™ (cortisol (hydrocortisone) valerate), CORTISONE ACETATE™ (cortisone acetate), DESOWEN™ and TRIDESILONT” (desonide), TOPICORT™ (desoximetasone), DECADRON™ (dexamethasone), DECADRON LA™ (dexamethasone acetate), DECADRON PHOSPHATE™ and HEXADROL PHOSPHATE™ (dexamethasone sodium phosphate), FLORONE™ and MAXILOR™ (diflorasone diacetate), FLORINEF ACETATE™ (fludrocortisone acetate), AEROBID™ and NASALIDE™ (flunisolide), FLUONID™ and SYNALAR™ (fluocinolone acetonide), LIDEX™ (fluocinonide), FLUOR-OP™ and FML™ (fluorometholone), CORDRAN™ (flurandrenolide), HALOG™ (halcinonide), HMS LIZUIFILM™ (medrysone), MEDROL™ (methylprednisolone), DEPO-MEDROL™ and MEDROL ACETATE™ (methylprednisone acetate), A-METHAPRED™ and SOLUMEDROL™ (methylprednisolone sodium succinate), ELOCON™ (mometasone furoate), HALDRONE™ (paramethasone acetate), DELTA-CORTEF™ (prednisolone), ECONOPRED™ (prednisolone acetate), HYDELTRASOL™ (prednisolone sodium phosphate), HYDELTRA-T.B.A™ (prednisolone tebutate), DELTASONE™ (prednisone), ARISTOCORT™ and KENACORT™ (triamcinolone), KENALOG™ (triamcinolone acetonide), ARISTOCORT™ and KENACORT DIACETATE™ (triamcinolone diacetate), and ARISTOSPAN™ (triamcinolone hexacetonide); inhibitors of biosynthesis and action of adrenocortical steroids such as CYTADREN™ (aminoglutethimide), NIZORAL™ (ketoconazole), MODRASTANE™ (trilostane), and METOPIRONE™ (metyrapone); bovine, porcine or human insulin or mixtures thereof; insulin analogs; recombinant human insulin such as HUMULIN™ and NOVOLIN™; oral hypoglycemic agents such as ORAMIDE™ and ORINASE™ (tolbutamide), DIABINESE™ (chlorpropamide), TOLAMIDE™ and TOLINASE™ (tolazamide), DYMBLOR™ (acetohexamide), glibenclamide, MICRONASE™, DIBETA™ and GLYNASE™ (glyburide), GLUCOTROL™ (glipizide), and DIAMICRON™ (gliclazide), GLUCOPHAGE™ (metformin), ciglitazone, pioglitazone, and alpha-glucosidase inhibitors; bovine or porcine glucagon; somatostatins such as SANDOSTATIN™ (octreotide); and diazoxides such as PROGLYCEM™ (diazoxide).

[0843] In an additional embodiment, the Therapeutics of the invention are administered in combination with drugs effective in treating iron deficiency and hypochromic anemias, including but not limited to, ferrous sulfate (iron sulfate, FEOSOL™), ferrous fumarate (e.g., FEOSTAT™), ferrous gluconate (e.g., FERGON™), polysaccharide-iron complex (e.g., NIFEREX™), iron dextran injection (e.g., INFED™), cupric sulfate, pyroxidine, riboflavin, Vitamin B₁₂, cyancobalamin injection (e.g., REDISOL™, RUBRAMIN PC™), hydroxocobalamin, folic acid (e.g., FOLVITE™), leucovorin (folinic acid, 5-CHOH4PteGlu, citrovorum factor) or WELLCOVORIN (Calcium salt of leucovorin), transferrin or ferritin.

[0844] In another embodiment, Therapeutics of the invention are administered in combination with vasodilating agents and/or calcium channel blocking agents. Vasodilating agents that may be administered with the Therapeutics of the invention include, but are not limited to, Angiotensin Converting Enzyme (ACE) inhibitors (e.g., papaverine, isoxsuprine, benazepril, captopril, cilazapril, enalapril, enalaprilat, fosinopril, lisinopril, moexipril, perindopril, quinapril, ramipril, spirapril, trandolapril, and nylidrin), and nitrates (e.g., isosorbide dinitrate, isosorbide mononitrate, and nitroglycerin). Examples of calcium channel blocking agents that may be administered in combination with the Therapeutics of the invention include, but are not limited to amlodipine, bepridil, diltiazem, felodipine, flunarizine, isradipine, nicardipine, nifedipine, nimodipine, and verapamil.

[0845] In additional embodiments, the Therapeutics of the invention are administered in combination with other therapeutic or prophylactic regimens, such as, for example, radiation therapy.

### Example 14

### Method of Treating Decreased Levels of the Polypeptide

[0846] The present invention relates to a method for treating an individual in need of an increased level of a polypeptide of the invention in the body comprising administering to such an individual a composition comprising a therapeutically effective amount of polypeptides (including agonists thereto), and/or antibodies of the invention. Moreover, it will be appreciated that conditions caused by a decrease in the standard or normal expression level of a polypeptide of the present invention in an individual may be treated by administering agonists of said polypeptide. Thus, the invention also provides a method of treatment of an individual in need of an increased level of the polypeptide comprising administering to such an individual a Therapeutic comprising an amount of the agonist (including polypeptides and antibodies of the present invention) to increase the activity level of the polypeptide in such an individual.

[0847] For example, a patient with decreased levels of a polypeptide receives a daily dose 0.1-100 ug/kg of the agonist for six consecutive days. The exact details of the dosing scheme, based on administration and formulation, are provided in Example 13.

### Example 15

### Method of Treating Increased Levels of the Polypeptide

[0848] The present invention also relates to a method of treating an individual in need of a decreased level of a polypeptide of the invention in the body comprising administering to such an individual a composition comprising a therapeutically effective amount of an antagonist of the invention (including polypeptides and antibodies of the invention).

[0849] In one example, antisense technology is used to inhibit production of a polypeptide of the present invention. This technology is one example of a method of decreasing levels of a polypeptide, due to a variety of etiologies, such as cancer.

[0850] For example, a patient diagnosed with abnormally increased levels of a polypeptide is administered intravenously antisense polynucleotides at 0.5, 1.0, 1.5, 2.0 and 3.0 mg/kg day for 21 days. This treatment is repeated after a 7-day rest period if the treatment was well tolerated. The antisense polynucleotides of the present invention can be formulated using techniques and formulations described herein (e.g. see Example 13), or otherwise known in the art.

### Example 16

### Method of Treatment Using Gene Therapy—Ex Vivo

[0851] One method of gene therapy transplants fibroblasts, which are capable of expressing a polypeptide, onto a patient. Generally, fibroblasts are obtained from a subject by skin biopsy. The resulting tissue is placed in tissue-culture medium and separated into small pieces. Small chunks of the tissue are placed on a wet surface of a tissue culture flask, approximately ten pieces are placed in each flask. The flask is turned upside down, closed tight and left at room temperature over night. After 24 hours at room temperature, the flask is inverted and the chunks of tissue remain fixed to the bottom of the flask and fresh media (e.g., Ham's F12 media, with 10% FBS, penicillin and streptomycin) is added. The flasks are then incubated at 37 degree C. for approximately one week.

[0852] At this time, fresh media is added and subsequently changed every several days. After an additional two weeks in culture, a monolayer of fibroblasts emerge. The monolayer is trypsinized and scaled into larger flasks.

[0853] pMV-7 (Kirschmeier, P. T. et al., DNA, 7:219-25 (1988)), flanked by the long terminal repeats of the Moloney murine sarcoma virus, is digested with EcoRI and HindIII and subsequently treated with calf intestinal phosphatase. The linear vector is fractionated on agarose gel and purified, using glass beads.

[0854] The cDNA encoding a polypeptide of the present invention can be amplified using PCR primers which correspond to the 5′ and 3′ end sequences respectively as set forth in Example 1 using primers and having appropriate restriction sites and initiation/stop codons, if necessary. Preferably, the 5′ primer contains an EcORI site and the 3′ primer includes a HindIII site. Equal quantities of the Moloney murine sarcoma virus linear backbone and the amplified EcORI and HindIII fragment are added together, in the presence of T4 DNA ligase. The resulting mixture is maintained under conditions appropriate for ligation of the two fragments. The ligation mixture is then used to transform bacteria HBB101, which are then plated onto agar containing kanamycin for the purpose of confirming that the vector has the gene of interest properly inserted.

[0855] The amphotropic pA317 or GP+am12 packaging cells are grown in tissue culture to confluent density in Dulbecco's Modified Eagles Medium (DMEM) with 10% calf serum (CS), penicillin and streptomycin. The MSV vector containing the gene is then added to the media and the packaging cells transduced with the vector. The packaging cells now produce infectious viral particles containing the gene (the packaging cells are now referred to as producer cells).

[0856] Fresh media is added to the transduced producer cells, and subsequently, the media is harvested from a 10 cm plate of confluent producer cells. The spent media, containing the infectious viral particles, is filtered through a millipore filter to remove detached producer cells and this media is then used to infect fibroblast cells. Media is removed from a sub-confluent plate of fibroblasts and quickly replaced with the media from the producer cells. This media is removed and replaced with fresh media. If the titer of virus is high, then virtually all fibroblasts will be infected and no selection is required. If the titer is very low, then it is necessary to use a retroviral vector that has a selectable marker, such as neo or his. Once the fibroblasts have been efficiently infected, the fibroblasts are analyzed to determine whether protein is produced.

[0857] The engineered fibroblasts are then transplanted onto the host, either alone or after having been grown to confluence on cytodex 3 microcarrier beads.

### Example 17

### Gene Therapy Using Endogenous Genes Corresponding To Polynucleotides of the Invention

[0858] Another method of gene therapy according to the present invention involves operably associating the endogenous polynucleotide sequence of the invention with a promoter via homologous recombination as described, for example, in U.S. Pat. No. 5,641,670, issued June International Publication NO: WO 94/12650, published Aug. 4, 1994; Koller et al., Proc. Natl. Acad. Sci. USA, 86:8932-8935 (1989); and Zijlstra et al., Nature, 342:435438 (1989). This method involves the activation of a gene which is present in the target cells, but which is not expressed in the cells, or is expressed at a lower level than desired.

[0859] Polynucleotide constructs are made which contain a promoter and targeting sequences, which are homologous to the 5′ non-coding sequence of endogenous polynucleotide sequence, flanking the promoter. The targeting sequence will be sufficiently near the 5′ end of the polynucleotide sequence so the promoter will be operably linked to the endogenous sequence upon homologous recombination. The promoter and the targeting sequences can be amplified using PCR. Preferably, the amplified promoter contains distinct restriction enzyme sites on the 5′ and 3′ ends. Preferably, the 3′ end of the first targeting sequence contains the same restriction enzyme site as the 5′ end of the amplified promoter and the 5′ end of the second targeting sequence contains the same restriction site as the 3′ end of the amplified promoter.

[0860] The amplified promoter and the amplified targeting sequences are digested with the appropriate restriction enzymes and subsequently treated with calf intestinal phosphatase. The digested promoter and digested targeting sequences are added together in the presence of T4 DNA ligase. The resulting mixture is maintained under conditions appropriate for ligation of the two fragments. The construct is size fractionated on an agarose gel, then purified by phenol extraction and ethanol precipitation.

[0861] In this Example, the polynucleotide constructs are administered as naked polynucleotides via electroporation. However, the polynucleotide constructs may also be administered with transfection-facilitating agents, such as liposomes, viral sequences, viral particles, precipitating agents, etc. Such methods of delivery are known in the art.

[0862] Once the cells are transfected, homologous recombination will take place which results in the promoter being operably linked to the endogenous polynucleotide sequence. This results in the expression of polynucleotide corresponding to the polynucleotide in the cell. Expression may be detected by immunological staining, or any other method known in the art.

[0863] Fibroblasts are obtained from a subject by skin biopsy. The resulting tissue is placed in DMEM+10% fetal calf serum. Exponentially growing or early stationary phase fibroblasts are trypsinized and rinsed from the plastic surface with nutrient medium. An aliquot of the cell suspension is removed for counting, and the remaining cells are subjected to centrifugation. The supernatant is aspirated and the pellet is resuspended in 5 ml of electroporation buffer (20 mM HEPES pH 7.3, 137 mM NaCl, 5 mM KCl, 0.7 mM Na₂ HPO₄, 6 mM dextrose). The cells are recentrifuged, the supernatant aspirated, and the cells resuspended in electroporation buffer containing 1 mg/ml acetylated bovine serum albumin. The final cell suspension contains approximately 3×10⁶ cells/ml. Electroporation should be performed immediately following resuspension.

[0864] Plasmid DNA is prepared according to standard techniques. For example, to construct a plasmid for targeting to the locus corresponding to the polynucleotide of the invention, plasmid pUC18 (MBI Fermentas, Amherst, N.Y.) is digested with HindIII. The CMV promoter is amplified by PCR with an XbaI site on the 5′ end and a BamHI site on the 3′ end. Two non-coding sequences are amplified via PCR: one non-coding sequence (fragment 1) is amplified with a HindIII site at the 5′ end and an Xba site at the 3′end; the other non-coding sequence (fragment 2) is amplified with a BamHI site at the 5′end and a HindIII site at the 3′end. The CMV promoter and the fragments (1 and 2) are digested with the appropriate enzymes (CMV promoter-XbaI and BamHI; fragment 1-XbaI; fragment 2-BamHI) and ligated together. The resulting ligation product is digested with HindIII, and ligated with the HindIII-digested pUC18 plasmid.

[0865] Plasmid DNA is added to a sterile cuvette with a 0.4 cm electrode gap (Bio-Rad). The final DNA concentration is generally at least 120 μg/ml. 0.5 ml of the cell suspension (containing approximately 1.5.×10⁶ cells) is then added to the cuvette, and the cell suspension and DNA solutions are gently mixed. Electroporation is performed with a Gene-Pulser apparatus (Bio-Rad). Capacitance and voltage are set at 960 AF and 250-300 V, respectively. As voltage increases, cell survival decreases, but the percentage of surviving cells that stably incorporate the introduced DNA into their genome increases dramatically. Given these parameters, a pulse time of approximately 14-20 mSec should be observed.

[0866] Electroporated cells are maintained at room temperature for approximately 5 min, and the contents of the cuvette are then gently removed with a sterile transfer pipette. The cells are added directly to 10 ml of prewarmed nutrient media (DMEM with 15% calf serum) in a 10 cm dish and incubated at 37 degree C. The following day, the media is aspirated and replaced with 10 ml of fresh media and incubated for a further 16-24 hours.

[0867] The engineered fibroblasts are then injected into the host, either alone or after having been grown to confluence on cytodex 3 microcarrier beads. The fibroblasts now produce the protein product. The fibroblasts can then be introduced into a patient as described above.

### Example 18

### Method of Treatment Using Gene Therapy—In Vivo

[0868] Another aspect of the present invention is using in vivo gene therapy methods to prevent, treat, and/or ameliorate cardiovascular diseases and disorders. The gene therapy method relates to the introduction of naked nucleic acid (DNA, RNA, and antisense DNA or RNA) sequences into an animal to increase or decrease the expression of the polypeptide. The polynucleotide of the present invention may be operatively linked to (i.e., associated with) a promoter or any other genetic elements necessary for the expression of the polypeptide by the target tissue. Such gene therapy and delivery techniques and methods are known in the art, see, for example, WO90/11092, WO98/11779; U.S. Pat. Nos. 5,693,622, 5705151, 5580859; Tabata et al., Cardiovasc. Res. 35(3):470479 (1997); Chao et al., Pharmacol. Res. 35(6):517-522 (1997); Wolff, Neuromuscul. Disord. 7(5):314-318 (1997); Schwartz et al., Gene Ther. 3(5):405-411 (1996); Tsurumi et al., Circulation 94(12):3281-3290 (1996) (incorporated herein by reference).

[0869] The polynucleotide constructs may be delivered by any method that delivers injectable materials to the cells of an animal, such as, injection into the interstitial space of tissues (heart, muscle, skin, lung, liver, intestine and the like). The polynucleotide constructs can be delivered in a pharmaceutically acceptable liquid or aqueous carrier.

[0870] The term “naked” polynucleotide, DNA or RNA, refers to sequences that are free from any delivery vehicle that acts to assist, promote, or facilitate entry into the cell, including viral sequences, viral particles, liposome formulations, lipofectin or precipitating agents and the like. However, the polynucleotides of the present invention may also be delivered in liposome formulations (such as those taught in Felgner P. L. et al. (1995) Ann. NY Acad. Sci. 772:126-139 and Abdallah B. et al. (1995) Biol. Cell 85(1):1-7) which can be prepared by methods well known to those skilled in the art.

[0871] The polynucleotide vector constructs used in the gene therapy method are preferably constructs that will not integrate into the host genome nor will they contain sequences that allow for replication. Any strong promoter known to those skilled in the art can be used for driving the expression of DNA. Unlike other gene therapy techniques, one major advantage of introducing naked nucleic acid sequences into target cells is the transitory nature of the polynucleotide synthesis in the cells. Studies have shown that non-replicating DNA sequences can be introduced into cells to provide production of the desired polypeptide for periods of up to six months.

[0872] The polynucleotide construct can be delivered to the interstitial space of tissues within an animal, including muscle, skin, brain, lung, liver, spleen, bone marrow, thymus, heart, lymph, blood, bone, cartilage, pancreas, kidney, gall bladder, stomach, intestine, testis, ovary, uterus, rectum, nervous system, eye, gland, and connective tissue. Interstitial space of the tissues comprises the intercellular fluid, mucopolysaccharide matrix among the reticular fibers of organ tissues, elastic fibers in the walls of vessels or chambers, collagen fibers of fibrous tissues, or that same matrix within connective tissue ensheathing muscle cells or in the lacunae of bone. It is similarly the space occupied by the plasma of the circulation and the lymph fluid of the lymphatic channels. Delivery to the interstitial space of muscle tissue is preferred for the reasons discussed below. They may be conveniently delivered by injection into the tissues comprising these cells. They are preferably delivered to and expressed in persistent, non-dividing cells which are differentiated, although delivery and expression may be achieved in non-differentiated or less completely differentiated cells, such as, for example, stem cells of blood or skin fibroblasts. In vivo muscle cells are particularly competent in their ability to take up and express polynucleotides.

[0873] For the naked polynucleotide injection, an effective dosage amount of DNA or RNA will be in the range of from about 0.05 g/kg body weight to about 50 mg/kg body weight. Preferably the dosage will be from about 0.005 mg/kg to about 20 mg/kg and more preferably from about 0.05 mg/kg to about 5 mg/kg. Of course, as the artisan of ordinary skill will appreciate, this dosage will vary according to the tissue site of injection. The appropriate and effective dosage of nucleic acid sequence can readily be determined by those of ordinary skill in the art and may depend on the condition being treated and the route of administration. The preferred route of administration is by the parenteral route of injection into the interstitial space of tissues. However, other parenteral routes may also be used, such as, inhalation of an aerosol formulation particularly for delivery to lungs or bronchial tissues, throat or mucous membranes of the nose. In addition, naked polynucleotide constructs can be delivered to arteries during angioplasty by the catheter used in the procedure.

[0874] The dose response effects of injected polynucleotide in muscle in vivo is determined as follows. Suitable template DNA for production of mRNA coding for polypeptide of the present invention is prepared in accordance with a standard recombinant DNA methodology. The template DNA, which may be either circular or linear, is either used as naked DNA or complexed with liposomes. The quadriceps muscles of mice are then injected with various amounts of the template DNA.

[0875] Five to six week old female and male Balb/C mice are anesthetized by intraperitoneal injection with 0.3 ml of 2.5% Avertin. A 1.5 cm incision is made on the anterior thigh, and the quadriceps muscle is directly visualized. The template DNA is injected in 0.1 ml of carrier in a 1 cc syringe through a 27 gauge needle over one minute, approximately 0.5 cm from the distal insertion site of the muscle into the knee and about 0.2 cm deep. A suture is placed over the injection site for future localization, and the skin is closed with stainless steel clips.

[0876] After an appropriate incubation time (e.g., 7 days) muscle extracts are prepared by excising the entire quadriceps. Every fifth 15 um cross-section of the individual quadriceps muscles is histochemically stained for protein expression. A time course for protein expression may be done in a similar fashion except that quadriceps from different mice are harvested at different times. Persistence of DNA in muscle following injection may be determined by Southern blot analysis after preparing total cellular DNA and HIRT supernatants from injected and control mice. The results of the above experimentation in mice can be used to extrapolate proper dosages and other treatment parameters in humans and other animals using naked DNA.

### Example 19

### Transgenic Animals

[0877] The polypeptides of the invention can also be expressed in transgenic animals. Animals of any species, including, but not limited to, mice, rats, rabbits, hamsters, guinea pigs, pigs, micro-pigs, goats, sheep, cows and non-human primates, e.g., baboons, monkeys, and chimpanzees may be used to generate transgenic animals. In a specific embodiment, techniques described herein or otherwise known in the art, are used to express polypeptides of the invention in humans, as part of a gene therapy protocol.

[0878] Any technique known in the art may be used to introduce the transgene (i.e., polynucleotides of the invention) into animals to produce the founder lines of transgenic animals. Such techniques include, but are not limited to, pronuclear microinjection (Paterson et al., Appl. Microbiol. Biotechnol. 40:691-698 (1994); Carver et al., Biotechnology (NY) 11:1263-1270 (1993); Wright et al., Biotechnology (NY) 9:830-834 (1991); and Hoppe et al., U.S. Pat. No. 4,873,191 (1989)); retrovirus mediated gene transfer into germ lines (Van der Putten et al., Proc. Natl. Acad. Sci., USA 82:6148-6152 (1985)), blastocysts or embryos; gene targeting in embryonic stem cells (Thompson et al., Cell 56:313-321 (1989)); electroporation of cells or embryos (Lo, 1983, Mol Cell. Biol. 3:1803-1814 (1983)); introduction of the polynucleotides of the invention using a gene gun (see, e.g., Ulmer et al., Science 259:1745 (1993); introducing nucleic acid constructs into embryonic pleuripotent stem cells and transferring the stem cells back into the blastocyst; and sperm-mediated gene transfer (Lavitrano et al., Cell 57:717-723 (1989); etc. For a review of such techniques, see Gordon, “Transgenic Animals,” Intl. Rev. Cytol. 115:171-229 (1989), which is incorporated by reference herein in its entirety.

[0879] Any technique known in the art may be used to produce transgenic clones containing polynucleotides of the invention, for example, nuclear transfer into enucleated oocytes of nuclei from cultured embryonic, fetal, or adult cells induced to quiescence (Campell et al., Nature 380:64-66 (1996); Wilmut et al., Nature 385:810-813 (1997)).

[0880] The present invention provides for transgenic animals that carry the transgene in all their cells, as well as animals which carry the transgene in some, but not all their cells, i.e., mosaic animals or chimeric. The transgene may be integrated as a single transgene or as multiple copies such as in concatamers, e.g., head-to-head tandems or head-to-tail tandems. The transgene may also be selectively introduced into and activated in a particular cell type by following, for example, the teaching of Lasko et al. (Lasko et al., Proc. Natl. Acad. Sci. USA 89:62326236 (1992)). The regulatory sequences required for such a cell-type specific activation will depend upon the particular cell type of interest, and will be apparent to those of skill in the art. When it is desired that the polynucleotide transgene be integrated into the chromosomal site of the endogenous gene, gene targeting is preferred. Briefly, when such a technique is to be utilized, vectors containing some nucleotide sequences homologous to the endogenous gene are designed for the purpose of integrating, via homologous recombination with chromosomal sequences, into and disrupting the function of the nucleotide sequence of the endogenous gene. The transgene may also be selectively introduced into a particular cell type, thus inactivating the endogenous gene in only that cell type, by following, for example, the teaching of Gu et al. (Gu et al., Science 265:103-106 (1994)). The regulatory sequences required for such a cell-type specific inactivation will depend upon the particular cell type of interest, and will be apparent to those of skill in the art.

[0881] Once transgenic animals have been generated, the expression of the recombinant gene may be assayed utilizing standard techniques. Initial screening may be accomplished by Southern blot analysis or PCR techniques to analyze animal tissues to verify that integration of the transgene has taken place. The level of mRNA expression of the transgene in the tissues of the transgenic animals may also be assessed using techniques which include, but are not limited to, Northern blot analysis of tissue samples obtained from the animal, in situ hybridization analysis, and reverse transcriptase-PCR (rt-PCR). Samples of transgenic gene-expressing tissue may also be evaluated immunocytochemically or immunohistochemically using antibodies specific for the transgene product.

[0882] Once the founder animals are produced, they may be bred, inbred, outbred, or crossbred to produce colonies of the particular animal. Examples of such breeding strategies include, but are not limited to: outbreeding of founder animals with more than one integration site in order to establish separate lines; inbreeding of separate lines in order to produce compound transgenics that express the transgene at higher levels because of the effects of additive expression of each transgene; crossing of heterozygous transgenic animals to produce animals homozygous for a given integration site in order to both augment expression and eliminate the need for screening of animals by DNA analysis; crossing of separate homozygous lines to produce compound heterozygous or homozygous lines; and breeding to place the transgene on a distinct background that is appropriate for an experimental model of interest.

[0883] Transgenic animals of the invention have uses which include, but are not limited to, animal model systems useful in elaborating the biological function of polypeptides of the present invention, studying conditions and/or disorders associated with aberrant expression, and in screening for compounds effective in ameliorating such conditions and/or disorders.

### Example 20

### Knock-Out Animals

[0884] Endogenous gene expression can also be reduced by inactivating or “knocking out” the gene and/or its promoter using targeted homologous recombination. (e.g., see Smithies et al., Nature 317:230-234 (1985); Thomas & Capecchi, Cell 51:503-512 (1987); Thompson et al., Cell 5:313-321 (1989); each of which is incorporated by reference herein in its entirety). For example, a mutant, non-functional polynucleotide of the invention (or a completely unrelated DNA sequence) flanked by DNA homologous to the endogenous polynucleotide sequence (either the coding regions or regulatory regions of the gene) can be used, with or without a selectable marker and/or a negative selectable marker, to transfect cells that express polypeptides of the invention in vivo. In another embodiment, techniques known in the art are used to generate knockouts in cells that contain, but do not express the gene of interest. Insertion of the DNA construct, via targeted homologous recombination, results in inactivation of the targeted gene. Such approaches are particularly suited in research and agricultural fields where modifications to embryonic stem cells can be used to generate animal offspring with an inactive targeted gene (e.g., see Thomas & Capecchi 1987 and Thompson 1989, supra). However this approach can be routinely adapted for use in humans provided the recombinant DNA constructs are directly administered or targeted to the required site in vivo using appropriate viral vectors that will be apparent to those of skill in the art.

[0885] In further embodiments of the invention, cells that are genetically engineered to express the polypeptides of the invention, or alternatively, that are genetically engineered not to express the polypeptides of the invention (e.g., knockouts) are administered to a patient in vivo. Such cells may be obtained from the patient (i.e., animal, including human) or an MHC compatible donor and can include, but are not limited to fibroblasts, bone marrow cells, blood cells (e.g., lymphocytes), adipocytes, muscle cells, endothelial cells etc. The cells are genetically engineered in vitro using recombinant DNA techniques to introduce the coding sequence of polypeptides of the invention into the cells, or alternatively, to disrupt the coding sequence and/or endogenous regulatory sequence associated with the polypeptides of the invention, e.g., by transduction (using viral vectors, and preferably vectors that integrate the transgene into the cell genome) or transfection procedures, including, but not limited to, the use of plasmids, cosmids, YACs, naked DNA, electroporation, liposomes, etc. The coding sequence of the polypeptides of the invention can be placed under the control of a strong constitutive or inducible promoter or promoter/enhancer to achieve expression, and preferably secretion, of the polypeptides of the invention. The engineered cells which express and preferably secrete the polypeptides of the invention can be introduced into the patient systemically, e.g., in the circulation, or intraperitoneally.

[0886] Alternatively, the cells can be incorporated into a matrix and implanted in the body, e.g., genetically engineered fibroblasts can be implanted as part of a skin graft; genetically engineered endothelial cells can be implanted as part of a lymphatic or vascular graft. (See, for example, Anderson et al. U.S. Pat. No. 5,399,349; and Mulligan & Wilson, U.S. Pat. No. 5,460,959 each of which is incorporated by reference herein in its entirety).

[0887] When the cells to be administered are non-autologous or non-MHC compatible cells, they can be administered using well known techniques which prevent the development of a host immune response against the introduced cells. For example, the cells may be introduced in an encapsulated form which, while allowing for an exchange of components with the immediate extracellular environment, does not allow the introduced cells to be recognized by the host immune system.

[0888] Transgenic and “knock-out” animals of the invention have uses which include, but are not limited to, animal model systems useful in elaborating the biological function of polypeptides of the present invention, studying conditions and/or disorders associated with aberrant expression, and in screening for compounds effective in ameliorating such conditions and/or disorders.

### Example 21

### Biological Effects of Agonists or Antagonists of the Invention

Fibroblast and Endothelial Cell Assays

[0889] Human lung fibroblasts are obtained from Clonetics (San Diego, Calif.) and maintained in growth media from Clonetics. Dermal microvascular endothelial cells are obtained from Cell Applications (San Diego, Calif.). For proliferation assays, the human lung fibroblasts and dermal microvascular endothelial cells can be cultured at 5,000 cells/well in a 96-well plate for one day in growth medium. The cells are then incubated for one day in 0.1% BSA basal medium. After replacing the medium with fresh 0.1% BSA medium, the cells are incubated with the test proteins for 3 days. Alamar Blue (Alamar Biosciences, Sacramento, Calif.) is added to each well to a final concentration of 10%. The cells are incubated for 4 hr. Cell viability is measured by reading in a CytoFluor fluorescence reader. For the PGE2 assays, the human lung fibroblasts are cultured at 5,000 cells/well in a 96-well plate for one day. After a medium change to 0.1% BSA basal medium, the cells are incubated with FGF-2 or agonists or antagonists of the invention with or without EL-la for 24 hours. The supernatants are collected and assayed for PGE by EIA kit (Cayman, Ann Arbor, Mich.). For the IL-6 assays, the human lung fibroblasts are cultured at 5,000 cells/well in a 96-well plate for one day. After a medium change to 0.1% BSA basal medium, the cells are incubated with FGF-2 or with or without agonists or antagonists of the invention IL-1a for 24 hours. The supernatants are collected and assayed for IL-6 by ELISA kit (Endogen, Cambridge, Mass.).

[0890] Human lung fibroblasts are cultured with FGF-2 or agonists or antagonists of the invention for 3 days in basal medium before the addition of Alamar Blue to assess effects on growth of the fibroblasts. FGF-2 should show a stimulation at 10-2500 ng/ml which can be used to compare stimulation with agonists or antagonists of the invention.

### Example 22

### The Effect of Agonists or Antagonists of the Invention on the Growth of Vascular Endothelial Cells

[0891] On day 1, human umbilical vein endothelial cells (HUVEC) are seeded at 2-5×10⁴ cells/35 mm dish density in M199 medium containing 4% fetal bovine serum (FBS), 16 units/ml heparin, and 50 units/ml endothelial cell growth supplements (ECGS, Biotechnique, Inc.). On day 2, the medium is replaced with M199 containing 10% FBS, 8 units/ml heparin. An agonist or antagonist of the invention, and positive controls, such as VEGF and basic FGF (bFGF) are added, at varying concentrations. On days 4 and 6, the medium is replaced. On day 8, cell number is determined with a Coulter Counter.

[0892] An increase in the number of HUVEC cells indicates that the compound of the invention may proliferate vascular endothelial cells, while a decrease in the number of HUVEC cells indicates that the compound of the invention inhibits vascular endothelial cells.

[0893] The studies described in this example tested activity of a polypeptide of the invention. However, one skilled in the art could easily modify the exemplified studies to test the activity of polynucleotides (e.g., gene therapy), agonists, and/or antagonists of the invention.

### Example 23

### Lymphadema Animal Model

[0894] The purpose of this experimental approach is to create an appropriate and consistent lymphedema model for testing the therapeutic effects of an agonist or antagonist of the invention in lymphangiogenesis and re-establishment of the lymphatic circulatory system in the rat hind limb. Effectiveness is measured by swelling volume of the affected limb, quantification of the amount of lymphatic vasculature, total blood plasma protein, and histopathology. Acute lymphedema is observed for 7-10 days. Perhaps more importantly, the chronic progress of the edema is followed for up to 34 weeks.

[0895] Prior to beginning surgery, blood sample is drawn for protein concentration analysis. Male rats weighing approximately ˜350 g are dosed with Pentobarbital. Subsequently, the right legs are shaved from knee to hip. The shaved area is swabbed with gauze soaked in 70% EtOH. Blood is drawn for serum total protein testing. Circumference and volumetric measurements are made prior to injecting dye into paws after marking 2 measurement levels (0.5 cm above heel, at mid-pt of dorsal paw). The intradermal dorsum of both right and left paws are injected with 0.05 ml of 1% Evan's Blue. Circumference and volumetric measurements are then made following injection of dye into paws.

[0896] Using the knee joint as a landmark, a mid-leg inguinal incision is made circumferentially allowing the femoral vessels to be located. Forceps and hemostats are used to dissect and separate the skin flaps. After locating the femoral vessels, the lymphatic vessel that runs along side and underneath the vessel(s) is located. The main lymphatic vessels in this area are then electrically coagulated or suture ligated.

[0897] Using a microscope, muscles in back of the leg (near the semitendinosis and adductors) are bluntly dissected. The popliteal lymph node is then located. The 2 proximal and 2 distal lymphatic vessels and distal blood supply of the popliteal node are then ligated by suturing. The popliteal lymph node, and any accompanying adipose tissue, is then removed by cutting connective tissues.

[0898] Care is taken to control any mild bleeding resulting from this procedure. After lymphatics are occluded, the skin flaps are sealed by using liquid skin (Vetbond) (AJ Buck). The separated skin edges are sealed to the underlying muscle tissue while leaving a gap of ˜0.5 cm around the leg. Skin also may be anchored by suturing to underlying muscle when necessary.

[0899] To avoid infection, animals are housed individually with mesh (no bedding). Recovering animals are checked daily through the optimal edematous peak, which typically occurred by day 5-7. The plateau edematous peak are then observed. To evaluate the intensity of the lymphedema, the circumference and volumes of 2 designated places on each paw before operation and daily for 7 days are measured. The effect of plasma proteins on lymphedema is determined and whether protein analysis is a useful testing perimeter is also investigated. The weights of both control and edematous limbs are evaluated at 2 places. Analysis is performed in a blind manner.

[0900] Circumference Measurements: Under brief gas anesthetic to prevent limb movement, a cloth tape is used to measure limb circumference. Measurements are done at the ankle bone and dorsal paw by 2 different people and those 2 readings are averaged. Readings are taken from both control and edematous limbs.

[0901] Volumetric Measurements: On the day of surgery, animals are anesthetized with Pentobarbital and are tested prior to surgery. For daily volumetrics animals are under brief halothane anesthetic (rapid immobilization and quick recovery), and both legs are shaved and equally marked using waterproof marker on legs. Legs are first dipped in water, then dipped into instrument to each marked level then measured by Buxco edema software (Chen/Victor). Data is recorded by one person, while the other is dipping the limb to marked area.

[0902] Blood-plasma protein measurements: Blood is drawn, spun, and serum separated prior to surgery and then at conclusion for total protein and Ca2⁺ comparison.

[0903] Limb Weight Comparison: After drawing blood, the animal is prepared for tissue collection. The limbs are amputated using a quillitine, then both experimental and control legs are cut at the ligature and weighed. A second weighing is done as the tibio-cacaneal joint is disarticulated and the foot is weighed.

[0904] Histological Preparations: The transverse muscle located behind the knee (popliteal) area is dissected and arranged in a metal mold, filled with freezeGel, dipped into cold methylbutane, placed into labeled sample bags at −80 EC until sectioning. Upon sectioning, the muscle is observed under fluorescent microscopy for lymphatics.

[0905] The studies described in this example tested activity of agonists or antagonists of the invention. However, one skilled in the art could easily modify the exemplified studies to test the activity of polynucleotides or polypeptides of the invention (e.g., gene therapy).

### Example 24

### Suppression of TNF Alpha-Induced Adhesion Molecule Expression by an Agonist or Antagonist of the Invention

[0906] The recruitment of lymphocytes to areas of inflammation and angiogenesis involves specific receptor-ligand interactions between cell surface adhesion molecules (CAMs) on lymphocytes and the vascular endothelium The adhesion process, in both normal and pathological settings, follows a multi-step cascade that involves intercellular adhesion molecule-1 (ICAM-1), vascular cell adhesion molecule-1 (VCAM-1), and endothelial leukocyte adhesion molecule-1 (E-selectin) expression on endothelial cells (EC). The expression of these molecules and others on the vascular endothelium determines the efficiency with which leukocytes may adhere to the local vasculature and extravasate into the local tissue during the development of an inflammatory response. The local concentration of cytokines and growth factor participate in the modulation of the expression of these CAMs.

[0907] Tumor necrosis factor alpha (TNF-a), a potent proinflammatory cytokine, is a stimulator of all three CAMs on endothelial cells and may be involved in a wide variety of inflammatory responses, often resulting in a pathological outcome.

[0908] The potential of an agonist or antagonist of the invention to mediate a suppression of TNF-a induced CAM expression can be examined. A modified ELISA assay which uses ECs as a solid phase absorbent is employed to measure the amount of CAM expression on TNF-a treated ECs when co-stimulated with a member of the FGF family of proteins.

[0909] To perform the experiment, human umbilical vein endothelial cell (HUVEC) cultures are obtained from pooled cord harvests and maintained in growth medium (EGM-2; Clonetics, San Diego, Calif.) supplemented with 10% FCS and 1% penicillin/streptomycin in a 37 degree C. humidified incubator containing 5% CO₂. HUVECs are seeded in 96-well plates at concentrations of 1×10⁴ cells/well in EGM medium at 37 degree C. for 18-24 hrs or until confluent. The monolayers are subsequently washed 3 times with a serum-free solution of RPMI-1640 supplemented with 100 U/ml penicillin and 100 mg/ml streptomycin, and treated with a given cytokine and/or growth factor(s) for 24 h at 37 degree C. Following incubation, the cells are then evaluated for CAM expression.

[0910] Human Umbilical Vein Endothelial cells (HUVECs) are grown in a standard 96 well plate to confluence. Growth medium is removed from the cells and replaced with 90 ul of 199 Medium (10% FBS). Samples for testing and positive or negative controls are added to the plate in triplicate (in 10 ul volumes). Plates are incubated at 37 degree C. for either 5 h (selectin and integrin expression) or 24 h (integrin expression only). Plates are aspirated to remove medium and 100 μl of 0.1% paraformaldehyde-PBS(with Ca++ and Mg++) is added to each well. Plates are held at 4° C. for 30 min.

[0911] Fixative is then removed from the wells and wells are washed 1× with PBS(+Ca,Mg)+0.5% BSA and drained. Do not allow the wells to dry. Add 10 μl of diluted primary antibody to the test and control wells. Anti-ICAM-1-Biotin, Anti-VCAM-1-Biotin and Anti-E-selectin-Biotin are used at a concentration of 10 μg/ml (1:10 dilution of 0.1 mg/ml stock antibody). Cells are incubated at 37° C. for 30 min. in a humidified environment. Wells are washed X3 with PBS(+Ca,Mg)+0.5% BSA.

[0912] Then add 20 μl of diluted ExtrAvidin-Alkaline Phosphotase (1:5,000 dilution) to each well and incubated at 37° C. for 30 min. Wells are washed X3 with PBS(+Ca,Mg)+0.5% BSA. 1 tablet of p-Nitrophenol Phosphate pNPP is dissolved in 5 ml of glycine buffer (pH 10.4). 100 μl of pNPP substrate in glycine buffer is added to each test well. Standard wells in triplicate are prepared from the working dilution of the ExtrAvidin-Alkaline Phosphotase in glycine buffer: 1:5,000 (10⁰)>10^{-0.5}>10⁻¹>10^{-1.5}. 5 μl of each dilution is added to triplicate wells and the resulting AP content in each well is 5.50 ng, 1.74 ng, 0.55 ng, 0.18 ng. 100 μl of pNNP reagent must then be added to each of the standard wells. The plate must be incubated at 37° C. for 4 h. A volume of 50 μl of 3M NaOH is added to all wells. The results are quantified on a plate reader at 405 nm The background subtraction option is used on blank wells filled with glycine buffer only. The template is set up to indicate the concentration of AP-conjugate in each standard well [5.50 ng; 1.74 ng; 0.55 ng; 0.18 ng]. Results are indicated as amount of bound AP-conjugate in each sample.

[0913] The studies described in this example tested activity of agonists or antagonists of the invention. However, one skilled in the art could easily modify the exemplified studies to test the activity of polynucleotides or polypeptides of the invention (e.g., gene therapy).

### Example 25

### Production Of Polypeptide of the Invention For High-Throughput Screening Assays

[0914] The following protocol produces a supernatant containing polypeptide of the present invention to be tested. This supernatant can then be used in the Screening Assays described in Examples 27-30.

[0915] First, dilute Poly-D-Lysine (644 587 Boehringer-Mannheim) stock solution (1 mg/ml in PBS) 1:20 in PBS (w/o calcium or magnesium 17-516F Biowhittaker) for a working solution of 50 ug/ml. Add 200 ul of this solution to each well (24 well plates) and incubate at RT for 20 minutes. Be sure to distribute the solution over each well (note: a 12-channel pipetter may be used with tips on every other channel). Aspirate off the Poly-D-Lysine solution and rinse with 1 ml PBS (Phosphate Buffered Saline). The PBS should remain in the well until just prior to plating the cells and plates may be poly-lysine coated in advance for up to two weeks.

[0916] Plate 293T cells (do not carry cells past P+20) at 2×10⁵ cells/well in 0.5 ml DMEM(Dulbecco's Modified Eagle Medium)(with 4.5 G/L glucose and L-glutamine (12-604F Biowhittaker))/10% heat inactivated FBS(14-503F Biowhittaker)/1× Penstrep(17-602E Biowhittaker). Let the cells grow overnight.

[0917] The next day, mix together in a sterile solution basin: 300 ul Lipofectamine (18324-012 Gibco/BRL) and 5 ml Optimem I (31985070 Gibco/BRL)/96-well plate. With a small volume multi-channel pipetter, aliquot approximately 2 ug of an expression vector containing a polynucleotide insert, produced by the methods described in Examples 8-10, into an appropriately labeled 96-well round bottom plate. With a multi-channel pipetter, add 50 ul of the Lipofectamine/Optimem I mixture to each well. Pipette up and down gently to mix. Incubate at RT 15-45 minutes. After about 20 minutes, use a multi-channel pipetter to add 150 ul Optimem I to each well. As a control, one plate of vector DNA lacking an insert should be transfected with each set of transfections.

[0918] Preferably, the transfection should be performed by tag-teaming the following tasks. By tag-teaming, hands on time is cut in half, and the cells do not spend too much time on PBS. First, person A aspirates off the media from four 24-well plates of cells, and then person B rinses each well with 0.5-1 ml PBS. Person A then aspirates off PBS rinse, and person B, using a 12-channel pipetter with tips on every other channel, adds the 200 ul of DNA/Lipofectamine/Optimem I complex to the odd wells first, then to the even wells, to each row on the 24-well plates. Incubate at 37 degree C. for 6 hours.

[0919] While cells are incubating, prepare appropriate media, either 1% BSA in DMEM with 1× penstrep, or HGS CHO-5 media (116.6 mg/L of CaCl₂ (anhyd); 0.00130 mg/L CuSO₄—5H₂O; 0.050 mg/L of Fe(NO₃)₃—9H₂O; 0.417 mg/L of FeSO₄—7H₂O; 311.80 mg/L of Kcl; 28.64 mg/L of MgCl₂; 48.84 mg/L of MgSO₄; 6995.50 mg/L of NaCl; 2400.0 mg/L of NaHCO₃; 62.50 mg/L of NaH₂PO₄—H₂O; 71.02 mg/L of Na₂HPO4; 0.4320 mg/L of ZnSO₄—7H₂O; 0.002 mg/L of Arachidonic Acid; 1.022 mg/L of Cholesterol; 0.070 mg/L of DL-alpha-Tocopherol-Acetate; 0.0520 mg/L of Linoleic Acid; 0.010 mg/L of Linolenic Acid; 0.010 mg/L of Myristic Acid; 0.010 mg/L of Oleic Acid; 0.010 mg/L of Palmitric Acid; 0.010 mg/L of Palmitic Acid; 100 mg/L of Pluronic F-68; 0.010 mg/L of Stearic Acid; 2.20 mg/L of Tween 80; 4551 mg/L of D-Glucose;
[0920] 130.85 mg/ml of L-Alanine; 147.50 mg/ml of L-Arginine-HCL; 7.50 mg/ml of L-Asparagine-H₂O; 6.65 mg/ml of L-Aspartic Acid; 29.56 mg/ml of L-Cystine-2HCL-H₂O; 31.29 mg/ml of L-Cystine-2HCL; 7.35 mg/ml of L-Glutamic Acid; 365.0 mg/ml of L-Glutamine; 18.75 mg/ml of Glycine; 52.48 mg/ml of L-Histidine-HCL-H₂O; 106.97 mg/ml of L-Isoleucine; 111.45 mg/ml of L-Leucine; 163.75 mg/ml of L-Lysine HCL; 32.34 mg/ml of L-Methionine; 68.48 mg/ml of L-Phenylalainine; 40.0 mg/ml of L-Proline; 26.25 mg/ml of L-Serine; 101.05 mg/ml of L-Threonine; 19.22 mg/ml of L-Tryptophan; 91.79 mg/ml of L-Tryrosine-2Na-2H₂O; and 99.65 mg/ml of L-Valine; 0.0035 mg/L of Biotin; 3.24 mg/L of D-Ca Pantothenate; 11.78 mg/L of Choline Chloride; 4.65 mg/L of Folic Acid; 15.60 mg/L of i-Inositol; 3.02 mg/L of Niacinamide; 3.00 mg/L of Pyridoxal HCL; 0.031 mg/L of Pyridoxine HCL; 0.319 mg/L of Riboflavin; 3.17 mg/L of Thiamine HCL; 0.365 mg/L of Thymidine; 0.680 mg/L of Vitamin B₁₂; 25 mM of HEPES Buffer; 2.39 mg/L of Na Hypoxanthine; 0.105 mg/L of Lipoic Acid; 0.081 mg/L of Sodium Putrescine-2HCL; 55.0 mg/L of Sodium Pyruvate; 0.0067 mg/L of Sodium Selenite; 20 uM of Ethanolamine; 0.122 mg/L of Ferric Citrate; 41.70 mg/L of Methyl-B-Cyclodextrin complexed with Linoleic Acid; 33.33 mg/L of Methyl-B-Cyclodextrin complexed with Oleic Acid; 10 mg/L of Methyl-B-Cyclodextrin complexed with Retinal Acetate. Adjust osmolarity to 327 mOsm) with 2 mm glutamine and 1× penstrep. (BSA (81-068-3 Bayer) 100 gm dissolved in 1 L DMEM for a 10% BSA stock solution). Filter the media and collect 50 ul for endotoxin assay in 15 ml polystyrene conical.

[0921] The transfection reaction is terminated, preferably by tag-teaming, at the end of the incubation period. Person A aspirates off the transfection media, while person B adds 1.5 ml appropriate media to each well. Incubate at 37 degree C. for 45 or 72 hours depending on the media used: 1% BSA for 45 hours or CHO-5 for 72 hours.

[0922] On day four, using a 300 ul multichannel pipetter, aliquot 600 ul in one 1 ml deep well plate and the remaining supernatant into a 2 ml deep well. The supernatants from each well can then be used in the assays described in Examples 27-30.

[0923] It is specifically understood that when activity is obtained in any of the assays described below using a supernatant, the activity originates from either the polypeptide of the present invention directly (e.g., as a secreted protein) or by polypeptide of the present invention inducing expression of other proteins, which are then secreted into the supernatant. Thus, the invention further provides a method of identifying the protein in the supernatant characterized by an activity in a particular assay.

### Example 26

### Construction of GAS Reporter Construct

[0924] One signal transduction pathway involved in the differentiation and proliferation of cells is called the Jaks-STATs pathway. Activated proteins in the Jaks-STATs pathway bind to gamma activation site “GAS” elements or interferon-sensitive responsive element (“ISRE”), located in the promoter of many genes. The binding of a protein to these elements alter the expression of the associated gene.

[0925] GAS and ISRE elements are recognized by a class of transcription factors called Signal Transducers and Activators of Transcription, or “STATs.” There are six members of the STATs family. Stat1 and Stat3 are present in many cell types, as is Stat2 (as response to MN-alpha is widespread). Stat4 is more restricted and is not in many cell types though it has been found in T helper class I, cells after treatment with IL-12. Stat5 was originally called mammary growth factor, but has been found at higher concentrations in other cells including myeloid cells. It can be activated in tissue culture cells by many cytokines.

[0926] The STATs are activated to translocate from the cytoplasm to the nucleus upon tyrosine phosphorylation by a set of kinases known as the Janus Kinase (“Jaks”) family. Jaks represent a distinct family of soluble tyrosine kinases and include Tyk2, Jak1, Jak2, and Jak3. These kinases display significant sequence similarity and are generally catalytically inactive in resting cells.

[0927] The Jaks are activated by a wide range of receptors summarized in the Table below. (Adapted from review by Schidler and Darnell, Ann. Rev. Biocheum 64:621-51 (1995)). A cytokine receptor family, capable of activating Jaks, is divided into two groups: (a) Class 1 includes receptors for IL-2, IL-3, IL-4, IL-6, IL-7, IL-9, IL-li, IL-12, IL-15, Epo, PRL, GH, G-CSF, GM-CSF, LIF, CNTF, and thrombopoietin; and (b) Class 2 includes IFN-a, IPN-g, and IL-10. The Class 1 receptors share a conserved cysteine motif (a set of four conserved cysteines and one tryptophan) and a WSXWS motif (a membrane proximal region encoding Trp-Ser-Xaa-Trp-Ser (SEQ ID NO: 2)).

[0928] Thus, on binding of a ligand to a receptor, Jaks are activated, which in turn activate STATs, which then translocate and bind to GAS elements. This entire process is encompassed in the Jaks-STATs signal transduction pathway. Therefore, activation of the Jaks-STATs pathway, reflected by the binding of the GAS or the ISRE element, can be used to indicate proteins involved in the proliferation and differentiation of cells. For example, growth factors and cytokines are known to activate the Jaks-STATs pathway (See Table below). Thus, by using GAS elements linked to reporter molecules, activators of the Jaks-STATs pathway can be identified.

| | JAKs | | | | | |
|---|---|---|---|---|---|---|
| Ligand | tyk2 | Jak1 | Jak2 | Jak3 | STATS | GAS (elements) or ISRE |
| IFN family | | | | | | |
| IFN-a/B | + | + | − | − | 1, 2, 3 | ISRE |
| IFN-g | | + | + | − | 1 | GAS (IRF1 > Lys6 > IFP) |
| Il-10 | + | ? | ? | − | 1, 3 | |
| gp130 family | | | | | | |
| IL-6 (Pleiotropic) | + | + | + | ? | 1, 3 | GAS (IRF1 > Lys6 > IFP) |
| Il-11 (Pleiotropic) | ? | + | ? | ? | 1, 3 | |
| OnM (Pleiotropic) | ? | + | + | ? | 1, 3 | |
| LIF (Pleiotropic) | ? | + | + | ? | 1, 3 | |
| CNTF (Pleiotropic) | −/+ | + | + | ? | 1, 3 | |
| G-CSF (Pleiotropic) | ? | + | ? | ? | 1, 3 | |
| IL-12 (Pleiotropic) | + | − | + | + | 1, 3 | |
| g-C family | | | | | | |
| IL-2 (lymphocytes) | − | + | − | + | 1, 3, 5 | GAS |
| IL-4 (lymph/myeloid) | − | + | − | + | 6 | GAS (IRF1 = IFP >> Ly6)(IgH) |
| IL-7 (lymphocytes) | − | + | − | + | 5 | GAS |
| IL-9 (lymphocytes) | − | + | − | + | 5 | GAS |
| IL-13 (lymphocyte) | − | + | ? | ? | 6 | GAS |
| IL-15 | ? | + | ? | + | 5 | GAS |
| gp140 family | | | | | | |
| IL-3 (myeloid) | − | − | + | − | 5 | GAS (IRF1 > IFP >> Ly6) |
| IL-5 (myeloid) | − | − | + | − | 5 | GAS |
| GM-CSF (myeloid) | − | − | + | − | 5 | GAS |
| Growth hormone family | | | | | | |
| GH | ? | − | + | − | 5 | |
| PRL | ? | +/− | + | − | 1, 3, 5 | |
| EPO | ? | − | + | − | 5 | GAS (B-CAS > IRF1 = IFP >> Ly6) |
| Receptor Tyrosine Kinases | | | | | | |
| EGF | ? | + | + | − | 1, 3 | GAS (IRF1) |
| PDGF | ? | + | + | − | 1, 3 | |
| CSF-1 | ? | + | + | − | 1, 3 | GAS (not IRF1) |

[0929] To construct a synthetic GAS containing promoter element, a PCR based strategy is employed to generate a GAS-SV40 promoter sequence. The 5′ primer contains four tandem copies of the GAS binding site found in the IRF1 promoter and previously demonstrated to bind STATs upon induction with a range of cytokines (Rothman et al., Immunity 1:457468 (1994).), although other GAS or ISRE elements can be used instead. The 5′ primer also contains 18 bp of sequence complementary to the SV40 early promoter sequence and is flanked with an XhoI site. The sequence of the 5′ primer is:

| | |
|---|---|
| 5′:GCGCCTCGAGATTTCCCCGAAATCTAGATTTCCCCGAAATGATTTCCCCG | (SEQ ID NO: 3) |
| AAATGATTTCCCCGAAATATCTGCCATCTCAATTAG:3′ | |

[0930] The downstream primer is complementary to the SV40 promoter and is flanked with a Hind m site:

| | |
|---|---|
| 5′:GCGGCAAGCTTTTTGCAAAGCCTAGGC:3′ | (SEQ ID NO: 4) |

[0931] PCR amplification is performed using the SV40 promoter template present in the B-gal:promoter plasmid obtained from Clontech. The resulting PCR fragment is digested with XhoI/Hind III and subcloned into BLSK2-. (Stratagene.) Sequencing with forward and reverse primers confirms that the insert contains the following sequence:

| | |
|---|---|
| 5′:CTCGAGATTTCCCCGAAATCTAGATTTCCCCGAAATGATTTCCCCGAAAT | (SEQ ID NO: 5) |
| GATTTCCCCGAAATATCTGCCATCTCAATTAGTCAGCAACCATAGTCCCGCCCCTAAC | |
| TCCGCCCATCCCGCCCCTAACTCCGCCCAGTTCCGCCCATTCTCCGCCCCATGGCTGAC | |
| TAATTTTTTTTATTTATGCAGAGGCCGAGGCCGCCTCGGCCTCTGAGCTATTCCAGAAG | |
| TAGTGAGGAGGCTTTTTTGGAGGCCTAGGCTTTTGCAAAAAGCTT:3′ | |

[0932] With this GAS promoter element linked to the SV40 promoter, a GAS:SEAP2 reporter construct is next engineered. Here, the reporter molecule is a secreted alkaline phosphatase, or “SEAP.” Clearly, however, any reporter molecule can be instead of SEAP, in this or in any of the other Examples. Well known reporter molecules that can be used instead of SEAP include chloramphenicol acetyltransferase (CAT), luciferase, alkaline phosphatase, B-galactosidase, green fluorescent protein (GFP), or any protein detectable by an antibody.

[0933] The above sequence confirmed synthetic GAS-SV40 promoter element is subcloned into the pSEAP-Promoter vector obtained from Clontech using HindIII and XhoI, effectively replacing the SV40 promoter with the amplified GAS:SV40 promoter element, to create the GAS-SEAP vector. However, this vector does not contain a neomycin resistance gene, and therefore, is not preferred for mammalian expression systems.

[0934] Thus, in order to generate mammalian stable cell lines expressing the GAS-SEAP reporter, the GAS-SEAP cassette is removed from the GAS-SEAP vector using SalI and NotI, and inserted into a backbone vector containing the neomycin resistance gene, such as pGFP-1 (Clontech), using these restriction sites in the multiple cloning site, to create the GAS-SEAP/Neo vector. Once this vector is transfected into mammalian cells, this vector can then be used as a reporter molecule for GAS binding.

[0935] Other constructs can be made using the above description and replacing GAS with a different promoter sequence. However, many other promoters can be substituted using the protocols described in these Examples. For instance, SRE, IL-2, NFAT, or Osteocalcin promoters can be substituted, alone or in combination (e.g., GAS/NF-KB/EGR, GAS/NF-KB, Il-2/NFAT, or NF-KB/GAS). Similarly, other cell lines can be used to test reporter construct activity, such as HELA (epithelial), HUVEC (endothelial), Reh (B-cell), Saos-2 (osteoblast), HUVAC (aortic), or

### Example 27

### Assay for SEAP Activity

[0936] As a reporter molecule for the assays, SEAP activity is assayed using the Tropix Phospho-light Kit (Cat. BP-400) according to the following general procedure. The Tropix Phospho-light Kit supplies the Dilution, Assay, and Reaction Buffers used below.

[0937] Prime a dispenser with the 2.5× Dilution Buffer and dispense 15 ul of 2.5× dilution buffer into Optiplates containing 35 ul of a supernatant. Seal the plates with a plastic sealer and incubate at 65 degree C for 30 min. Separate the Optiplates to avoid uneven heating.

[0938] Cool the samples to room temperature for 15 minutes. Empty the dispenser and prime with the Assay Buffer. Add 50 ml Assay Buffer and incubate at room temperature 5 min. Empty the dispenser and prime with the Reaction Buffer (see the Table below). Add 50 ul Reaction Buffer and incubate at room temperature for 20 minutes. Since the intensity of the chemiluminescent signal is time dependent, and it takes about 10 minutes to read 5 plates on a luminometer, thus one should treat 5 plates at each time and start the second set 10 minutes later.

[0939] Read the relative light unit in the luminometer. Set H12 as blank, and print the results. An increase in chemiluminescence indicates reporter activity.

Reaction Buffer Formulation:

| | Rxn buffer | |
|---|---|---|
| # of plates | diluent (ml) | CSPD (ml) |
| 10 | 60 | 3 |
| 11 | 65 | 3.25 |
| 12 | 70 | 3.5 |
| 13 | 75 | 3.75 |
| 14 | 80 | 4 |
| 15 | 85 | 4.25 |
| 16 | 90 | 4.5 |
| 17 | 95 | 4.75 |
| 18 | 100 | 5 |
| 19 | 105 | 5.25 |
| 20 | 110 | 5.5 |
| 21 | 115 | 5.75 |
| 22 | 120 | 6 |
| 23 | 125 | 6.25 |
| 24 | 130 | 6.5 |
| 25 | 135 | 6.75 |
| 26 | 140 | 7 |
| 27 | 145 | 7.25 |
| 28 | 150 | 7.5 |
| 29 | 155 | 7.75 |
| 30 | 160 | 8 |
| 31 | 165 | 8.25 |
| 32 | 170 | 8.5 |
| 33 | 175 | 8.75 |
| 34 | 180 | 9 |
| 35 | 185 | 9.25 |
| 36 | 190 | 9.5 |
| 37 | 195 | 9.75 |
| 38 | 200 | 10 |
| 39 | 205 | 10.25 |
| 40 | 210 | 10.5 |
| 41 | 215 | 10.75 |
| 42 | 220 | 11 |
| 43 | 225 | 11.25 |
| 44 | 230 | 11.5 |
| 45 | 235 | 11.75 |
| 46 | 240 | 12 |
| 47 | 245 | 12.25 |
| 48 | 250 | 12.5 |
| 49 | 255 | 12.75 |
| 50 | 260 | 13 |

### Example 28

### High-Throughput Screening Assay Identifying Changes in Small Molecule Concentration and Membrane Permeability

[0940] Binding of a ligand to a receptor is known to alter intracellular levels of small molecules such as calcium, potassium, sodium, and pH, as well as alter membrane potential. These alterations can be measured in an assay to identify supernatants which bind to receptors of a particular cell. Although the following protocol describes an assay for calcium, this protocol can easily be modified to detect changes in potassium, sodium, pH, membrane potential, or any other small molecule which is detectable by a fluorescent probe.

[0941] The following assay uses Fluorometric Imaging Plate Reader (“FLIPR”) to measure changes in flourescent molecules Molecular Probes) that bind small molecules. Clearly, any flourescent molecule detecting a small molecule can be used instead of the calcium fluorescent molecule, fluo-4 (Molecular Probes, Inc.; catalog no. F-14202), used here.

[0942] For adherent cells, seed the cells at 10,000-20,000 cells/well in a Co-star black 96-well plate with clear bottom. The plate is incubated in a CO₂ incubator for 20 hours. The adherent cells are washed two times in Biotek washer with 200 ul of HBSS (Hank's Balanced Salt Solution) leaving 100 ul of buffer after the final wash.

[0943] A stock solution of 1 mg/ml fluo-4 is made in 10% pluronic acid DMSO. To load the cells with fluo-4, 50 ul of 12 ug/ml fluo-4 is added to each well. The plate is incubated at 37 degrees C. in a CO₂ incubator for 60 min. The plate is washed four times in the Biotek washer with HBSS leaving 100 ul of buffer.

[0944] For non-adherent cells, the cells are spun down from culture media. Cells are re-suspended to 2-5×10⁶ cells/ml with HBSS in a 50-nil conical tube. 4 ul of 1 mg/ml fluo-4 solution in 10% pluronic acid DMSO is added to each ml of cell suspension. The tube is then placed in a 37 degrees C. water bath for 30-60 min. The cells are washed twice with HBSS, resuspended to 1×10⁶ cells/ml, and dispensed into a microplate, 100 ul/well. The plate is centrifuged at 1000 rpm for 5 min. The plate is then washed once in Denley Cell Wash with 200 ul, followed by an aspiration step to 100 ul final volume.

[0945] For a non-cell based assay, each well contains a fluorescent molecule, such as fluo-4. The supernatant is added to the well, and a change in fluorescence is detected.

[0946] To measure the fluorescence of intracellular calcium, the FLIPR is set for the following parameters: (1) System gain is 300-800 mW; (2) Exposure time is 0.4 second; (3) Camera F/stop is F/2; (4) Excitation is 488 nm; (5) Emission is 530 nm; and (6) Sample addition is 50 ul. Increased emission at 530 nm indicates an extracellular signaling event caused by the a molecule, either polypeptide of the present invention or a molecule induced by polypeptide of the present invention, which has resulted in an increase in the intracellular Ca⁺⁺ concentration.

### Example 29

### High-Throughput Screening Assay Identifying Tyrosine Kinase Activity

[0947] The Protein Tyrosine Kinases (PTK) represent a diverse group of transmembrane and cytoplasmic kinases. Within the Receptor Protein Tyrosine Kinase RPTK) group are receptors for a range of mitogenic and metabolic growth factors including the PDGF, FGF, EGF, NGF, HGF and Insulin receptor subfamilies. In addition there are a large family of RPTKs for which the corresponding ligand is unknown. Ligands for RPTKs include mainly secreted small proteins, but also membrane-bound and extracellular matrix proteins.

[0948] Activation of RPTK by ligands involves ligand-mediated receptor dimerization, resulting in transphosphorylation of the receptor subunits and activation of the cytoplasmic tyrosine kinases. The cytoplasmic tyrosine kinases include receptor associated tyrosine kinases of the src-family (e.g., src, yes, lck, lyn, fyn) and non-receptor linked and cytosolic protein tyrosine kinases, such as the Jak family, members of which mediate signal transduction triggered by the cytokine superfamily of receptors (e.g., the Interleukins, Interferons, GM-CSF, and Leptin).

[0949] Because of the wide range of known factors capable of stimulating tyrosine kinase activity, identifying whether polypeptide of the present invention or a molecule induced by polypeptide of the present invention is capable of activating tyrosine kinase signal transduction pathways is of interest. Therefore, the following protocol is designed to identify such molecules capable of activating the tyrosine kinase signal transduction pathways.

[0950] Seed target cells (e.g., primary keratinocytes) at a density of approximately 25,000 cells per well in a 96 well Loprodyne Silent Screen Plates purchased from Nalge Nunc (Naperville, Ill.). The plates are sterilized with two 30 minute rinses with 100% ethanol, rinsed with water and dried overnight. Some plates are coated for 2 hr with 100 ml of cell culture grade type I collagen (50 mg/ml), gelatin (2%) or polylysine (50 mg/ml), all of which can be purchased from Sigma Chemicals (St. Louis, Mo.) or 10% Matrigel purchased from Becton Dickinson (Bedford, Mass.), or calf serum, rinsed with PBS and stored at 4 degree C. Cell growth on these plates is assayed by seeding 5,000 cells/well in growth medium and indirect quantitation of cell number through use of alamarBlue as described by the manufacturer Alamar Biosciences, Inc. (Sacramento, Calif.) after 48 hr. Falcon plate covers #3071 from Becton Dickinson (Bedford, Mass.) are used to cover the Loprodyne Silent Screen Plates. Falcon Microtest III cell culture plates can also be used in some proliferation experiments.

[0951] To prepare extracts, A431 cells are seeded onto the nylon membranes of Loprodyne plates (20,000/200 ml/well) and cultured overnight in complete medium. Cells are quiesced by incubation in serum-free basal medium for 24 hr. After 5-20 minutes treatment with EGF (60 ng/ml) or 50 ul of the supernatant produced in Example 25, the medium was removed and 100 ml of extraction buffer ((20 mM HEPES pH 7.5, 0.15 M NaCl, 1% Triton X-100, 0.1% SDS, 2 mM Na3VO4, 2 mM Na4P207 and a cocktail of protease inhibitors (# 1836170) obtained from Boeheringer Mannheim (Indianapolis, Ind.)) is added to each well and the plate is shaken on a rotating shaker for 5 minutes at 4° C. The plate is then placed in a vacuum transfer manifold and the extract filtered through the 0.45 mm membrane bottoms of each well using house vacuum. Extracts are collected in a 96-well catch/assay plate in the bottom of the vacuum manifold and immediately placed on ice. To obtain extracts clarified by centrifugation, the content of each well, after detergent solubilization for 5 minutes, is removed and centrifuged for 15 minutes at 4 degree Cat 16,000×g.

[0952] Test the filtered extracts for levels of tyrosine kinase activity. Although many methods of detecting tyrosine kinase activity are known, one method is described here.

[0953] Generally, the tyrosine kinase activity of a supernatant is evaluated by determining its ability to phosphorylate a tyrosine residue on a specific substrate (a biotinylated peptide). Biotinylated peptides that can be used for this purpose include PSK1 (corresponding to amino acids 6-20 of the cell division kinase cdc2-p34) and PSK2 (corresponding to amino acids 1-17 of gastrin). Both peptides are substrates for a range of tyrosine kinases and are available from Boehringer Mannheim

[0954] The tyrosine kinase reaction is set up by adding the following components in order. First, add 10 ul of 5 uM Biotinylated Peptide, then 10 ul ATP/Mg₂₊ (5 mM ATP/50 mM MgCl₂), then 10 ul of 5× Assay Buffer (40 mM imidazole hydrochloride, pH7.3, 40 mM beta-glycerophosphate, 1 mM EGTA, 100 mM MgCl₂, 5 mM MnCl₂, 0.5 mg/ml BSA), then 5 ul of Sodium Vanadate(1 mM), and then 5 ul of water. Mix the components gently and preincubate the reaction mix at 30 degree C. for 2 min. Initial the reaction by adding 10 ul of the control enzyme or the filtered supernatant.

[0955] The tyrosine kinase assay reaction is then terminated by adding 10 ul of 120 mm EDTA and place the reactions on ice.

[0956] Tyrosine kinase activity is determined by transferring 50 ul aliquot of reaction mixture to a microtiter plate (MTP) module and incubating at 37 degree C. for 20 min. This allows the streptavidin coated 96 well plate to associate with the biotinylated peptide. Wash the MTP module with 300 ul/well of PBS four times. Next add 75 ul of anti-phospotyrosine antibody conjugated to horse radish peroxidase(anti-P-Tyr-POD(0.5 u/ml)) to each well and incubate at 37 degree C. for one hour. Wash the well as above.

[0957] Next add 100 ul of peroxidase substrate solution (Boehringer Mannheim) and incubate at room temperature for at least 5 mins (up to 30 min). Measure the absorbance of the sample at 405 nm by using ELISA reader. The level of bound peroxidase activity is quantitated using an ELISA reader and reflects the level of tyrosine kinase activity.

### Example 30

### High-Throughput Screening Assay Identifying Phosphorylation Activity

[0958] As a potential alternative and/or complement to the assay of protein tyrosine kinase activity described in Example 29, an assay which detects activation (phosphorylation) of major intracellular signal transduction intermediates can also be used. For example, as described below one particular assay can detect tyrosine phosphorylation of the Erk-1 and Erk-2 kinases. However, phosphorylation of other molecules, such as Raf, JNK, p38 MAP, Map kinase kinase (MEK), MEK kinase, Src, Muscle specific kinase (MuSK), IRAK, Tec, and Janus, as well as any other phosphoserine, phosphotyrosine, or phosphothreonine molecule, can be detected by substituting these molecules for Erk-1 or Erk-2 in the following assay.

[0959] Specifically, assay plates are made by coating the wells of a 96-well ELISA plate with 0.1 ml of protein G (1 ug/ml) for 2 hr at room temp, (RT). The plates are then rinsed with PBS and blocked with 3% BSA/PBS for 1 hr at RT. The protein G plates are then treated with 2 commercial monoclonal antibodies (100 ng/well) against Erk-1 and Erk-2 (1 hr at RT) (Santa Cruz Biotechnology). (To detect other molecules, this step can easily be modified by substituting a monoclonal antibody detecting any of the above described molecules.) After 3-5 rinses with PBS, the plates are stored at 4 degree C. until use.

[0960] A431 cells are seeded at 20,000/well in a 96-well Loprodyne filterplate and cultured overnight in growth medium. The cells are then starved for 48 hr in basal medium (DM and then treated with EGF (6 ng/well) or 50 ul of the supernatants obtained in Example 25 for 5-20 minutes. The cells are then solubilized and extracts filtered directly into the assay plate.

[0961] After incubation with the extract for 1 hr at RT, the wells are again rinsed. As a positive control, a commercial preparation of MAP kinase (10 ng/well) is used in place of A431 extract. Plates are then treated with a commercial polyclonal (rabbit) antibody (lug/ml) which specifically recognizes the phosphorylated epitope of the Erk-1 and Erk-2 kinases (1 hr at RT). This antibody is biotinylated by standard procedures. The bound polyclonal antibody is then quantitated by successive incubations with Europium-streptavidin and Europium fluorescence enhancing reagent in the Wallac DELFIA instrument (time-resolved fluorescence). An increased fluorescent signal over background indicates a phosphorylation by polypeptide of the present invention or a molecule induced by polypeptide of the present invention.

### Example 31

### Human Dermal Fibroblast and Aortic Smooth Muscle Cell Proliferation

[0962] The polypeptide of interest is added to cultures of normal human dermal fibroblasts (NHDF) and human aortic smooth muscle cells (AoSMC) and two co-assays are performed with each sample. The first assay examines the effect of the polypeptide of interest on the proliferation of normal human dermal fibroblasts (NHDF) or aortic smooth muscle cells (AoSMC). Aberrant growth of fibroblasts or smooth muscle cells is a part of several pathological processes, including fibrosis, and restenosis. The second assay examines IL6 production by both NHDF and SMC. IL6 production is an indication of functional activation. Activated cells will have increased production of a number of cytokines and other factors, which can result in a proinflammatory or immunomodulatory outcome. Assays are run with and without co-TNFa stimulation, in order to check for costimulatory or inhibitory activity.

[0963] Briefly, on day 1, 96-well black plates are set up with 1000 cells/well (NHDF) or 2000 cells/well (AoSMC) in 100 μl culture media. NHDF culture media contains: Clonetics FB basal media, 1 mg/ml hFGF, 5 mg/ml insulin, 50 mg/ml gentamycin, 2% FBS, while AoSMC culture media contains Clonetics SM basal media, 0.5 μg/ml hEGF, 5 mg/ml insulin, 1 μg/mil hFGF, 50 mg/ml gentamycin, 50 μg/ml Amphotericin B, 5% FBS. After incubation at 37° C. for at least 4-5 hours culture media is aspirated and replaced with growth arrest media. Growth arrest media for NHDF contains fibroblast basal media, 50 mg/ml gentamycin, 2% FBS, while growth arrest media for AoSMC contains SM basal media, 50 mg/ml gentamycin, 50 μg/ml Amphotericin B, 0.4% FBS. Incubate at 37° C. until day 2.

[0964] On day 2, serial dilutions and templates of the polypeptide of interest are designed such that they always include media controls and known-protein controls. For both stimulation and inhibition experiments, proteins are diluted in growth arrest media. For inhibition experiments, TNFa is added to a final concentration of 2 ng/ml (NHDF) or 5 ng/ml (AoSMC). Add ⅓ vol media containing controls or polypeptides of the present invention and incubate at 37 degrees C./5% CO₂ until day 5.

[0965] Transfer 60 μl from each well to another labeled 96-well plate, cover with a plate-sealer, and store at 4 degrees C. until Day 6 (for EL6 ELISA). To the remaining 100 μl in the cell culture plate, aseptically add Alamar Blue in an amount equal to 10% of the culture volume (10 μl). Return plates to incubator for 3 to 4 hours. Then measure fluorescence with excitation at 530 nm and emission at 590 nm using the CytoFluor. This yields the growth stimulation/inhibition data.

[0966] On day 5, the IL6 ELISA is performed by coating a 96 well plate with 50-100 ul/well of Anti-Human IL6 Monoclonal antibody diluted in PBS, pH 7.4, incubate ON at room temperature.

[0967] On day 6, empty the plates into the sink and blot on paper towels. Prepare Assay Buffer containing PBS with 4% BSA. Block the plates with 200 μl/well of Pierce Super Block blocking buffer in PBS for 1-2 hr and then wash plates with wash buffer (PBS, 0.05% Tween-20). Blot plates on paper towels. Then add 50 μl/well of diluted Anti-Human IL-6 Monoclonal, Biotin-labeled antibody at 0.50 mg/ml. Make dilutions of IL-6 stock in media (30, 10, 3, 1, 0.3, 0 ng/ml). Add duplicate samples to top row of plate. Cover the plates and incubate for 2 hours at RT on shaker.

[0968] Plates are washed with wash buffer and blotted on paper towels. Dilute EU-labeled Streptavidin 1:1000 in Assay buffer, and add 100 μl/well. Cover the plate and incubate 1 h at RT. Plates are again washed with wash buffer and blotted on paper towels.

[0969] Add 100 μl/well of Enhancement Solution. Shake for 5 minutes. Read the plate on the Wallac DELFIA Fluorometer. Readings from triplicate samples in each assay were tabulated and averaged.

[0970] A positive result in this assay suggests AoSMC cell proliferation and that the polypeptide of the present invention may be involved in dermal fibroblast proliferation and/or smooth muscle cell proliferation. A positive result also suggests many potential uses of polypeptides, polynucleotides, agonists and/or antagonists of the polynucleotide/polypeptide of the present invention which gives a positive result. For example, inflammation and immune responses, wound healing, and angiogenesis, as detailed throughout this specification. Particularly, polypeptides of the present invention and polynucleotides of the present invention may be used in wound healing and dermal regeneration, as well as the promotion of vasculogenesis, both of the blood vessels and lymphatics. The growth of vessels can be used in the treatment of, for example, cardiovascular diseases. Additionally, antagonists of polypeptides and polynucleotides of the invention may be useful in treating diseases, disorders, and/or conditions which involve angiogenesis by acting as an anti-vascular agent (e.g., anti-angiogenesis). These diseases, disorders, and/or conditions are known in the art and/or are described herein, such as, for example, malignancies, solid tumors, benign tumors, for example hemangiomas, acoustic neuromas, neurofibromas, trachomas, and pyogenic granulomas; artheroscleric plaques; ocular angiogenic diseases, for example, diabetic retinopathy, retinopathy of prematurity, macular degeneration, corneal graft rejection, neovascular glaucoma, retrolental fibroplasia, rubeosis, retinoblastoma, uvietis and Pterygia (abnormal blood vessel growth) of the eye; rheumatoid arthritis; psoriasis; delayed wound healing; endometriosis; vasculogenesis; granulations; hypertrophic scars (keloids); nonunion fractures; scleroderma; trachoma; vascular adhesions; myocardial angiogenesis; coronary collaterals; cerebral collaterals; arteriovenous malformations; ischemic limb angiogenesis; Osler-Webber Syndrome; plaque neovascularization; telangiectasia; hemophiliac joints; angiofibroma; fibromuscular dysplasia; wound granulation; Crohn's disease; and atherosclerosis. Moreover, antagonists of polypeptides and polynucleotides of the invention may be useful in treating anti-hyperproliferative diseases and/or anti-inflammatory known in the art and/or described herein.

[0971] One skilled in the art could easily modify the exemplified studies to test the activity of polynucleotides (e.g., gene therapy), antibodies, agonists, and/or antagonists and fragments and variants thereof.

### Example 32

### Cellular Adhesion Molecule (CAM) Expression on Endothelial Cells

[0972] The recruitment of lymphocytes to areas of inflammation and angiogenesis involves specific receptor-ligand interactions between cell surface adhesion molecules (CAMs) on lymphocytes and the vascular endothelium. The adhesion process, in both normal and pathological settings, follows a multi-step cascade that involves intercellular adhesion molecule-1 (ICAM-1), vascular cell adhesion molecule-1 (VCAM-1), and endothelial leukocyte adhesion molecule-1 (E-selectin) expression on endothelial cells (EC). The expression of these molecules and others on the vascular endothelium determines the efficiency with which leukocytes may adhere to the local vasculature and extravasate into the local tissue during the development of an inflammatory response. The local concentration of cytokines and growth factor participate in the modulation of the expression of these CAMs.

[0973] Briefly, endothelial cells (e.g., Human Umbilical Vein Endothelial cells (HUVECs)) are grown in a standard 96 well plate to confluence, growth medium is removed from the cells and replaced with 100 μl of 199 Medium (10% fetal bovine serum (PBS)). Samples for testing and positive or negative controls are added to the plate in triplicate (in 10 μl volumes). Plates are then incubated at 37° C. for either 5 h (selectin and integrin expression) or 24 h (integrin expression only). Plates are aspirated to remove medium and 100 μl of 0.1% paraformaldehyde-PBS (with Ca++ and Mg++) is added to each well. Plates are held at 4° C. for 30 min. Fixative is removed from the wells and wells are washed 1× with PBS (+Ca,Mg)+0.5% BSA and drained. 10 μl of diluted primary antibody is added to the test and control wells. Anti-ICAM-1-Biotin, Anti-VCAM-1-Biotin and Anti-E-selectin-Biotin are used at a concentration of 10 μg/ml (1:10 dilution of 0.1 mg/ml stock antibody). Cells are incubated at 37° C. for 30 min. in a humidified environment. Wells are washed three times with PBS(+Ca,Mg)+0.5% BSA. 20 μl of diluted ExtrAvidin-Alkaline Phosphatase (1:5,000 dilution, referred to herein as the working dilution) are added to each well and incubated at 37° C. for 30 min. Wells are washed three times with PBS(+Ca,Mg)+0.5% BSA. Dissolve 1 tablet of p-Nitrophenol Phosphate pNPP per 5 ml of glycine buffer (pH 10.4). 100 μl of pNPP substrate in glycine buffer is added to each test well. Standard wells in triplicate are prepared from the working dilution of the ExtrAvidin-Alkaline Phosphotase in glycine buffer: 1:5,000 (10⁰)>10^{-0.5}>10⁻¹>10^{-1.5}.5 μl of each dilution is added to triplicate wells and the resulting AP content in each well is 5.50 ng, 1.74 ng, 0.55 ng, 0.18 ng. 100 μl of pNNP reagent is then added to each of the standard wells. The plate is incubated at 37° C. for 4 h. A volume of 50 μl of 3M NaOH is added to all wells. The plate is read on a plate reader at 405 nm using the background subtraction option on blank wells filled with glycine buffer only. Additionally, the template is set up to indicate the concentration of AP-conjugate in each standard well [5.50 ng; 1.74 ng; 0.55 ng; 0.18 ng]. Results are indicated as amount of bound AP-conjugate in each sample.

### Example 33

### Alamar Blue Endothelial Cells Proliferation Assay

[0974] This assay may be used to quantitatively determine protein mediated inhibition of bFGF-induced proliferation of Bovine Lymphatic Endothelial Cells (LECs), Bovine Aortic Endothelial Cells (BAECs) or Human Microvascular Uterine Myometrial Cells (UTMECs). This assay incorporates a fluorometric growth indicator based on detection of metabolic activity. A standard Alamar Blue Proliferation Assay is prepared in EGM-2MV with 10 ng/ml of bFGF added as a source of endothelial cell stimulation. This assay may be used with a variety of endothelial cells with slight changes in growth medium and cell concentration. Dilutions of the protein batches to be tested are diluted as appropriate. Serum-free medium (GIBCO SFM) without bFGF is used as a non-stimulated control and Angiostatin or TSP-1 are included as a known inhibitory controls.

[0975] Briefly, LEC, BAECs or UTMECs are seeded in growth media at a density of 5000 to 2000 cells/well in a 96 well plate and placed at 37 degrees C overnight. After the overnight incubation of the cells, the growth media is removed and replaced with GIBCO EC-SFM. The cells are treated with the appropriate dilutions of the protein of interest or control protein sample(s) (prepared in SFM) in triplicate wells with additional bFGF to a concentration of 10 ng/ml. Once the cells have been treated with the samples, the plate(s) is/are placed back in the 37° C. incubator for three days. After three days 10 ml of stock alamar blue (Biosource Cat# DAL 100) is added to each well and the plate(s) is/are placed back in the 37° C. incubator for four hours. The plate(s) are then read at 530 nm excitation and 590 nm emission using the CytoFluor fluorescence reader. Direct output is recorded in relative fluorescence units.

[0976] Alamar blue is an oxidation-reduction indicator that both fluoresces and changes color in response to chemical reduction of growth medium resulting from cell growth. As cells grow in culture, innate metabolic activity results in a chemical reduction of the immediate surrounding environment. Reduction related to growth causes the indicator to change from oxidized (non-fluorescent blue) form to reduced (fluorescent red) form (i.e., stimulated proliferation will produce a stronger signal and inhibited proliferation will produce a weaker signal and the total signal is proportional to the total number of cells as well as their metabolic activity). The background level of activity is observed with the starvation medium alone. This is compared to the output observed from the positive control samples (bFGF in growth medium) and protein dilutions.

### Example 34

### Detection of Inhibition of a Mixed Lymphocyte Reaction

[0977] This assay can be used to detect and evaluate inhibition of a Mixed Lymphocyte Reaction (MLR) by gene products (e.g., isolated polypeptides). Inhibition of a MLR may be due to a direct effect on cell proliferation and viability, modulation of costimulatory molecules on interacting cells, modulation of adhesiveness between lymphocytes and accessory cells, or modulation of cytokine production by accessory cells. Multiple cells may be targeted by these polypeptides since the peripheral blood mononuclear fraction used in this assay includes T, B and natural killer lymphocytes, as well as monocytes and dendritic cells.

[0978] Polypeptides of interest found to inhibit the MLR may find application in diseases associated with lymphocyte and monocyte activation or proliferation. These include, but are not limited to, diseases such as asthma, arthritis, diabetes, inflammatory skin conditions, psoriasis, eczema, systemic lupus erythematosus, multiple sclerosis, glomerulonephritis, inflammatory bowel disease, crohn's disease, ulcerative colitis, arteriosclerosis, cirrhosis, graft vs. host disease, host vs. graft disease, hepatitis, leukemia and lymphoma.

[0979] Briefly, PBMCs from human donors are purified by density gradient centrifugation using Lymphocyte Separation Medium (LSM®, density 1.0770 g/ml, Organon Teknika Corporation, West Chester, Pa.). PBMCs from two donors are adjusted to 2×10⁶ cells/ml in RPMI-1640 (Life Technologies, Grand Island, N.Y.) supplemented with 10% FCS and 2 mM glutamine. PBMCs from a third donor is adjusted to 2×10⁵ cells/ml. Fifty microliters of PBMCs from each donor is added to wells of a 96-well round bottom microtiter plate. Dilutions of test materials (50 μl) is added in triplicate to microtiter wells. Test samples (of the protein of interest) are added for final dilution of 1:4; rhuIL-2 (R&D Systems, Minneapolis, Minn., catalog number 202-IL) is added to a final concentration of 1 μg/1 ml; anti-CD4 mAb (R&D Systems, clone 34930.11, catalog number MAB379) is added to a final concentration of 10 μg/pal. Cells are cultured for 7-8 days at 37° C. in 5% CO₂, and 1 μC of [³H] thymidine is added to wells for the last 16 hrs of culture. Cells are harvested and thymidine incorporation determined using a Packard TopCount. Data is expressed as the mean and standard deviation of triplicate determinations.

[0980] Samples of the protein of interest are screened in separate experiments and compared to the negative control treatment, anti-CD4 mAb, which inhibits proliferation of lymphocytes and the positive control treatment, IL-2 (either as recombinant material or supernatant), which enhances proliferation of lymphocytes.

[0981] One skilled in the art could easily modify the exemplified studies to test the activity of polynucleotides (e.g., gene therapy), antibodies, agonists, and/or antagonists and fragments and variants thereof.

### Example 35

### Assays for Protease Activity

[0982] The following assay may be used to assess protease activity of the polypeptides of the invention.

[0983] Gelatin and casein zymography are performed essentially as described (Heusen et al., Anal. Biochem, 102:196-202 (1980); Wilson et al., Journal of Urology, 149:653-658 (1993)). Samples are run on 10% polyacryamide/0.1% SDS gels containing 1% gelain orcasein, soaked in 2.5% triton at room temperature for 1 hour, and in 0.1M glycine, pH 8.3 at 37° C. 5 to 16 hours. After staining in amido black areas of proteolysis apear as clear areas agains the blue-black background. Trypsin (Sigma T8642) is used as a positive control.

[0984] Protease activity is also determined by monitoring the cleavage of n-a-benzoyl-L-arginine ethyl ester (BAEE) (Sigma B4500. Reactions are set up in (25 mM NaPO₄, 1 mM EDTA, and 1 mM BAEE), pH 7.5. Samples are added and the change in adsorbance at 260 nm is monitored on the Beckman DUN spectrophotometer in the time-drive mode. Trypsin is used as a positive control.

[0985] Additional assays based upon the release of acid-soluble peptides from casein or hemoglobin measured as adsorbance at 280 nm or colorimetrically using the Folin method are performed as described in Bergmeyer, et al., Methods of Enzymatic Analysis, 5 (1984). Other assays involve the solubilization of chromogenic substrates (Ward, Applied Science, 251-317 (1983)).

### Example 36

### Identifying Serine Protease Substrate Specificity

[0986] Methods known in the art or described herein may be used to determine the substrate specificity of the polypeptides of the present invention having serine protease activity. A preferred method of determining substrate specificity is by the use of positional scanning synthetic combinatorial libraries as described in GB 2 324 529 (incorporated herein in its entirety).

### Example 37

### Ligand Binding Assays

[0987] The following assay may be used to assess ligand binding activity of the polypeptides of the invention.

[0988] Ligand binding assays provide a direct method for ascertaining receptor pharmacology and are adaptable to a high throughput format. The purified ligand for a polypeptide is radiolabeled to high specific activity (50-2000 Ci/mmol) for binding studies. A determination is then made that the process of radiolabeling does not diminish the activity of the ligand towards its polypeptide. Assay conditions for buffers, ions, pH and other modulators such as nucleotides are optimized to establish a workable signal to noise ratio for both membrane and whole cell polypeptide sources. For these assays, specific polypeptide binding is defined as total associated radioactivity minus the radioactivity measured in the presence of an excess of unlabeled competing ligand. Where possible, more than one competing ligand is used to define residual nonspecific binding.

### Example 38

### Functional Assay in Xenopus Oocytes

[0989] Capped RNA transcripts from linearized plasmid templates encoding the polypeptides of the invention are synthesized in vitro with RNA polymerases in accordance with standard procedures. In vitro transcripts are suspended in water at a final concentration of 0.2 mg/ml. Ovarian lobes are removed from adult female toads, Stage V defolliculated oocytes are obtained, and RNA transcripts (10 ng/oocytc) are injected in a 50 nl bolus using a microinjection apparatus. Two electrode voltage clamps are used to measure the currents from individual Xenopus oocytes in response polypeptides and polypeptide agonist exposure. Recordings are made in Ca2+ free Barth's medium at room temperature. The Xenopus system can be used to screen known ligands and tissue/cell extracts for activating ligands.

### Example 39

### Microphysiometric Assays

[0990] Activation of a wide variety of secondary messenger systems results in extrusion of small amounts of acid from a cell. The acid formed is largely as a result of the increased metabolic activity required to fuel the intracellular signaling process. The pH changes in the media surrounding the cell are very small but are detectable by the CYTOSENSOR microphysiometer (Molecular Devices Ltd., Menlo Park, Calif.). The CYTOSENSOR is thus capable of detecting the activation of polypeptide which is coupled to an energy utilizing intracellular signaling pathway.

### Example 40

### Extract/Cell Supernatant Screening

[0991] A large number of mammalian receptors exist for which there remains, as yet, no cognate activating ligand (agonist). Thus, active ligands for these receptors may not be included within the ligands banks as identified to date. Accordingly, the polypeptides of the invention can also be functionally screened (using calcium, cAMP, microphysiometer, oocyte electrophysiology, etc., functional screens) against tissue extracts to identify its natural ligands. Extracts that produce positive functional responses can be sequentially subfractionated until an activating ligand is isolated and identified.

### Example 41

### Calcium and cAMP Functional Assays

[0992] Seven transmembrane receptors which are expressed in HEK 293 cells have been shown to be coupled functionally to activation of PLC and calcium mobilization and/or cAMP stimulation or inhibition. Basal calcium levels in the HEK 293 cells in receptor-transfected or vector control cells were observed to be in the normal, 100 nM to 200 nM, range. HEK 293 cells expressing recombinant receptors are loaded with fura 2 and in a single day >150 selected ligands or tissue/cell extracts are evaluated for agonist induced calcium mobilization. Similarly, HEK 293 cells expressing recombinant receptors are evaluated for the stimulation or inhibition of cAMP production using standard cAMP quantitation assays. Agonists presenting a calcium transient or cAMP fluctuation are tested in vector control cells to determine if the response is unique to the transfected cells expressing receptor.

### Example 42

### ATP-binding Assay

[0993] The following assay may be used to assess ATP-binding activity of polypeptides of the invention.

[0994] ATP-binding activity of the polypeptides of the invention may be detected using the ATP-binding assay described in U.S. Pat. No. 5,858,719, which is herein incorporated by reference in its entirety. Briefly, ATP-binding to polypeptides of the invention is measured via photoaffinity labeling with 8-azido-ATP in a competition assay. Reaction mixtures containing 1 mg/ml of the ABC transport protein of the present invention are incubated with varying concentrations of ATP, or the non-hydrolyzable ATP analog adenyl-5′-imidodiphosphate for 10 minutes at 4° C. A mixture of 8-azido-ATP (Sigma Chem. Corp., St. Louis, Mo.) plus 8-azido-ATP (³²P-ATP) (5 mCi/μmol, ICN, Irvine Calif.) is added to a final concentration of 100 P and 0.5 ml aliquots are placed in the wells of a porcelain spot plate on ice. The plate is irradiated using a short wave 254 nm UV lamp at a distance of 2.5 cm from the plate for two one-minute intervals with a one-minute cooling interval in between. The reaction is stopped by addition of dithiothreitol to a final concentration of 2 mM. The incubations are subjected to SDS-PAGE electrophoresis, dried, and autoradiographed. Protein bands corresponding to the particular polypeptides of the invention are excised, and the radioactivity quantified. A decrease in radioactivity with increasing ATP or adenly-5′-imidodiphosphate provides a measure of ATP affinity to the polypeptides.

### Example 43

### Small Molecule Screening

[0995] This invention is particularly useful for screening therapeutic compounds by using the polypeptides of the invention, or binding fragments thereof, in any of a variety of drug screening techniques. The polypeptide or fragment employed in such a test may be affixed to a solid support, expressed on a cell surface, free in solution, or located intracellularly. One method of drug screening utilizes eukaryotic or prokaryotic host cells which are stably transformed with recombinant nucleic acids expressing the polypeptide or fragment. Drugs are screened against such transformed cells in competitive binding assays. One may measure, for example, the formulation of complexes between the agent being tested and polypeptide of the invention.

[0996] Thus, the present invention provides methods of screening for drugs or any other agents which affect activities mediated by the polypeptides of the invention. These methods comprise contacting such an agent with a polypeptide of the invention or fragment thereof and assaying for the presence of a complex between the agent and the polypeptide or fragment thereof, by methods well known in the art. In such a competitive binding assay, the agents to screen are typically labeled. Following incubation, free agent is separated from that present in bound form, and the amount of free or uncomplexed label is a measure of the ability of a particular agent to bind to the polypeptides of the invention.

[0997] Another technique for drug screening provides high throughput screening for compounds having suitable binding affinity to the polypeptides of the invention, and is described in great detail in European Patent Application 84103564, published on Sep. 13, 1984, which is herein incorporated by reference in its entirety. Briefly stated, large numbers of different small molecule test compounds are synthesized on a solid substrate, such as plastic pins or some other surface. The test compounds are reacted with polypeptides of the invention and washed. Bound polypeptides are then detected by methods well known in the art. Purified polypeptides are coated directly onto plates for use in the aforementioned drug screening techniques. In addition, non-neutralizing antibodies may be used to capture the peptide and immobilize it on the solid support.

[0998] This invention also contemplates the use of competitive drug screening assays in which neutralizing antibodies capable of binding polypeptides of the invention specifically compete with a test compound for binding to the polypeptides or fragments thereof. In this manner, the antibodies are used to detect the presence of any peptide which shares one or more antigenic epitopes with a polypeptide of the invention.

### Example 44

### Phosphorylation Assay

[0999] In order to assay for phosphorylation activity of the polypeptides of the invention, a phosphorylation assay as described in U.S. Pat. No. 5,958,405 (which is herein incorporated by reference) is utilized. Briefly, phosphorylation activity may be measured by phosphorylation of a protein substrate using gamma-labeled ³²P-ATP and quantitation of the incorporated radioactivity using a gamma radioisotope counter. The polypeptides of the invention are incubated with the protein substrate, ³²P-ATP, and a kinase buffer. The ³²P incorporated into the substrate is then separated from free ³²P-ATP by electrophoresis, and the incorporated ³²P is counted and compared to a negative control. Radioactivity counts above the negative control are indicative of phosphorylation activity of the polypeptides of the invention.

### Example 45

### Detection of Phosphorylation Activity (Activation) of the Polypeptides of the Invention in the Presence of Polypeptide Ligands

[1000] Methods known in the art or described herein may be used to determine the phosphorylation activity of the polypeptides of the invention. A preferred method of determining phosphorylation activity is by the use of the tyrosine phosphorylation assay as described in U.S. Pat. No. 5,817,471 (incorporated herein by reference).

### Example 46

### Identification Of Signal Transduction Proteins That Interact With Polypeptides Of The Present Invention

[1001] The purified polypeptides of the invention are research tools for the identification, characterization and purification of additional signal transduction pathway proteins or receptor proteins. Briefly, labeled polypeptides of the invention are useful as reagents for the purification of molecules with which it interacts. In one embodiment of affinity purification, polypeptides of the invention are covalently coupled to a chromatography column. Cell-free extract derived from putative target cells, such as carcinoma tissues, is passed over the column, and molecules with appropriate affinity bind to the polypeptides of the invention. The protein complex is recovered from the column, dissociated, and the recovered molecule subjected to N-terminal protein sequencing. This amino acid sequence is then used to identify the captured molecule or to design degenerate oligonucleotide probes for cloning the relevant gene from an appropriate cDNA library.

### Example 47

### Assay for Phosphatase Activity

[1002] The following assay may be used to assess serine/threonine phosphatase (PTPase) activity of the polypeptides of the invention.

[1003] In order to assay for serine/threonine phosphatase (PTPase) activity, assays can be utilized which are widely known to those skilled in the art. For example, the serine/threonine phosphatase (PSPase) activity is measured using a PSPase assay kit from New England Biolabs, Inc. Myelin basic protein (MyBP), a substrate for PSPase, is phosphorylated on serine and threonine residues with cAMP-dependent Protein Kinase in the presence of [³²P]ATP. Protein serine/threonine phosphatase activity is then determined by measuring the release of inorganic phosphate from ³²P-labeled MyBP.

### Example 48

### Interaction of Serine/Threonine Phosphatases with other Proteins

[1004] The polypeptides of the invention with serine/threonine phosphatase activity as determined in Example 47 are research tools for the identification, characterization and purification of additional interacting proteins or receptor proteins, or other signal transduction pathway proteins. Briefly, labeled polypeptide(s) of the invention is useful as a reagent for the purification of molecules with which it interacts. In one embodiment of affinity purification, polypeptide of the invention is covalently coupled to a chromatography column. Cell-free extract derived from putative target cells, such as neural or liver cells, is passed over the column, and molecules with appropriate affinity bind to the polypeptides of the invention. The polypeptides of the invention-complex is recovered from the column, dissociated, and the recovered molecule subjected to N-terminal protein sequencing. This amino acid sequence is then used to identify the captured molecule or to design degenerate oligonucleotide probes for cloning the relevant gene from an appropriate cDNA library.

### Example 49

### Assaying for Heparanase Activity

[1005] In order to assay for heparanase activity of the polypeptides of the invention, the heparanase assay described by Vlodavsky et al is utilized (Vlodavsky, L, et al., Nat. Med., 5:793-802 (1999)). Briefly, cell lysates, conditioned media or intact cells (1×10⁶ cells per 35-mm dish) are incubated for 18 hrs at 37° C., pH 6.2-6.6, with ³⁵S-labeled ECM or soluble ECM derived peak I proteoglycans. The incubation medium is centrifuged and the supernatant is analyzed by gel filtration on a Sepharose CL-6B column (0.9×30 cm). Fractions are eluted with PBS and their radioactivity is measured. Degradation fragments of heparan sulfate side chains are eluted from Sepharose 6B at 0.5<Kₐᵥ<0.8 (peak II). Each experiment is done at least three times. Degradation fragments corresponding to “peak II,” as described by Vlodavsky et al., is indicative of the activity of the polypeptides of the invention in cleaving heparan sulfate.

### Example 50

### Immobilization of Biomolecules

[1006] This example provides a method for the stabilization of polypeptides of the invention in non-host cell lipid bilayer constucts (see, e.g., Bieri et al., Nature Biotech 17:1105-1108 (1999), hereby incorporated by reference in its entirety herein) which can be adapted for the study of polypeptides of the invention in the various functional assays described above. Briefly, carbohydrate-specific chemistry for biotinylation is used to confine a biotin tag to the extracellular domain of the polypeptides of the invention, thus allowing uniform orientation upon immobilization. A 50 uM solution of polypeptides of the invention in washed membranes is incubated with 20 mM NaIO4 and 1.5 mg/ml (4 mM) BACH or 2 mg/ml (7.5 mM) biotin-hydrazide for 1 hr at room temperature (reaction volume, 150 ul). Then the sample is dialyzed (Pierce Slidealizer Cassett, 10 kDa cutoff; Pierce Chemical Co., Rockford Ill.) at 4C first for 5 h, exchanging the buffer after each hour, and finally for 12 h against 500 ml buffer R (0.15 M NaCl, 1 mM MgCl2, 10 mM sodium phosphate, pH7). Just before addition into a cuvette, the sample is diluted 1:5 in buffer ROG50 (Buffer R supplemented with 50 mM octylglucoside).

### Example 51

### TAQMAN

[1007] Quantitative PCR (QPCR). Total RNA from cells in culture are extracted by Trizol separation as recommended by the supplier (LifeTechnologies). (Total RNA is treated with DNase I (Life Technologies) to remove any contaminating genomic DNA before reverse transcription.) Total RNA (50 ng) is used in a one-step, 50 ul, RT-QPCR, consisting of Taqman Buffer A (Perkin-Elmer; 50 mM KCl/10 mM Tris, pH 8.3), 5.5 mM MgCl₂, 240 μM each dNTP, 0.4 units RNase inhibitor(Promega), 8% glycerol, 0.012% Tween-20, 0.05% gelatin, 0.3 uM primers, 0.1 uM probe, 0.025 units Amplitaq Gold (Perkin-Elmer) and 2.5 units Superscript II reverse transcriptase (Life Technologies). As a control for genomic contamination, parallel reactions are setup without reverse transcriptase. The relative abundance of (unknown) and 18S RNAs are assessed by using the Applied Biosystems Prism 7700 Sequence Detection System (Livak, K. J., Flood, S. J., Marnaro, J., Giusti, W. & Deetz, K. (1995) PCR Methods Appl. 4, 357-362). Reactions are carried out at 48° C. for 30 min, 95° C. for 10 min, followed by 40 cycles of 95° C. for 15 s, 60° C. for 1 min. Reactions are performed in triplicate.

[1008] Primers (f & r) and FRET probes sets are designed using Primer Express Software (Perkin-Elmer). Probes are labeled at the 5′-end with the reporter dye 6-FAM and on the 3′-end with the quencher dye TAMRA (Biosource International, Camarillo, Calif. or Perkin-Elmer).

### Example 52

### Assays for Metalloproteinase Activity

[1009] Metalloproteinases (EC 3.4.24.−) are peptide hydrolases which use metal ions, such as Zn²⁺, as the catalytic mechanism Metalloproteinase activity of polypeptides of the present invention can be assayed according to the following methods.

Proteolysis of Alpha-2-Macroglobulin

[1010] To confirm protease activity, purified polypeptides of the invention are mixed with the substrate alpha-2-macroglobulin (0.2 unit/mil; Boehringer Mannheim, Germany) in 1× assay buffer (50 mM HEPES, pH 7.5, 0.2 M NaCl, 10 mM CaCl₂, 25 μM ZnCl₂ and 0.05% Brij-35) and incubated at 37° C. for 1-5 days. Trypsin is used as positive control. Negative controls contain only alpha-2-macroglobulin in assay buffer. The samples are collected and boiled in SDS-PAGE sample buffer containing 5% 2-mercaptoethanol for 5-min, then loaded onto 8% SDS-polyacrylamide gel. After electrophoresis the proteins are visualized by silver staining. Proteolysis is evident by the appearance of lower molecular weight bands as compared to the negative control.

Inhibition of Alpha-2-Macroglobulin Proteolysis by Inhibitors of Metalloproteinases

[1011] Known metalloproteinase inhibitors (metal chelators (EDTA, EGTA, AND HgCl₂), peptide metalloproteinase inhibitors (TIMP-1 and TIMP-2), and commercial small molecule MMP inhibitors) are used to characterize the proteolytic activity of polypeptides of the invention. The three synthetic MMP inhibitors used are: MMP inhibitor I, [IC₅₀=1.0 μM against MMP-1 and MMP-8; IC₅₀=30 μM against MMP-9; IC₅₀=150 μM against MMP-3]; MM-3 (stromelysin-1) inhibitor I [IC₅₀=5 μM against MMP-3], and MMP-3 inhibitor II [Kⱼ=130 nM against MMP-3]; inhibitors available through Calbiochem, catalog #444250, 444218, and 444225, respectively). Briefly, different concentrations of the small molecule MMP inhibitors are mixed with purified polypeptides of the invention (50 μg/1 ml) in 22.9 μl of 1×HEPES buffer (50 mM HEPES, pH 7.5, 0.2 M NaCl, 10 mM CaCl₂, 25 μM ZnCl₂ and 0.05% Brij-35) and incubated at room temperature (24° C.) for 2-hr, then 7.1 μl of substrate alpha-2-macroglobulin (0.2 unit/ml) is added and incubated at 37° C. for 20-hr. The reactions are stopped by adding 4× sample buffer and boiled immediately for 5 minutes. After SDS-PAGE, the protein bands are visualized by silver stain.

Synthetic Fluorogenic Peptide Substrates Cleavage Assay

[1012] The substrate specificity for polypeptides of the invention with demonstrated metalloproteinase activity can be determined using synthetic fluorogenic peptide substrates (purchased from BACHEM Bioscience Inc). Test substrates include, M-1985, M-2225, M-2105, M-2110, and M-2255. The first four are MMP substrates and the last one is a substrate of tumor necrosis factors (TNF-a) converting enzyme (TACE). All the substrates are prepared in 1:1 dimethyl sulfoxide (DMSO) and water. The stock solutions are 50-500 μM. Fluorescent assays are performed by using a Perkin Elmer LS 50B luminescence spectrometer equipped with a constant temperature water bath. The excitation λ is 328 nm and the emission λ is 393 nm. Briefly, the assay is carried out by incubating 176 μl 1×HEPES buffer (0.2 M NaCl, 10 mM CaCl₂, 0.05% Brij-35 and 50 mM HEPES, pH 7.5) with 4 μl of substrate solution (50 P) at 25° C. for 15 minutes, and then adding 20 μl of a purified polypeptide of the invention into the assay cuvett. The final concentration of substrate is 1 μM. Initial hydrolysis rates are monitored for 30-min.

### Example 53

### Characterization of the cDNA Contained in a Deposited Plasmid

[1013] The size of the cDNA insert contained in a deposited plasmid may be routinely determined using techniques known in the art, such as PCR amplification using synthetic primers hybridizable to the 3′ and 5′ ends of the cDNA sequence. For example, two primers of 17-30 nucleotides derived from each end of the cDNA (i.e., hybridizable to the absolute 5′ nucleotide or the 3′ nucleotide end of the sequence of SEQ ID NO:X, respectively) are synthesized and used to amplify the cDNA using the deposited cDNA plasmid as a template. The polymerase chain reaction is carried out under routine conditions, for instance, in 25 ul of reaction mixture with 0.5 ug of the above cDNA template. A convenient reaction mixture is 1.5-5 mM MgCl₂, 0.01% (w/v) gelatin, 20 uM each of dATP, dCTP, dGTP, dTTP, 25 pmol of each primer and 0.25 Unit of Taq polymerase. Thirty five cycles of PCR (denaturation at 94 degree C. for 1 min; annealing at 55 degree C. for 1 min; elongation at 72 degree C. for 1 min) are performed with a Perkin-Elmer Cetus automated thermal cycler. The amplified product is analyzed by agarose gel electrophoresis. The PCR product is verified to be the selected sequence by subcloning and sequencing the DNA product. It will be clear that the invention may be practiced otherwise than as particularly described in the foregoing description and examples. Numerous modifications and variations of the present invention are possible in light of the above teachings and, therefore, are within the scope of the appended claims.

Incorporation by Reference

[1014] The entire disclosure of each document cited (including patents, patent applications, journal articles, abstracts, laboratory manuals, books, or other disclosures) in the Background of the Invention, Detailed Description, and Examples is hereby incorporated herein by reference. In addition, the sequence listing submitted herewith is incorporated herein by reference in its entirety. The specification and sequence listing of each of the following U.S. and PCT applications are herein incorporated by reference in their entirety (filing dates shown in format “year-month-day” (yyyy-mmn-dd)): Application No. 60/278,650 filed on 2001 Mar. 27, application Ser. No. 09/950,082 filed on 2001 Sep. 12, application Ser. No. 09/950,083 filed on 2001 Sep. 12, Application No. 60/306,171 filed on 19 Jul. 2001, application Ser. No. 09/833,245 filed on 2001 Apr. 12, Application No. PCT/US01/11988 filed on 2001 Apr. 12, Application No. 60/331,287 filed on 2001 Nov. 13, Application No. 60/277,340 filed on 2001 Mar. 21, Application No. PCT/US00/06043 filed on 2000 Mar. 9, Application No. PCT/US00/06012 filed on 2000 Mar. 9, Application No. PCT/US00/06058 filed on 2000 Mar. 9, Application No. PCT/US00/06044 filed on 2000 Mar. 9, Application No. PCT/US00/06059 filed on 2000 Mar. 9, Application No. PCT/US00/06042 filed on 2000 Mar. 9, Application No. PCT/US00/06014 filed on 2000 Mar. 9, Application No. PCT/US00/06013 filed on 2000 Mar. 9, Application No. PCT/US00/06049 filed on 2000 Mar. 9, Application No. PCT/US00/06057 filed on 2000 Mar. 9, Application No. PC/US00/06824 filed on 2000 Mar. 16, Application No. PCT/US00/06765 filed on 2000 Mar. 16, Application No. PCT/US00/06792 filed on 2000 Mar. 16, Application No. PCT/US00/06830 filed on 2000 Mar. 16, Application No. PCT/US00/06782 filed on 2000 Mar. 16, Application No. PCT/US00/06822 filed on 2000 Mar. 16, Application No. PCT/US00/06791 filed on 2000 Mar. 16, Application No. PCT/US00/06828 filed on 2000 Mar. 16, Application No. PCT/US00/06823 filed on 2000 Mar. 16, Application No. PCT/US00/06781 filed on 2000 Mar. 16, Application No. PCT/US00/07505 filed on 2000 Mar. 22, Application No. PCT/US00/07440 filed on 2000 Mar. 22, Application No. PCT/US00/07506 filed on 2000 Mar. 22, Application No. PCT/US00/07507 filed on 2000 Mar. 22, Application No. PCT/US00/07535 filed on 2000 Mar. 22, Application No. PCT/US00/07525 filed on 2000 Mar. 22, Application No. PCT/US00/07534 filed on 2000 Mar. 22, Application No. PCT/US00/07483 filed on 2000 Mar. 22, Application No. PCT/US00/07526 filed on 2000 Mar. 22, Application No. PCT/US00/07527 filed on 2000 Mar. 22, Application No. PCT/US00/07661 filed on 2000 Mar. 23, Application No. PCT/US00/07579 filed on 2000 Mar. 23, Application No. PCT/US00/07723 filed on 2000 Mar. 23, Application No. PCT/US00/07724 filed on 2000 Mar. 23, Application No. PCT/US00/14929 filed on 2000 Jun. 1, Application No. PC/US00/07722 filed on 2000 Mar. 23, Application No. PCT/US00/07578 filed on 2000 Mar. 23, Application No. PCT/US00/07726 filed on 2000 Mar. 23, Application No. PCT/US00/07677 filed on 2000 Mar. 23, Application No. PCT/US00/07725 filed on 2000 Mar. 23, Application No. PCT/US00/09070 filed on 2000 Apr. 6, Application No. PCT/US00/08982 filed on 2000 Apr. 6, Application No. PCT/US00/08983 filed on 2000 Apr. 6, Application No. PCT/US00/09067 filed on 2000 Apr. 6, Application No. PCT/US00/09066 filed on 2000 Apr. 6, Application No. PCT/US00/09068 filed on 2000 Apr. 6, Application No. PCT/US00/08981 filed on 2000 Apr. 6, Application No. PCT/US00/08980 filed on 2000 Apr. 6, Application No. PCT/US0/09071 filed on 2000 Apr. 6, Application No. PCT/US00/09069 filed on 2000 Apr. 6, Application No. PCT/US00/15136 filed on 2000 Jun. 1, Application No. PCT/US00/14926 filed on 2000 Jun. 1, Application No. PCT/US00/14963 filed on 2000 Jun. 1, Application No. PCT/US00/15135 filed on 2000 Jun. 1, Application No. PCT/US00/14934 filed on 2000 Jun. 1, Application No. PCT/US00/14933 filed on 2000 Jun. 1, Application No. PCT/US00/15137 filed on 2000 Jun. 1, Application. No. PCT/US00/14928 filed on 2000 Jun. 1, Application No. PCT/US00/14973 filed on 2000 Jun. 1, Application No. PCT/US00/14964 filed on 2000406-01, Application No. PCT/US00/26376 filed on 2000 Sep. 26, Application No. PCT/US00/26371 filed on 2000 Sep. 26, Application No. PCT/US00/26324 filed on 2000 Sep. 26, Application No. PCT/US00/26323 filed on 2000 Sep. 26, Application No. PCT/US00/26337 filed on 2000 Sep. 26, Application No. PCT/US01/13318 filed on 2001 Apr. 27, Application No. U.S. 60/124,146 filed on 1999 Mar. 12, Application No. U.S. 60/167,061 filed on 1999 Nov. 23, Application No. U.S. 60/124,093 filed on 1999 Mar. 12, Application No. U.S. 60/166,989 filed on 1999, Nov. 23, Application No. U.S. 60/124,145 filed on 1999 Mar. 12, Application No. U.S. 60/168,654 filed on 1999 Dec. 3, Application No. U.S. 60/124,099 filed on 1999 Mar. 12, Application No. U.S. 60/168,661 filed on 1999 Dec. 3, Application No. U.S. 60/124,096 filed on 1999 Mar. 12, Application No. U.S. 60/168,622 filed on 1999 Dec. 3, Application No. U.S. 60/124,143 filed on 1999 Mar. 12, Application No. U.S. 60/168,663 filed on 1999 Dec. 3, Application No. U.S. 60/124,095 filed on 1999 Mar. 12, Application No. U.S. 60/138,598 filed on 1999, Jun. 11, Application No. U.S. 60/168,665 filed on 1999 Dec. 3, Application No. U.S. 60/125,360 filed on 1999 Mar. 19, Application No. U.S. 60/138,626 filed on 1999, Jun. 11, Application No. U.S. 60/168,662 filed on Dec. 3, 1999, Application No. U.S. 60/124,144 filed on 1999 Mar. 12, Application No. U.S. 60/138,574 filed on 1999 Jun. 11, Application No. U.S. 60/168,667 filed on 1999 Dec. 3, Application No. U.S. 60/124,142 filed on 1999 Mar. 12, Application No. U.S. 60/138,597 filed on 1999 Jun. 11, Application No. U.S. 60/168,666 filed on 1999 Dec. 3, Application No. U.S. 60/125,359 filed on 1999 Mar. 19, Application No. U.S. 60/168,664 filed on 1999-12403, Application No. U.S. 60/126,051 filed on 1999 Mar. 23, Application No. U.S. 60/169,906 filed on 1999 Dec. 10, Application No. U.S. 60/125,362 filed on 1999 Mar. 19, Application No. U.S. 60/169,980 filed on 1999 Dec. 10, Application No. U.S. 60/125,361 filed on 1999 Mar. 19, Application No. U.S. 60/169,910 filed on 1999 Dec. 10, Application No. U.S. 60/125,812 filed on 1999 Mar. 23, Application No. U.S. 60/169,936 filed on 1999 Dec. 10, Application No. U.S. 60/126,054 filed on 1999 Mar. 23, Application No. U.S. 60/169,916 filed on 1999 Dec. 10, Application No. U.S. 60/125,815 filed on 1999 Mar. 23, Application No. U.S. 60/169,946 filed on 1999 Dec. 10, Application No. U.S. 60/125,358 filed on 1999 Mar. 19, Application No. U.S. 60/169,616 filed on 1999 Dec. 8, Application No. U.S. 60/125,364 filed on 1999403-19, Application No. U.S. 60/169,623 filed on 1999 Dec. 8, Application No. U.S. 60/125,363 filed on 1999 Mar. 19, Application No. U.S. 60/169,617 filed on 1999 Dec. 8, Application No. U.S. 60/126,502 filed on 1999 Mar. 26, Application No. U.S. 60/172,410 filed on 1999 Dec. 17, Application No. U.S. 60/126,503 filed on 1999 Mar. 26, Application No. U.S. 60/172,409 filed on 1999 Dec. 17, Application No. U.S. 60/126,505 filed on 1999 Mar. 26, Application No. U.S. 60/172,412 filed on 1999 Dec. 17, Application No. U.S. 60/126,594 filed on 1999 Mar. 26, Application No. U.S. 60/172,408 filed on 1999 Dec. 17, Application No. U.S. 60/126,511 filed on 1999 Mar. 26, Application No. U.S. 60/172,413 filed on 1999 Dec. 17, Application No. U.S. 60/126,595 filed on 1999 Mar. 26, Application No. U.S. 60/171,549 filed on 1999 Dec. 22, Application No. U.S. 60/126,598 filed on 1999 Mar. 26, Application No. U.S. 60/171,504 filed on 1999 Dec. 22, Application No. U.S. 60/126,596 filed on 1999 Mar. 26, Application No. U.S. 60/171,552 filed on 1999 Dec. 22, Application No. U.S. 60/126,600 filed on 1999 Mar. 26, Application No. U.S. 60/171,550 filed on 1999 Dec. 22, Application No. U.S. 60/126,501 filed on 1999 Mar. 26, Application No. U.S. 60/171,551 filed on 1999 Dec. 22, Application No. U.S. 60/126,504 filed on 1999 Mar. 26, Application No. U.S. 60/174,847 filed on 2000 Jan. 7, Application No. U.S. 60/126,509 filed on 1999 Mar. 26, Application No. U.S. 60/174,853 filed on 2000 Jan. 7, Application No. U.S. 60/126,506 filed on 1994 Mar. 26, Application No. U.S. 60/174,852 filed on 2000 Jan. 7, Application No. U.S. 60/242,710 filed on 2000 Oct. 25, Application No. U.S. 60/126,510 filed on 1999 Mar. 26, Application No. U.S. 60/174,850 filed on 2000 Jan. 7, Application No. U.S. 60/138,573 filed on 1999 Jun. 11, Application No. U.S. 60/174,851 filed on 2000 Jan. 7, Application No. U.S. 60/126,508 filed on 1999 Mar. 26, Application No. U.S. 60/174,871 filed on 2000 Jan. 7, Application No. U.S. 60/126,507 filed on 1994 Mar. 26, Application No. U.S. 60/174,872 filed on 2000 Jan. 7, Application No. U.S. 60/126,597 filed on 1999 Mar. 26, Application No. U.S. 60/174,877 filed on 2000 Jan. 7, Application No. U.S. 60/126,601 filed on 1999 Mar. 26, Application No. U.S. 60/154,373 filed on 1999 Sep. 17, Application No. U.S. 60/176,064 filed on 2000 Jan. 14, Application No. U.S. 60/126,602 filed on 1999 Mar. 26, Application No. U.S. 60/176,063 filed on 2000 Jan. 14, Application No. U.S. 60/128,695 filed on 1999 Apr. 9, Application No. U.S. 60/176,052 filed on 2000 Jan. 14, Application No. U.S. 60/128,696 filed on 1999 Apr. 9, Application No. U.S. 60/176,069 filed on 2000 Jan. 14, Application No. U.S. 60/128,703 filed on 1999 Apr. 9, Application No. U.S. 60/176,068 filed on 2000 Jan. 14, Application No. U.S. 60/128,697 filed on 1999 Apr. 9, Application No. U.S. 60/176,929 filed on 2000 Jan. 20, Application No. U.S. 60/128,698 filed on 1999 Apr. 9, Application No. U.S. 60/176,926 filed on 2000 Jan. 20, Application No. U.S. 60/128,699 filed on 1999044-09, Application No. U.S. 60/177,050 filed on 2000 Jan. 20, Application No. U.S. 60/128,701 filed on 1999 Apr. 9, Application No. U.S. 60/177,166 filed on 2000 Jan. 20, Application No. U.S. 60/128,700 filed on 1999 Apr. 9, Application No. U.S. 60/176,930 filed on 2000 Jan. 20, Application No. U.S. 60/128,694 filed on 1999 Apr. 9, Application No. U.S. 60/176,931 filed on 2000 Jan. 20, Application No. U.S. 60/128,702 filed on 1999 Apr. 9, Application No. U.S. 60/177,049 filed on 2000 Jan. 20, Application No. U.S. 60/138,629 filed on 1999 Jun. 11, Application No. U.S. 60/138,628 filed on 1999 Jun. 11, Application No. U.S. 60/138,631 filed on 1999 Jun. 11, Application No. U.S. 60/138,632 filed on 1999 Jun. 11, Application No. U.S. 60/138,599 filed on 1999 Jun. 11, Application No. U.S. 60/138,572 filed on 1999 Jun. 11, Application No. U.S. 60/138,625 filed on 1999 Jun. 11, Application No. U.S. 60/138,633 filed on 1999 Jun. 11, Application No. U.S. 60/138,630 filed on 1999 Jun. 11, Application No. U.S. 60/138,627 filed on 1999 Jun. 11, Application No. U.S. 60/155,808 filed on 1999 Sep. 27, Application No. U.S. 60/155,804 filed on 1999 Sep. 27, Application No. U.S. 60/155,807 filed on 1999 Sep. 27, Application No. U.S. 60/155,805 filed on 1999 Sep. 27, Application No. U.S. 60/155,806 filed on 1999 Sep. 27, Application No. U.S. 60/201,194 filed on 2000, May 2, Application No. U.S. 60/212,142 filed on 2000 Jun. 16.

### Indications Relating to Deposited Biological Material

### (PCT Rule 13bis)

A. The indications made below relate to the deposited biological material referred to in Table 1A of the description.

B. Identification of Deposit:

[1015] Name of Depository: American Type Culture Collection
[1016] Address of Depository: 10801 University Boulevard Manassas, Va. 20110-2209 United States of America
   Europe

[1017] In respect of those designations in which a European Patent is sought a sample of the deposited microorganism will be made available until the publication of the mention of the grant of the European patent or until the date on which the application has been refused or withdrawn or is deemed to be withdrawn, only by the issue of such a sample to an expert nominated by the person requesting the sample (Rule 28(4) EPC).

Canada

[1018] The applicant requests that, until either a Canadian patent has been issued on the basis of an application or the application has been refused, or is abandoned and no longer subject to reinstatement, or is withdrawn, the Commissioner of Patents only authorizes the furnishing of a sample of the deposited biological material referred to in the application to an independent expert nominated by the Commissioner, the applicant must, by a written statement, inform the International Bureau accordingly before completion of technical preparations for publication of the international application.

Norway

[1019] The applicant hereby requests that the application has been laid open to public inspection (by the Norwegian Patent Office), or has been finally decided upon by the Norwegian Patent Office without having been laid open inspection, the furnishing of a sample shall only be effected to an expert in the art. The request to this effect shall be filed by the applicant with the Norwegian Patent Office not later than at the time when the application is made available to the public under Sections 22 and 33(3) of the Norwegian Patents Act. If such a request has been filed by the applicant, any request made by a third party for the furnishing of a sample shall indicate the expert to be used. That expert may be any person entered on the list of recognized experts drawn up by the Norwegian Patent Office or any person approved by the applicant in the individual case.

Australia

[1020] The applicant hereby gives notice that the furnishing of a sample of a microorganism shall only be effected prior to the grant of a patent, or prior to the lapsing, refusal or withdrawal of the application, to a person who is a skilled addressee without an interest in the invention (Regulation 3.25(3) of the Australian Patents Regulations).

Finland

[1021] The applicant hereby requests that, until the application has been laid open to public inspection (by the National Board of Patents and Regulations), or has been finally decided upon by the National Board of Patents and Registration without having been laid open to public inspection, the furnishing of a sample shall only be effected to an expert in the art.

United Kingdom

[1022] The applicant hereby requests that the furnishing of a sample of a microorganism shall only be made available to an expert. The request to this effect must be filed by the applicant with the International Bureau before the completion of the technical preparations for the international publication of the application.

Denmark

[1023] The applicant hereby requests that, until the application has been laid open to public inspection (by the Danish Patent Office), or has been finally decided upon by the Danish Patent office without having been laid open to public inspection, the furnishing of a sample shall only be effected to an expert in the art. The request to this effect shall be filed by the applicant with the Danish Patent Office not later that at the time when the application is made available to the public under Sections 22 and 33(3) of the Danish Patents Act. If such a request has been filed by the applicant, any request made by a third party for the furnishing of a sample shall indicate the expert to be used. That expert may be any person entered on a list of recognized experts drawn up by the Danish Patent Office or any person by the applicant in the individual case.

Sweden

[1024] The applicant hereby requests that, until the application has been laid open to public inspection (by the Swedish Patent Office), or has been finally decided upon by the Swedish Patent Office without having been laid open to public inspection, the furnishing of a sample shall only be effected to an expert in the art. The request to this effect shall be filed by the applicant with the International Bureau before the expiration of 16 months from the priority date (preferably on the Form PCT/RO/134 reproduced in annex Z of Volume I of the PCT Applicant's Guide). If such a request has been filed by the applicant any request made by a third party for the furnishing of a sample shall indicate the expert to be used. That expert may be any person entered on a list of recognized experts drawn up by the Swedish Patent Office or any person approved by a applicant in the individual case.

Netherlands

[1025] The applicant hereby requests that until the date of a grant of a Netherlands patent or until the date on which the application is refused or withdrawn or lapsed, the microorganism shall be made available as provided in the 31F(1) of the Patent Rules only by the issue of a sample to an expert. The request to this effect must be furnished by the applicant with the Netherlands Industrial Property Office before the date on which the application is made available to the public under Section 22C or Section 25 of the Patents Act of the Kingdom of the Netherlands, whichever of the two dates occurs earlier.

LENGTHY TABLE
The patent application contains a lengthy table section. A copy of the table is available in electronic form from the USPTO web site (http://seqdata.uspto.gov/?pageRequest=docDetail&DocID=US20070032414A1) An electronic copy of the table will also be available from the USPTO upon request and payment of the fee set forth in 37 CFR 1.19(b)(3).

The application's sequence listing, which the Patent Office published only in electronic form, follows.

SEQUENCE LISTING (1117 sequences)

SEQ ID NO: 1 - DNA, 733 bp, Homo sapiens
gggatccggagcccaaatcttctgacaaaactcacacatgcccaccgtgcccagcacctgaattcgagggtgcaccgtcagtcttcctcttccccccaaaacccaaggacaccctcatgatctcccggactcctgaggtcacatgcgtggtggtggacgtaagccacgaagaccctgaggtcaagttcaactggtacgtggacggcgtggaggtgcataatgccaagacaaagccgcgggaggagcagtacaacagcacgtaccgtgtggtcagcgtcctcaccgtcctgcaccaggactggctgaatggcaaggagtacaagtgcaaggtctccaacaaagccctcccaacccccatcgagaaaaccatctccaaagccaaagggcagccccgagaaccacaggtgtacaccctgcccccatcccgggatgagctgaccaagaaccaggtcagcctgacctgcctggtcaaaggcttctatccaagcgacatcgccgtggagtgggagagcaatgggcagccggagaacaactacaagaccacgcctcccgtgctggactccgacggctccttcttcctctacagcaagctcaccgtggacaagagcaggtggcagcaggggaacgtcttctcatgctccgtgatgcatgaggctctgcacaaccactacacgcagaagagcctctccctgtctccgggtaaatgagtgcgacggccgcgactctagaggat

SEQ ID NO: 2 - protein, 5 aa, Homo sapiens
  Site (3): Xaa equals any amino acid
WSXWS

SEQ ID NO: 3 - DNA, 86 bp, Artificial Sequence
  Primer_Bind: Synthetic sequence with 4 tandem copies of the GAS binding site found in the IRF1 promoter (Rothman et al., Immunity 1:457-468 (1994)), 18 nucleotides complementary to the SV40 early promoter, and a Xho I restriction site.
gcgcctcgagatttccccgaaatctagatttccccgaaatgatttccccgaaatgatttccccgaaatatctgccatctcaattag

SEQ ID NO: 4 - DNA, 27 bp, Artificial Sequence
  Primer_Bind: Synthetic sequence complementary to the SV40 promoter; includes a Hind III restriction site.
gcggcaagctttttgcaaagcctaggc

SEQ ID NO: 5 - DNA, 271 bp, Artificial Sequence
  Protein_Bind: Synthetic promoter for use in biological assays; includes GAS binding sites found in the IRF1 promoter (Rothman et al., Immunity 1:457-468 (1994)).
ctcgagatttccccgaaatctagatttccccgaaatgatttccccgaaatgatttccccgaaatatctgccatctcaattagtcagcaaccatagtcccgcccctaactccgcccatcccgcccctaactccgcccagttccgcccattctccgccccatggctgactaattttttttatttatgcagaggccgaggccgcctcggcctctgagctattccagaagtagtgaggaggcttttttggaggcctaggcttttgcaaaaagctt

SEQ ID NO: 6 - DNA, 32 bp, Artificial Sequence
  Primer_Bind: Synthetic primer complementary to human genomic EGR-1 promoter sequence (Sakamoto et al., Oncogene 6:867-871 (1991)); includes a Xho I restriction site.
gcgctcgagggatgacagcgatagaaccccgg

SEQ ID NO: 7 - DNA, 31 bp, Artificial Sequence
  Primer_Bind: Synthetic primer complementary to human genomic EGR-1 promoter sequence (Sakamoto et al., Oncogene 6:867-871 (1991)); includes a Hind III restriction site.
gcgaagcttcgcgactccccggatccgcctc

SEQ ID NO: 8 - DNA, 12 bp, Homo sapiens
ggggactttccc

SEQ ID NO: 9 - DNA, 73 bp, Artificial Sequence
  Primer_Bind: Synthetic primer with 4 tandem copies of the NF-KB binding site (GGGGACTTTCCC), 18 nucleotides complementary to the 5' end of the SV40 early promoter sequence, and a XhoI restriction site.
gcggcctcgaggggactttcccggggactttccggggactttccgggactttccatcctgccatctcaattag

SEQ ID NO: 10 - DNA, 256 bp, Artificial Sequence
  Protein_Bind: Synthetic promoter for use in biological assays; includes NF-KB binding sites.
ctcgaggggactttcccggggactttccggggactttccgggactttccatctgccatctcaattagtcagcaaccatagtcccgcccctaactccgcccatcccgcccctaactccgcccagttccgcccattctccgccccatggctgactaattttttttatttatgcagaggccgaggccgcctcggcctctgagctattccagaagtagtgaggaggcttttttggaggcctaggcttttgcaaaaagctt

SEQ ID NO: 11 - DNA, 605 bp, Homo sapiens
ggcacgaggttggttggagcgagcatgtgggtctgcagtacccggcacgaggcgaacccccgcccggcagtggcgggggctgctcccagcttctggctgtcacggacctgccgcctcctcctactccgcatccgccgagcctgcccgggtccgggcgcttgtctatgggcaccacggggatccagccaaggtcgtcgaactcaagaacctggagctagctgctgtgagaggatcagatgtccgtgtgaagatgctggcggcccctatcaatccatctgacataaatatgatccaaggaaactacggactccttcctgaactgcctgctgttggagggaacgaaggtgttgcacaggtggtagcggtgggcagcaatgtgaccgggctgaagccaggagactgggtgattccagcaaatgctggtttagagtctcgctctgttgcccaggctggtgcaatcttggctcactgcaacctgcaacctccacctcacaggagaatggcgtgaaccccggaggcagagcttgcggtgggccgagattgcgccactgcactccagcctgggcgacagagggagactccgtctcaaaaaaaaaaaaaaaaaa

SEQ ID NO: 12 - DNA, 2610 bp, Homo sapiens
gcctgaaggactgcctcgtttcaacaacaactttatggctcccggaagtgcctcctccccgtccccttcctttccagcctcacgcccgtgggctgcagttggaacgatggcggcggcagctgccgccgggcctagcccggggtctggacctggggactccccagaagggcccgagggggaggctccggagcgtcggcggaaggcgcacgggatgctgaagctttactacggcctctcggaaggggaggcggcgggacgccccgcggggcccgaccccctggacccgactgatctgaacggggcgcacttcgacccggaagtttacctagacaagctgcgtagagagtgccctctggcccagttgatggacagtgagacggacatggtgcggcagatccgggctctagacagcgacatgcagaccctggtctatgagaactacaacaagttcatctcagccacagacaccatccggaagatgaagaacgatttccggaagatggaggatgagatggaccggctggccaccaacatggcagtgatcaccgacttcagcgctcgcatcagcgccacgctgcaggaccgccacgagcgcatcaccaagctggcaggggtccacgcgctgctgcggaagctgcagttcctctttgagctgccctcgcgcctcaccaagtgcgtggaactgggcgcctatgggcaggcggtgcgctaccagggccgcgcgcaggccgtgctgcagcagtaccaacacctgccctcgttccgcgccatccaggacgactgccaggtcatcacggcccgcctggcccagcagctgcggcagcgctttagggagggcggctcaggcgccccggagcaggcagagtgcgtggagctgctgctggccctgggcgagcctgcggaggagctgtgcgaggagttctggcgcacgcccgcggccggctggagaaggagctgagaaacctggaggccgagctggggccctcacctccggctcccgacgtgttagagttcaccgaccatggaggcagtggcttcgtgggcggcctctgccaggtggcggcggcctaccaggagctgtttgcggcccagggcccagcaggtgccgagaagctggcggccttcgcccggcagctgggcarccgctattttgcgctggtggagcggcggctggcgcaggagcagggtggtggtgacaactcactgctggtgcgggcgctggaccgyttccaccggcgcttgcgggctcccggggccctgctggccgctgccgggctcgcagacgctgccacggagatcgtggaacgagtggcccgcgagcgcctgggccaccacctgcagggtctccgggcggccttcctgggctgcctgacagacgtccgccaggcgctggcagcacctcgcgtggctgggaaggagggccctggcctggccgagttgctggccaatgtggccagctccatcctgagccacattaaggcctctctggcagcagtgcaccttttcaccgccaaagaggtgtccttctccaacaagccctacttccggggtgagttctgcagtcagggtgtccgtgagggcctcatcgtgggcttcgtccactctatgtgccagacggctcagagcttctgcgacagccctggggagaaggggggtgccacaccacctgccctgctcctgctgctctcccgcctctgcctggactacgagacggccaccatctcctacatcctcactctcactgatgaacagtttctggtgcaggatcagttcccagtgacgcccgtgagcacgctgtgtgcagaggccagggaaacggcgcggcggctgctgacccactacgtgaaggtgcagggcctggtcatatcacagatgctgcgcaagagcgtggagactcgcgactggctcagcactctggagccccggaatgtgcgggccgtcatgaagcgggtggtggaggataccaccgccatcgacgtgcaggtggggctcctgtacgaagagggtgttcgcaaggcccagagcagcgactccagcaagaggactttctccgtgtacagcagctctcggcagcagggccgctacgcccccagctatacccccagtgccccgatggacaccaacctcttgagcaatatccagaagctattctctgaacgtattgatgtgttcagccctgtggagttcaacaaggtgtcggtgctgaccggcatcatcaagatcagcctgaagacgctgctggagtgtgtgcggctgcgcacctttgggcgcttcgggctgcagcaggtgcaagtggactgccactttctgcagctctacctgtggcgttttgtggccgacgaagaactcgtgcacttgctgctggacgaagtggtggcctctgctgccctgcgctgcccagaccctgtgcccatggagcccagtgtggttgaggtcatctgcgagcgcggctaggcgcagccgctgccatgcaccggtctgtccctgcaccccatggcacccaggatctggtctcggtggtccttccccgcaggcaggtgtcaggaccggcctaataaacatgtgtggcctcctcaaaaaaaaaaaaaaaaaaaaaaaaaaaaaaaaaaa

SEQ ID NO: 13 - DNA, 1493 bp, Homo sapiens
ggcacgagttttttttcatataaaactatttattcataaatattttccaaaatgaaaataggtttaccaaaaaatgtccctcactggggagggggatcagcatgcgggggaagggggtgggtagagggaggggccggtgtcactggaggtcccggtcctccaggtagcggtactcaaaggtgaagccttccttcttccgctggccccacttctcgtagtcaaagtagatgtaggtgccctgctcaaactcgtcagtgatggtcttgggctcctcgtgcctctggaaccacatcatgtacttggtgtggaatcgccatgactgcttctttagggccttggctgccagatactgtgccttagtgccctccagatagtagaagatgaagaagagagtctcggtcgacaggcgctggtagaattccacagtgtccgagtgtgggggtggcatctggtggtggtaggggggcgtcggacaggggttccgggggaggtactgccgaatacgctcagagtcagaggggtgaggcatgtggtgccaggcggcctcttccatggcctgctgatagagctgctccttggtgaggggcacagggcccagtggacagacacccagcgacagcggtatgttcacctctgacagctgcaggggcggctgggctgaggccggaggtgctgatgtactgctcaggatgatgtctcgctcggtcaggtgcagcgttggcacagggtcctcaatgccagagctgatggctgcccgttccgccatggacttcaaggagctcagaggctcagggccttgatttctgggcggtgctgaactgtggaggcccattgagcagggcaccggctgccttggcatcactgaagctgggcgttggggagctgggaggattcacaggcagtggcaccaggaggctgggtccccctgagttgttccctgagcctggggccacgcccccagcccccgttggggctgccgcactgggttccttcgaggtgctgggaggtgggttgtgggggccggaaggggggcccaaggcctggctgctggcattgttgcccccactgctgctcaaagccacctctgccgggctgtctgccacaactgagctgtaactggtggcgccattctgcttgccagcccctccaccggcactgctgttactactgctgctgctccctccgcctccgctgccgccggaggggtaggtgggcggcacagctggggactgagggtgctggttgctgtggacaggcttggagccgtttttggctggagactggctgacttcactgtctgtggaacgtcccctcttcttatcatcttcagagttttccgtggtacagttggctgggctgggcgggatgggagagctggaggtggttgaggtgggcgtgctgctggactggttgaagatctcatcctccatgtggctgtggctggggggggaggtggcgaccagcgcctgtggaatgtcctcgagggggggccc

SEQ ID NO: 14 - DNA, 951 bp, Homo sapiens
ggcacgagccaaggtctaccttctctaccggcctggacactacgatatcctctacaaatagggctggctccagcccgctgctgccctgctgcccccctctgccaggcgctagacatgtacagaggtttttctgtggttgtaaatggtcctatttcacccccttcttcctgtcacatgacccccccccatgttttattaaagggggtgctggtggtgagccgtgtgtgcgtgtccctgctctgctgcccgcctggctgctctgtctgctgccccctccccccaggtgggtccccctgcttttcacctatctactcctgagcttccccaacaggagcaggtttgaggggccaggcctcttggaggcccctcctgcttcgttgggttctgcttccttcccttcttagctggctcaggggcttctatgggatcctggaagttccttagggacttgcccagggtcccagggccacccacacttcatctgctccctcataggccccacctccacgtcccggctgggccccagaccccagcttcctgccctccaccgggagtctgcatggttgggagtcctgggtggaggggcctttgtgaggctggacccggctcagggcaggtggaggagctgggcctcccacagggtgcccgggcagtgccatcctggtgggggagggcagccttcaaacgtgtggggtctacagtcctcaggtctaggcagggctgccggttctccacctccccatccgccccaggccccctgcctgtgcctgccttgcaccccctctgcttgggccacggtgtctctgcattgcctgcctttttgccttcacctcttttcttccccgccccctgcacattcggggtctcagcccccaggctgtgagctccttgggggcaggccctcaataaatgtgaactgctgctgccgcaaaaaaaaaaaaaaaaaaaaaa

SEQ ID NO: 15 - DNA, 1300 bp, Homo sapiens
ggcacgagagcaaacttgcaggccctaatagcaacaggaggcgacatcaatgcagccattgaaaggctgctgggctcccagccatcgtaatcacatttctgtacctggaaaaaaaatgtatcttatttttgataatggctcttaaatctttaaacacacacacaaaatcgttctttactttcattttgattcttttaaatctgtctagttgtaagtctaatatgatgcattttaagatggagtccctccctcctacttccctcactccctttctcctttgcttatttttcctaccttcccttcctcttgtctccccactccctccctctttgtttccttccttccttatttcctttagtttccttccttagccgttttgagtggtgggaatcaatgctgtttcactcaaaagtgttgcatgcaaacacttctctttatcctgcatttattgtgattttgggaaacaggtatcaaccttcacagttgggtgaacaagtgttgtcctacagatgtccaatttatttgcatttttaaacattagcctatgatagtaatttaatgtagaatgaagatattaaaaacagaagcaaattatttgaagctctctaatttgtggtacgatattgcttattgtgactttggcatgtatttttgctagcaaaatgctgtaagatttataccattgatcttttttgctatatttgtatacagtacagtaagcacaattggcactgtacatctaaaaatattacagtagaatctgagtgtaatatgtgtaaccaaaatgagaaagaatacaagaaatgtttctggagctagttatgtctcacaattttgtagaatcttacagcatcttgtgataaacttctcagtgaaaatgttggctaggcaagttcagttaaaatatagtagaaatgtttatcctggtatctctaagtatacatttaattgtacagaaaatttacagtgtaacattgtgtcaacatttgcagattgactgtatatgaccttaatctttgtgcagcctgaaggatcagtgtagtaatgccaggaaagtgctttttacctaagacttccttctcagcttctcccataaagagaccctaatatgcattttgatttgtaattggaaatgtaactttcactgaaagtgtcatgtgatgtttgcattacttttaactgctatgtataaaggaaagtgtgtcttttgacttcatcagttatttctcttgtgcacagagaaaaatgcattaaaaatgactaaaaaaaataaaaaattaaaaaatgaaaaaaaaaaaaa

SEQ ID NO: 16 - DNA, 888 bp, Homo sapiens
ggcacgagctcccgtggcgtgggagctaaagagaggctggtgaattaaggaactttcaggtttacttctcagtgtgtcttctctgttccaaaccacagttgtgaatgggagagttcacatccgcgactggcgagaggagacactgtggaagacaaagcaaccggaagcgaaacagagactgctctctgaagcctgcaaaacccgcctctgctggttcttcatgcatcaccctgatggctgcgctctgtccacggactgctgcccgtttgcccatgggcctgcggactgcggccaccccggaccaccccgaggaagaagatttcatgagctgcatccttgccagccgaggcctggttggggaggccaaaccaaggagagcttccccagcagtcgtcagtgctgtggtctctgctctggctgtgtttcagcccacctcctcccagctttctccacatcctcacagtgatgaaccgtatttcataaacatcacacgccagagaagccacagttactcggaagcccccagctgactgcctggcttgtttcagatgcagccgcttgaaacgtgcgcagcatcttcatatcataaagattgtgcacggatccttacaatgtctcctgggggagagcggctgaggctgccttgcacaggcccttcccagggcgctgtccgacgcctgccccaccatgtccacatctgtgaagaggatggggctcctcgagaagtaagaccgtatctgccagcgtttctcaccacactggagagcagctgctctggagcagggatccaccagattggtatttttaaaaaaggtgtcaggcttgctatgttgaggttgtttttagagttacagagaataaaaacactcataatttcctgaaaaaaaa

SEQ ID NO: 17 - DNA, 330 bp, Homo sapiens
ggcacgagccagcaccagcgtcctagatggccccagcaccagctccaccatccggaccagaaatgctgccagagctggcgccagcttcttctcctggatccagcaccgttgacgaactgcagcgatcttactggccaagccagagcgcctcctctcagattccttctcgacacagcaccctaggcggcttcttcctgtcagtcggaggtggcatgcaagatgaagctctctttgctcttcctgctttcattttgtgcttttccttgtgttttcatgttttgggtatcagtgttacattaaagttgcaaaattaaaaaaaaaaaaaaaaaa

SEQ ID NO: 18 - DNA, 874 bp, Homo sapiens
ggcacgagtttattagatatattttcactaagaaaagaaagcagagtgaggttgaagctgatctgggctatccaggtggaaaggcgaaagtcatccataaggaatctgatatgatcatggcattttctgttaataaggcaaattgtaatgaaattgttttggcttcaacacatgatgttcaagaacttgatgttacttctctactggcctgtcagtcatacatatggatcggagaagaatatgacagagaatccaaaagttcagatgatgttgattatcgtggttccactacaactctttatcaacccagtgcaacatcctattcagcaagtcaggtgcatccaccttcatctctgccatggctgggcactggacagactagcactggagctagtgtgcttatgaaaaggaatctacataatggtaagagaatgacttcacacccagtccatcaatactatcttacaggtgctcaggacggcagtgtacgtatgtttgaatggacgcggcctcagcaacttgtctgctttcgtcaagctggcaatgcaagagttactagattatattttaattcacaaggcaacaagtgtggtgttgcggatggagagggttttctgagtatctggcaagttaaccaaactgcatcaaatcctaaaccttatatgagttggcagtgccacagtaaagccacaagtgactttgcatttattacctcttcaagtctagttgccacatctggacactccaatgacaatagaaatgtttgcctctgggacacattaatatcacccggaaacagcctcattcatggtttcacgtgccacgatcatggtgccacggtactgcagtatgcacccaaacagcaactcctaat

SEQ ID NO: 19 - DNA, 2440 bp, Homo sapiens
tacggctgcgagacgacagaaggggccttctagcagaaatggcggctgcggcggctcgagtggtgttgtcatccgcggcgcgcggcggctctggggtttcagcgagagtcttctaatccgaggcgctgcgggacggtcattatattttggagagaacagattaagaagtacacaggctgctacccaagttgttctgaatgttcctgaaacaagagtaacatgtttagaaagtggactcagagtagcttcggaagactctgggctctcaacatgcacagttggactctggattgatgctggaagtagatacgaaaatgagaagaacaatggaacagcacactttctggagcatatggctttcaagggcaccaagaagagatcccagttagatctggaacttgagattgaaaatatgggtgctcatctcaatgcctatacctccagagagcagactgtatactatgccaaagcattctctaaagacttgccaagagctgtagaaattcttgctgatataatacaaaacagcacattgggagaagcagagattgaacgtgagcgtggagtaatccttagagagatgcaggaagttgaaaccaatttacaagaagttgtttttgattatcttcatgccacagcttatcaaaatactgcacttggacggacaattttgggaccaactgaaaatatcaaatctataagtcgtaaggacttagtggattatataaccacacattataaggggccaagaatagtgcttgctgctgctggaggtgtttcccatgatgaattgcttgacttagcaaagtttcatttcggtgactctttatgcacacacaaaggagaaataccagctctgcctccctgcaaattcacaggaagtgagattcgtgtgagggatgacaagatgcctttggcgcaccttgcaatagctgttgaagctgttggttgggcacatccagatacaatctgtctcatggttgcaaacacgctgattggcaactgggatcgctcttttgggggaggaatgaatttatctagcaagctggcccagctcacttgtcatggcaatctttgccatagctttcagtctttcaacacttcctacacagatacaggattatggggactgtatatggtttgtgaatcatccactgttgcagacatgctacatgttgttcaaaaagaatggatgcgactctgtacaagtgtcacagaaagtgaggttgcacgagccagaaatcttctgaaaacaaacatgttgttgcagcttgatggttcaactccaatttgtgaagatattggtaggcaaatgttatgctataatagaaggattcccatccctgagcttgaagcaagaattgatgctgtgaatgctgagmcaattcgagaagtatgtaccaaatacatttataataggagtccagctattgctgctgttggattctttcttcttaggatataatcacagaagtgaacttcatgaatggaaatggaacaagttattttccaaaaggcaaactatttcatactcctacgtgaacatccttttaccacagcctcagccacagtacgtctaattatttaaaatttgtgattatcgctggtggtcaacaatttttttgtttttcatcctttaactggaaaaaggaggggctgtctcagtttttcttctgactctgtgtgtcacttacaattaataatgctagctgttaacatctacatagcagttgacatgtgccaggcctgtttaccagttaatcttctccatgatcctatgaggaaagtgctattgctgtctccatttcatagatgaggaaaatgaggcacagaggagacgttatgtagccactaccactgcaacttgctcaaacttccggccaagtcggctctagtccagacagcctgactcctcagcctgcgtctgtatgctgcctctcctaattcattatgtttattaataatttttccccgttttgttaacacttatgtttcaaaaacagtcatctttatttacattgactgatcatttcttttgtaatttcttctagtacttacaatagttctagtttcattaacatttcctatagactgaaaaaattttttaatctttttggaattttaatatagtcaagaaagtatctaaacttctcatttttcaaaatcttactgtcatttaataatccttcccttttccactgawwwgtgacactataatagtaaattttacaagggcttgttttggttacttattcttgccctggggttatctttaaactgaccacagytttctaatatatttgatcgtaacttccaaaaactgtgtaatttttgcttatttgtcttgcatctagtcacttaactctcttttgcttttctaggcagatcctatattatctacaaataatatatttatttccttctttccaaaaaaaaaaaa

SEQ ID NO: 20 - DNA, 1237 bp, Homo sapiens
tcgacccacgcgtccgggcagccatggagtctctgggatatttatgaaatatgatctcagttctcttatggtgacagttactgaggagcacatgccattctggcagttttttgtaagactctgtggtattgttggaggaatcttttcaacaacaggttaacaaccatttcctttttgtctaatttctgaaagtgttgcttatacttaagttgcttcttctcaaaggggcaagaagtatacagattttcatgtttcggtgtttaatagcttttgctttaattacaaaactccaaaattatatggactaaccagtaaacataactaatttcattgtattcaatgatgtaaggtagattatataatggtgagttggaaagatcctgggtgttaacatcagattgaagtagaattgaatgtaagttctgtcatttacttggtggtagcttggaatagatcacctaccttttctgaggttttctaatcagtaaaaatagcaataataatacctaatttgcaagtgtgctataggattaaatatgaaaatgcctagaaggcatttaagacatttttaactgtacagtatgtaaaatcatatgttatagtactttgaattatgcaatacatgaaactagatttgtaatcagtaacatgtttatgatttttgtcctgagatcctggaattcgctaagattatttgtcgaattgtaatgatgaaaattgggagttaagtccatagagaaaaaggaaacaatcctattttcaccttcagtccttattcagtattaatggagctggggtatttattatacttagaatcatatttttaaatgaatgaatagctttcttcgaaattcttgttagtgctcatttcatctatttaaatttgtgtggttgactcattattccaaatgtttgggtggaactgaaaagattgtgtttaggcccggtgcagtggctcatgcctatatcccaacactttgggaggccaaggctggcggatcaacttgaggccagaagttccagatcagcctggccaacatggctaaaccccgtctctactaaaaatacaaaaattacccggttatggtgtgcgcatttgtactgttagctactcgggaggctgaggttggggaatcgcttgaacctgggaggtagagattgcagtgagccaagatcatgccactgtactccagcctgggcaacagggtgagactctgtctcaaaaaaaaaaaaaaaa

SEQ ID NO: 21 - DNA, 2345 bp, Homo sapiens
  misc_feature (1088)..(1088): n equals a,t,g, or c
  misc_feature (1909)..(1909): n equals a,t,g, or c
  misc_feature (1913)..(1913): n equals a,t,g, or c
ggaactcctcgatgaggaccatctacagtgcttttttttttctatctctctgtctctcagttctgctttcttctacagtatttgatgactggcatcccatttctataagctgggtccagaactttgggctcacaccttcctttgacgtgcaagtgccacagaccctgagatgtttcttcagatcagggtgccgctggcatccactgaacttgcttcagtttaagctgagcaccttcctgagaatcatttcattttatctttcattctgtagtgagaagaggcttcagcatgaatagtctagggacatgcaagatgtataaaatagaatggagttgtgaattaggktatatgagggrgaaatttataaaaaatataaagcattgtaaagacaaatgcatgttacacaaaaccaggrgaccacttcattttaagaggtacctgctggtctcagaagctttaagtgatttataatctagtcaacaataagtggcagatgaactgaaaatatatttgcatgaagttcttagttcagaggtaaagctagggatgctatgcatggcaacactggaagggaaagagcttttgawatccaggtctgggcatttgcyctaatcagaggtcaacatcttctctgccctcataacccamtccccgccaggggtcctgtctcctagaccacacattagcagatataatayckgkcawtctggkttctcattctctttccagaaaaatccagacatgattttattgcaagatggagagaaaaggagacagcatcacatgtcttatattagtcacaaaaactggatgggttttatttcaggcgctaattcttttgagaacacaagggaaactttgatcttaatctatttgatgtggttttaagtaaaggagcatcttgtgcttactttgaaagtgtttttttacttcgggcttggtcaaatattacattttgttccagagaaaaactcatttggaaggcagcatggagtatagaattagacatccctgggcttgaagcccatctcagccatgaactacctttatgactttcagctagttacttttcctcactcagcttcagnttcttcatttataaagyaagtgcctcaacatcgctttttgactttcttaatcttgtctacgcatctacaagtagcccttttattactgatttttaactactcctggccattggaatgaccgagaagcccatgtctcattctcagacgggggattttgattctaatgacagtcatggttgagagtccactgtgttaaagtctcttcatttgaagcatctgatgtgaattctattttctgcttaaaccccagacatagatgttaagtttcaaaattatgtcgtacattcactcccactacatactcattgaatgcttaccatgtacagactctgtgatagactatggaaatacatagaaagaaattccctgtttttaagaactttacctagtgtttagaaattgcatttaaaactgataattaaaatactatagaccttggcttaaaggatgcaccttgtaatctgtaatcatatttgtagttatatattgctttgaaaatacactgtagacagtaagacaaaaaaggaaataaaaagtacatgaattgcgaaggagaaaataaaattggctttggtcacagatgacatgattggctatgtagaaaatcccgaggaactgacaaaacaaacaaacaaacaaatctagaactaattagttctagattatagcaaggktgcaggatcaagcttaatacctgaaagwaaattcctttcctatataccagccmtgaaccattggaatttgaaatcaaaatacmacaccattaatawtattaccaaaagagagagagggagamaatatgtattatgctaacaaaagangtanaaaaggtatgtgagaaaaactacaaatctctgatgaaataaatcaaaggagatctaaattaatggaaagacaaactatgctaatggataagaaaactcaatcttgttatgtgtcagttcattccaatttgatccatagattcaatgcaatcctagaaagctactttgtggacatctgcaaactgattctaaggtttacacgaaaaggcaaaaagatgcaatagtcgaaacaatattgaagaagaacaaagaagtcggactcttcttgacttcaagtctttctataaagctacaataatcaaaatagtgtggcattggtgaaagaatagatagatcaaaaccaattcaatggagaaagggaaaagacagtctttttaacaaatggtgctggaactggagttccttatgaaaaaaaaaaaaaaagggcggccgc

SEQ ID NO: 22 - DNA, 2536 bp, Homo sapiens
ccacgcgtccgcacgtatcaagataaagaggaagttgtcttatggatgaatactgttgggccctaccataatcgtcaagaaacatataagtacttttcacttccattctgtgtggggtcaaaaaaaaagtatcagtcattaccatgaaactctgggagaagcacttcaaggggttgaattggaatttagtggtctggatattaaatttaaagatgatgtgatgccagccacttactgtgaaattgatttagataaagaaaagagagatgcatttgtatatgccataaaaaatcattactggtaccagatgtacatagatgatttaccaatatggggtattgttggtgaggctgatgaaaatggagaagattactatctttggacctataaaaaacttgaaataggttttaatggaaatcgaattgttgatgttaatctaactagtgaaggaaaggtgaaactggttccaaatactaaaatccagatgtcatattcagtaaaatggaaaaagtcagatgtgaaatttgaagatcgatttgacaaatatcttgatccgtccttttttcaacatcggattcattggttttcaattttcaactccttcatgatggtgatcttcttggtgggcttagtttcaatgattttaatgagaacattaagaaaagattatgctcggtacagtaaagaggaagaaatggatgatatggatagagacctaggagatgaatatggatggaaacaggtgcatggagatgtatttagaccatcaagtcacccactgatattttcctctctgattggttctggatgtcagatatttgctgtgtctctcatcgttattattgttgcaatgatagaagatttatatactgagaggggatcaatgctcagtacagccatatttgtctatgctgctacgtctccagtgaatggttattttggaggaagtctgtatgctagacaaggaggaaggagatggataaagcagatgtttattggggcattccttatcccagctatggtgtgtggcactgccttcttcatcaatttcatagccatttattaccatgcttcaagagccattccttttggaacaatggtggccgtttgttgcatctgtttttttgttattcttcctctaaatcttgttggtacaatacttggccgaaatctgtcaggtcagcccaactttccttgtcgtgtcaatgctgtgcctcgtcctataccggagaaaaaatggttcatggagcctgcggttattgtttgcctgggtggaattttaccttttggttcaatctttattgaaatgtatttcatcttcacgtctttctgggcatataagatctattatgtctatggcttcatgatgctggtgctggttatcctgtgcattgtgactgtctgtgtgactattgtgtgcacatattttctactaaatgcagaagattaccggtggcaatggacaagttttctctctgctgcatcaactgcaatctatgtttacatgtattccttttactactattttttcaaaacaaagatgtatggcttatttcaaacatcattttactttggatatatggcggtatttagcacagccttggggataatgtgtggagcgattggttacatgggaacaagtgcctttgtccgaaaaatctatactaatgtgaaaattgactagagacccaagaaaacctggaactttggatcaatttctttttcataggggtggaacttgcacagcaaaaacaaacaaacgcaagaagagatttgggctttaacacactgggtactttgtgggtctctctttcgtcggtggcttaaagtaacatctatttccattgatcctaggttcttcctgactgctttctccaactgttcacagcaaatgcttggattttatgcagtaggcattactacagtacatggctaatcttcccaaaaactagctcattaaagatgaaatagaccagctctcttcagtgaagaggacaaatagtttatttaaagcatttgttccaataaaataaatagagggaaacttggatgctaaaattacatgaataggaatcttcctggcacttagtgtttctatgttattgaaaaatgatgttccagaaagattacttttttcctcttatttttactgccattgtcgacctattgtgggacatttttatatattgaatctgggttcttttttgactttttttttcccaatccaacagcatccttttttttaaaagagagaattagaaaatattaaatcctgcatgtaatatatctgctgtcatcttagttggaccaacttcccatttatttatcttaaaactatacagttacatcttaattccatccaaagaagatacagtttgaagacagaagtgtactctctacaatgcaatttactgtacagttagaaagcaaagtgttaaatggagaagatacttgtttttattaaacattttgagatttagataaactaaaaaaaaaaaaaaaaaaaaaaaaaaaaaaaaaaaaaaaaaaaaaaaaa

SEQ ID NO: 23 - DNA, 1809 bp, Homo sapiens
gttaagttgacccattgcagtggattgagtggagggcaggtgaagggcaggtgttttcaagtcaaaggagttcaggtgaagggcaggtgcttttagtcaaaggagttccttagcattatttcctcctttatttggagatcagattgaagatgtaggggactagaatgcagttgtagtttgtggtgtttactttttatggaaaagtgcctcttatgtgaaaagtcttctgtgcttgatcctgggggtaggggggttataaaaatgtcatacctgggatcctgcccttaaggagttgatggtaggtaatgctttcctttggctttttgttcatcttgagtctgtgtatgttcagttatcttcagccatttcctgggcaatgggraacatttctgttaaaacaaacttctgactttgatctgtgacttatatttctttttagataatgaagaaccactgggattagagggtgtataaaatacaataataagtatagtgtatgtaggaacctctgtmcaaccaatttggtgacttttaggcaactcatttgactatttgactgtttgttacatgagtgtgcatttggcyttgtttaaaattcctctataaagcacattttaaaaaatgacccagtacttagtatataagatgaactgccatttgtataattgatcatttaaaaatgcttattatacttttaatcaatcagtttccatgtttatgaaatgggaataattattatatctagctcatagaattgtcctgaagatgaaatttatatccatatatacataatgaagctctttagagcaatgtataactacatgccaactgttcaaaaaatattaatggctacatcactattaatattttaaaattagtactgtcattttcccttcctacatgactgaatgtaggaggtgactatttttgttataaaaggatttccaatgagatacctttgaatggtaaaatttcctatgcatttatttaaatgtttatatatatatgtctttaaagtatgaaagttaagtgcacttatacaaggcagattcaggtactaattaaactgctcatttagattacagaatgagggactgaaaattatatgtatttaattaggaattggattgattggtcttgactgctgktgtctttcagttcttttttattgttatacttcccatgtgtttgtctccttttctttttatcttttaaaaattgctttctgatttatttcctgttcagttttcagtaatgggtgtagaatagggcaagaacttatgttggtgcccgttgtttgaaccaggaaggagcaactgcatcagacagcctggggctcagttgggagggacttcagatcagtccctgcagagctgcctggcccagggaaccactgaattccagtttcctaactccaaatcggacagtttgtgggtctacactgtatgtacataatgaacattttaaggctcattcatccagtgttttccacatgctcccatttgtttagttctcctttttaaaaaccaataattatggaaaaatttagctatgtacagaaatagtagtgagaaaccccccacttagccatcatgcagcttcagcagttgatcatctcatagccagtcttgtttgctcaatactcccaaccatttcttttctcccattttattttgcaggaaatcccagacattatatcatttaatctaaaagtatttcaggatgtatctgtaagagatgaggactcaaaaatgcatacacacattttgagaacttcccaaaaaaaaaaaaaaaaaaaaaaaactcgag

SEQ ID NO: 24 - DNA, 850 bp, Homo sapiens
gggctgcaggaattcggcacgagaaaatagtcctcccttcaacatggctatcttttttcaagttttatatgcatagctctctcagcacttgaatggaaaaactgttacagcatttgggagttgtttttcttttagacatttgcagatcttatctcaaggtgactaggaacccagagctaagtatctgtgaggcaatctctgcgaacgctgaacttacctagttggtttctatgaaatatgtagaatgcactgcagtagccattgtaagaaggtactataccggttttttggggcttgttgttgttgtttggtctgagaatgtactgccaacccctcttttataagagagaactgattttgatacatattttaaaatatgatagtacagagttaatggatgttaaaattttatttctttgttttggtaagtagattaaatcgagaatcatataatcagtacatttgagaattatataaccagtatataataatactggacacaaccatttgccatcttttcctgttatcatcccatagagtgggtggggagaatgaatagacataaacctagaataatgataaatggtttttaaaactctatattgaatacattccagctgataatgacttttctttttcaccttggtgatatcagcctcagggtaaaaaaaaaagtttcataaatcttttagttataaacaggaaagttttatattagtgtgtcatttcatttctagactgttgatggtgatgatgataaagaatttggagccaattttgatatatgaatgtattgcttttacatgtgatgattaaagctctccattagcaaaaaaaaaaaaaaaaaaac

SEQ ID NO: 25 - DNA, 1713 bp, Homo sapiens
gtctcaatggacacttagaagaatttgatgatcttactgtcataaaatcagtaatgaaattctcagcaaaactatttggtaaacattgcaccctgtatttttacccaacatcttgttatgaaaattatcaaatacattaaaaagttaataattttatagtgtactcactacctagatgctaattagcattacctatgcttgctttgtcacatatccattcatcatttcatattattatttgatgcattttaaattgcatatcattaactagagttcattgttggcttttttacataaaattagcatgcaatgaagtgcatagaaatatgtgttcactgaggtttggcaaatgcatatagtgctatggaaataggaaacgttatcaccaccctagaaagtttccacactgccctttccagtcaattcctgtccctacttgaccctcaaaggcaaccactgttcctttttctaccataagatttttctgttctaaaactttatataaatagagtcacgcaacatgtacgcttttctacaaggcttcatttttttattgctgttcttttttattgctgagtagtattccactgtatgacaatattacagtttgttttcttaatttcctattattgatagatacctgggctgtttccaggattggccattataaataaagctgctatgaccattcttacgtaagtctttgtgaacataggttttcatttctttgcagtaaattccttggattagaattgctgggtcacagggtagttttaaaagaaactgccatacctttttccagttcagttttattgtgccctgtattttgtattttgatgtgcataaaggtgtaaactatttttatgatccatattgaagtattagaagaagtgagtttggaataacaatggcattgttcatggtcaaggatgacaattggaactatctgaggaaagcaaagacctgtctgccccagacagctcctcaaggggttcctatgcctgaaactttagcaatatttcactccttgaaaggttaaagcccaaccatggtgatatgttagctagaagaaacagcactggtttgtttatgttactaactttcaccacccgttttcagtaggtaaagtaagactgatcattgaacagaaaaggttatttctgtgatgaggttgagggggtagtggaaagcatgtattgctagtaagccccaggtacagctatgtgagagagagtcacctggacagggaagtcccccaaatggtggccagaagagcagaaaacggggtgggaaaaattctacctcacagttttgcataggggatagctatgcttttacgggacattttagcgtttaaaaatattttcaatattgtctctttattcaataccacccagctgtagttttttcacactctgatgactctcttatccactcttttacctctcccagctgttctattacatacagcattcacctgtattagtctatagaattataatcatctgtgtgtttctaatgctcattttcaaaaatatgtatggtttattcgatttttcctattaaaattttaagggctgggaaatttggcttctactgtaaatccttataatgttccacacattgtaaatatgcaataaaaatgttaacaactawaaaaaaaaaaaaaaaaaaaactcgactcgtgccgaattcggcacgagcggcacgagc

SEQ ID NO: 26 - DNA, 1856 bp, Homo sapiens
ctgactttccacctttcctacaaattccgattactgttgctgttgactttgtgcctgacagtggttgggtgggccaccatgtaactacttcgtgggtgccattcaagagattcctaaagcaaaggagttcatggctaatttccataagaccctcattttggggaagggaaaaactctgactaatgaagcatccacgaagaaggtagaacttgacaactgyccttctgtgtctccttacctcagaggccagagcaagctcattttcaaaccagatctcactttggaagaggtacaggcagaaaatcccaaagtgtccagaggccggtatcgccctcaggaatgtaaagctttacagagggtcgccatcctcgttccccaccggaacagagagaaacacctgatgtacctgctggaacatctgcatcccttcctgcagaggcagcagctggattatggcatctacgtcatccaccaggctgaaggtaaaaagtttaatcgagccaaactcttgaatgtgggctatctagaagccctcaaggaagaaaattgggactgctttatattccacgatgtggacctggtacccgagaatgactttaacctttacaagtgtgaggagcatcccaagcatctggtggttggcaggamcagcactgggtacaggttacgttacagtggatattttgggggtgttactgccctaagcagagagcagtttttcaaggtgaatggattctctaacaactactggggatggggaggcgaagacgatgacctcagactcagggttgagctccaaagaatgaaaatttcccggcccctgcctgaagtgggtaaatatacaatggtcttccacactagagacaaaggcaatgaggtgaacgcagaacggatgaagctcttacaccaagtgtcacgagtctggagaacagatgggttgagtagttgttcttataaattagtatctgtggaacacaatcctttatatatcaacatcacagtggatttctggtttggtgcatgaccctggatcttttggtgatgtttggaagaactgattctttgtttgcaataattttggcctagagacttcaaatagtagcacacattaagaacctgttacagctcattgttgagctgaatttttcctttttgtattttcttagcagagctcctggtgatgtagagtataaaacagttgtaacaagacagctttcttagtcattttgatcatgagggttaaatattgtaatatggatacttgaaggactttatataaaaggatgactcaaaggataaaatgaacgctatttgaggactctggttgaaggagatttatttaaatttgaagtaatatattatgggataaaaggccacaggaaataagactgctgaatgtctgagagaaccagagttgttctcgtccaaggtagaaaggtacgaagatacaatactgttattcatttatcctgtacaatcatctgtgaagtggtggtgtcaggtgagaaggcgtccacaaaagaggggagaaaaggcgacgaatcaggacacagtgaacttgggaatgaagaggtagcaggagggtggagtgtcggctgcaaaggcagcagtagctgagctggttgcagstgctgatagccttcaggggaggacctgcccaggtatgccttccagtgatgcccaccagagaatacattctctattagtttttaaagagtttttgtaaaatgattttgtacaagtaggatatgaattagcagtttacaagtttacatattaactaataataaatatgtctatcaaatacctctgtagtaaaatgtgaaaaagcaaaaaaaaaaaaaaaaaaaaaaaac

SEQ ID NO: 27 - DNA, 802 bp, Homo sapiens
ggcacgagagccagcagaggcgagggaaggcgtcactgccccggcggggagacgggcaggacgccctgccccgcaccagcagcctccgccggggcgccctcagctccctgcttggctctgtctctccacacccggcagggccgcgggctgccccagccctgggggtcgtgggcagctgctactcagtgccaaccccgtggggcacagagccatatacctcgctgtccggcccccaccccagcctcgccttcccaccccatcgtctccacttcaggaaaagccgcactttacacccccacctgcctcttccccctccatccctgctccccgatcctgagcggttggggtggggtccctcagcaaccccaggcgtgggtttgaggagacaggtgatttacatcccctttgctgtcctcccccggtaccaaggcagggagcctccggaggagccggccctgctggccacgcaggggccagactccagcctgtttccccagccctgcaggtcttccttctgtgggaagcttcctagcaagatggcttggagtcctggtccccctcctccctggccctctcgttcgtttctgtttctgtttacacgttggagtggggtcctccgtgggcggcggcgcgccctgccccgggtgtcgtccggcctcttgtgctcgagcccctttccgagttggactcgaccatccctcaccccaccaaggaccacactgtgaagtgataactgccttgaacccccctttgctgttttatttattaaacttgatttgaagccaaaaaaaaaaaaaaaaaa

SEQ ID NO: 28 - DNA, 690 bp, Homo sapiens
  misc_feature (142)..(142): n equals a,t,g, or c
  misc_feature (525)..(525): n equals a,t,g, or c
  misc_feature (677)..(679): n equals a,t,g, or c
  misc_feature (682)..(684): n equals a,t,g, or c
  misc_feature (686)..(686): n equals a,t,g, or c
  misc_feature (690)..(690): n equals a,t,g, or c
ggcacgagtgctttcaggcaacctgaaatggtttttcttcgagtacctgtaaagtactgactctgaagcaggagcgccttaatagttttataaactcaatcaatagaatgaattttttcttttctccctttctttctctctncttccttcctgcctttctttctctcccttcttttcccttcccttcccctcccctccctccctccctccttccctcccttccttccttccctccttcttggtcttgttctgtaacccaggctgcagtgcaatggcaaaatcatagctcactgtaacctcaaactcttgggctcaaggaatcctctggaaagctttttcaaagagatggtcgtaggtcttctcctcaaagatgtttaaaaatgggatcaggctgggctcagttgctcatgcttgtagtcccagcactttgggaggccgaagcaggcagatcacatgaggttgggagttcgggaccagcctgaccaacatggagaaatcccgtctctacttaaaatacaaaactanccaggcgtggtagcacatgcctgtaatcccagctatttgggaggctgaggcaggagagtcgcttgaactggggaggtggaggttgcagtgagccaagatcgcaccattgcactccagcctgggcaataagaatgaaacaccatctcaaaaannnaannnanaaan

SEQ ID NO: 29 - DNA, 1647 bp, Homo sapiens
ggcacgagatgaagccctgtccaggctatgggcatcaagacagcattgccggcggctgagctgggcctctactctctggtgctgagtggggccctggcctatgctggccggggcctccttgaggcttcacaagatggggcccacaggaaggccttccgggagtctgtgcgacctggctgggagtacattggccggaagatggatgtggctgacttcgagtgggtgatgtggttcacctcctttcgcaacgtcatcatctttgccctctccggacatgtgctgtttgctaaactctgcacgatggttgccccaaagctccgctcctggatgtatgctgtgtacggggccttggctgtgatgggcacaatgggcccttggtacctgctgctgctgcttggtcactgtgtgggcctctatgtggcctcgcttttgggccagccctggctctgtcttggccttggcttggccagcctggcctccttcaagatggaccccctaatctcttggcagagcgggtttgtaacaggcacttttgatcttcaagaggtgctgtttcatgggggcagcagcttcacatgctgcgttgcaccagctttgcactggagagctgtgcccaccctgaccgccactactccttagctgacctgctcaagtacaacttctacctgcccttcttcttcttcgggcccatcaatgacctttgatcgcttccatgctcaggtgagccaggtggagccagtgagacgcgagggtgagctgtggcacatccgagcccaggcaggcctaagcgtggtggccatcatggccgtcgacatcttctttcacttcttctacatcctcactatccccagcgacctcaagttcgccaaccgcctcccagacagtgccctcgctggcctagcctattcaaacctggtgtatgactgggtgaaggcggccgtcctctttggtgttgtcaacactgtggcatgcctcgaccacctggacccaccccagcctcccaagtgcatcaccgcactctacgtctttgcggaaacgcactttgaccgtggcatcaacgactggctttgcaaatatgtgtataaccacattggtggggagcattccgctgtgatcccagagctggcagccacagtggccacatttgccatcaccacactgtggcttgggccttgtgacattgtctacctgtggtcattccttaactgctttggcctcaactttgagctctggatgcaaaaactggcagagtgggggcccctagcacgaattgaggcctctctgtcagtgcagatgtcccgtagggtccgggccctgtttggagccatgacttctgggccatcatcatgtacaaccttgtgagcctgaacagcctcaaattcacagagctggttgcccggcgcctgctactcacagggttcccccagaccacgctgtccatcctgtttgtcacctactgtggcgtccagctggtaaaggagcgtgagcgaaccttggcactggaggaggagcagaagcaggacaaagagaagccggagtaggagggagcgggtagagggatgggctctgctcagctattcttgggccagatggggcctgaccgatagaataaaagacttttctacaacaaaaaaaaaaaaaaaaaaa

SEQ ID NO: 30 - DNA, 1782 bp, Homo sapiens
  misc_feature (1765)..(1765): n equals a,t,g, or c
  misc_feature (1771)..(1771): n equals a,t,g, or c
ggcacgagcccgcctcagcccaacatggcgatgcacaacaaggcggcgccgccgcagatcccggacacccggcgggagctggcggagctcgtgaagcggaagcaggagctggcggaaacattggcaaatttggagcgacagatctatgcttttgagggaagctacctggaagacactcagatgtatggcaatattattcgtggctgggatcggtatctgaccaaccaaaaaaactccaatagcaaaaatgatcgaaggaaccggaagtttaaggaagctgagcggctcttcagtaaatcctcggttacctcagcagctgcagtaagtgcattggcaggagttcaggaccagctcattgaaaagagggagccaggaagtgggacggaaagtgacacttctccagacttccacaatcaggaaaatgagcccagccaggaggaccctgaggatctggatggatctgtgcagggagtgaaacctcagaaggctgcttcttctacttcctcagggagtcaccacagcagccataaaaagcgaaagaataaaaaccggcacaggattgatctgaagttaaacaaaaaaccacgagctgactattagaagacacattagtgcagaagcttccaggctgtagagccctgcttcccttctctgacctcacaaagataaacatccttcacctgagttcgtggccatccacctctgctctcccagacccagtgcctgtgactttgagtagtttgttctaaatgtggtgacaaacaagtcatttctgtaagacattgggtcttactttatgtcatttttagtaacagaactgcaggaagatcaagacaatgttgtaatcccggcaagttgctaactgtgcgtttctcccttcttagaatgaatgtctcccccaaaactggctggcaccagcttcatctgtgatacccttcaagaaatgttctctggttttgttttatgctgaaagtagaacacaagtcacatttcagatggaggctgtaaatatctggcattttcttatattgttttatgttttcttgtttttctcttgttgtttttatcttattttctttggggtttttttgtaatgcctttgtacagctcatactttcctgctgacatatctgatcatctctttcatgcagttgccaatattcataactgaaaataatctggtttatcataagtaaaatgggaaacttgcctctgttttttgcaaggggaggtaaagagtgtttagtaattacctatcttaaatctttctgagttggtagtagattcatgttcaaggaacaggaaaaatggaaaaacataagtttaaatcagttctttttaaataactttttattcttttgtataaataaaatttcacaggcttcaaattctcatgctttacttttaaacccgagattgttttttcacttatttattcatatcatgccttatggaaatttctttttctgtattttctctctttgctggtattcacctgattaaatattgctctaaaaatcaccatggcatatggaaagtctcaaaattataccaaaagtgataacttatgtcgttcttaagtggagtgaaaggatagcatcagtgatagccagtgttgcccaccaggtctccctttcttggagggcttgttggggctgaggaatctgctagtaatcgttacctgcctctagtgctgtggtgaacttgcgacagggtctggctggcacattggaatcacctgagaagcttttaaaatacttcatgncctggnattcccattcc

SEQ ID NO: 31 - DNA, 1693 bp, Homo sapiens
gatccggggtcaccagttattagaggaagtaacacaaggggatatgagtgcagcagacacatttctgtccgatctgccaagggatgatatctatgtgtcagatgttgaggacgacggtgatgacacatctctggatagtgacctggatccagaggagctggcaggagtcaggggacatcagggtctaagggaccaaaagcgtatgcgacttactgaagtgcaagatgataaagaggaggaggaggaggagaatccactgctggtaccactggaggaaaaggcagtactgcaggaagaacaagccaacctgtggttctcaaagggcagctttgctgggatcgaggacgatgccgatgaggccctggagatcagtcaggcccagctgttatttgagaaccggcggaagggacggcagcagcagcagaagcagcagctgccacagacacccccttcctgtttgaagactgagataatgtctcccctgtaccaagatgaagcccctaagggaacagaggcttcttcggggacagaagctgccactggccttgaaggggaagaaaaggatggcatctcagacagtgatagcagtactagcagtgaggaagaagagagctgggaacccctccgtggtaagaagcgaagccgtgggcctaagtcagatgatgacgggtttgagatagtgcctattgaggacccagcgaaacatcggatactggaccccgaaggccttgctctaggtgctgttattgcctcttccaaaaaggccaagagagacctcatagataactccttcaaccggtacacatttaatgaggatgagggggagcttccggagtggtttgtgcaagaggaaaagcagcaccggatacgacagttgcctgttggtaagaaggaggtggagcattaccggaaacgctggcgggaaatcaatgcacgtcccatcaagaaggtggctgaggctaaggctagaaagaaaaggaggatgctgaagaggctggagcagaccaggaagaaggcagaagccgtggtgaacacagtggacatctcagaacgagagaaagtggcacagctgcgaagtctctacaagaaggctgggcttggcaaggagaaacgccatgtcacctacgttgtagccaaaaaaggtgtgggccgcaaagtgcgccggccagctggagtcagaggtcatttcaaggtggtggactcaaggatgaagaaggaccaaagagcacagcaacgtaaggaacaaaagaaaaaacacaaacggaagtaagcagagctgccaggctcccaggagagcatggggactaggaggaagggtgtggcatggctcagtctggcccccttgattaccggcctagcccctgctcacatcacagctgtctgaagaacagtgaggtggagtgcctagaactcccgtggtggtcctgagcagagaggaggatgtcctcctgcctgcctgaaggtctcccatgaaaacactgctgaactgtgttgacactcatgaccctttttttaaaccgttaaagggaagttcggtgttggagcgatactcaatgtagtcagtctacacctggacgtgtgggccacttaagccctccccacccccatcctattcctaaataaaaccaggataatggaaaaaaaaaaaaaaaaaaaaaaaaaaaaaaaaaaaaaaaaaaactcgagggggtcc

SEQ ID NO: 32 - DNA, 1767 bp, Homo sapiens
  misc_feature (183)..(183): n equals a,t,g, or c
ggcagaggagccgccgggtcacccaatgccccagcctggcttcatcccaccacacatgagtgcagatggcacctacatgcctccgggtttctaccctcctccaggcccccacccacccatgggcttactaccccccagggccctacacgccagggcccctaccctggcccctgggggcaccancagccacagtcctggtcccttcaggagctgccaccacggtgacagtgctgcagggagagatctttgagggagcgcctgtgcagacggtgtgtccccactgccagcaggccatcaccaccaagatctcctacgagattggcttgatgaatttcgtgctgggtttcttctgttgcttcatgggatgtgatctgggctgctgcctgatcccctgcctcatcaatgacttcaaggatgtgacgcacacatgccccagctgcaaagctacatctacacgtacaagcgcctgtgctaacggagctgggactcgggactcccccgcctgtcagtctggccccctgtgctttgctccctgygctcagtggtcactttcccgctcccacttggggctgggagccgtgccaccatcccctagaagtcctgtcctcttcaccctgccctacctgagccgctgactcttctggcaaaaattctgttgggatttaaggccaagggtcagtgggtggcagggggctgrcaatgagcttgtgtgttgttggtctgcttggtgtgtgtgatcgggaagataagctgggaggggtctcctgctggggtcctgatgcctctgtttccaaacaaggtacaggttcagtccagactctttccccctgggaccaacagcagccagagcagttagccagttagtccccaggcctgtggcacaggcgtttctgacctgctgggccgagaatgggtaagttgtctggagtcaggtgggcccacgtaggacagggtcacaaagcctgggtttgtttctgggtactttgcgcctctggggtgctagaggtggggcatggtggctggaagtaaaactgccaactctggccctcagaactctcaggtatagaagcccaggatgtctaataccctgtcccagtgcccgagagctgcctggtgtcaggtagagaggacactgtacctgggtgaatgatcagaccctggtagctaagaaggaacttgtccctttgagtcagtgtgcagaccccctttcaggccatgcctctgtgaaccctgtattgctggggccggaaggagcccctgagcctagccccttcccgtctgccctgtgtcctcactgcgtgtgggtatgacctctgcctggtggctggtgtatcccaactgggcaagagatggcagagggtcccccttgtgggtgcgcttggatgtgcagagccttctccatggattttcttccctgtaagtgccgggcccctcaccccagctgacaggctgttgctgtgcctgctcacacctgctcctgcaggcacactgggctagggacgaggaaggagcagccacaagtggtagaactgccttggtggacaccagcctcgccctgtctttatttcctgaatggtttgtgaacttgctcacctggaccactgtatcctgccactgtccttcctggtctcgcactgccactgcatggcctcctgtcactgtgaatcgtggcccagtctcagtttgtagtttctcattaaattggccctttcactcccccgcaaaaaaaaaaaaaaaaaaactcgagggggggcccggtacccaatc

SEQ ID NO: 33 - DNA, 3208 bp, Homo sapiens
ggagagtatgaggcgagctccggcccgggtgcggccgggcttcaggggcccaggcgccgctgctgccaccgccatctaacgctgcgccctggaggcccggcgcgcggatggtgccggtgcggctcgggtgttgaaacgggtgtgccctccccctcctcccctcccccacgcggtggtctcccctcccacccggctcaggcagagccatgtctcggggtggctcctacccacacctgttgtgggacgtgaggaaaaggtccctcgggctggaggacccgtcccggctgcggagtcgctacctgggaagaagagaatttatccaaagattaaaacttgaagcaacccttaatgtgcatgatggttgtgttaatacaatctgttggaatgacactggagaatatattttatctggctcagatgacaccaaattagtaattagtaatccttacagcagaaaggttttgacaacaattcgttcagggcaccgagcaaacatatttagtgcaaagttcttaccttgtacaaatgataaacagattgtatcctgctctggagatggagtaatattttataccaacgttgagcaagatgcagaaaccaacagacaatgcccaatttacgtgtcattatggaactacttatgagattatgactgtacccaatgacccttacacttttctctcttgtggtgaagatggaactgttaggtggtttgatacacgcatcaaaactagctgcacaaaagaagattgtaaagatgatattttaattaactgtcgacgtgctgccacgtctgttgctatttgcccaccaataccatattaccttgctgttggttgttctgacagctcagtacgaatatatgatcggcgaatgctgggcacaagagctacagggaattatgcaggtcgagggactactggaatggttgcccgttttattccttcccatcttaataataagtcctgcagagtgacatctctgtgttacagtgaagatggtcaagagattctcgttagttactcttcagattacatatatctttttgacccgaaagatgatacagcacgagaacttaaaactccttctgcggaagagagaagagaagagttgcgacaaccaccagttaagcgtttgagacttcgtggtgattggtcagatactggacccagagcaaggccggagagtgaacgagaacgagatggagagcagagtcccaatgtgtcattgatgcagagaatgtctgatatgttatcaagatggtttgaagaagcaagtgaggttgcacaaagcaatagaggacgaggaagatctcgacccagaggtggaacaagtcaatcagatatttcaactcttcctacggtcccatcaagtcctgatttggaagtgagtgaaactgcaatggaagtagatactccagctgaacaatttcttcagccttctacatcctctacaatgtcagctcaggctcattcgacatcatctcccacagaaagccctcattctactcctttgctatcttctccagatagtgaacaaaggcagtctgttgaggcatctggacaccacacacatcatcagtctgataacaataatgaaaagctgagccccaaaccagggacaggtgaaccagttttaagtttgcactacagcacagaaggaacaactacaagcacaataaaactgaactttacagatgaatggagcagtatagcatcaagttctagaggaattgggagccattgcaaatctgagggtcaggaggaatctttcgtcccacagagctcagtgcaaccaccagaaggagacagtgaaacaaaagctcctgaagaatcatcagaggatgtgacaaaatatcaggaaggagtatctgcagaaaacccagttgagaaccatatcaatataacacaatcagataagttcacagccaagccattggattccaactcaggagaaagaaatgacctcaatcatgatcgctcttgtggggttccagaagaatctgcttcatctgaaaaagccaaggaaccagaaacttcagatcagactagcactgagagtgctaccaatgaaaataacaccaatcctgagcctcagttccaaacagaagccactgggccttcagctcatgaagaaacatccaccagggactctgctcttcaggacacagatgacagtgatgatgacccagtcctgatcccaggtgcaaggtatcgagcaggacctggtgatagacgctctgctgttgcccgtattcaggagttcttcagacggagaaaagaaaggaaagaaatggaagaattggatactttgaacattagaaggccgctagtaaaaatggtttataaaggccatcgcaactccaggacaatgataaaagaagccaatttctggggtgctaactttgtaatgagtggttctgactgtggccacattttcatctgggatcggcacactgctgagcatttgatgcttctggaagctgataatcatgtggtaaactgcctgcagccacatccgtttgacccaattttagcctcatctggcatagattatgacataaagatctggtcaccattagaagagtcaaggatttttaaccgaaaacttgctgatgaagttataactcgaaacgaactcatgctggaagaaactagaaacaccattacagttccagcctctttcatgttgaggatgttggcttcacttaatcatatccgagctgaccggttggagggtgacagatcagaaggctctggtcaagagaatgaaaatgaggatgaggaataataaactctttttggcaagcacttaaatgttctgaaatttgtataagacatttattatatttttttctttacagagctttagtgcaattttaaggttatggtttttggagtttttccctttttttgggataacctaacattggtttggaatgattgtgtgcatgaatttgggagattgtataaaacaaaactagcagaatgtttttaaaactttttgccgtgtatgaggagtgctagaaaatgcaaagtgcaatattttccctaaccttcaaatgtgggagcttggatcaatgttgaagaataattttcatcatagtgaaaatgttggttcaaataaatttctacacttgccatttgcatgtttgttgctttctaattaaagaaactggttgttttaagataaaaaaaaaaaaaaaaaa

SEQ ID NO: 34 - DNA, 637 bp, Homo sapiens
agtccactttctgaagtttcagttatggtcaacagtggtccaaaaatattaaatggaaaacttcagaaataaacagttcataagttttaaattacatgctttctgagtagcatgatgaaatcttgtttcaacctgcttgggacatgaattatccctttgtccatcatatgcacgttgtatatgttactcacccgatagtcacttagcagctgtcttgattattaggttgactctcgtggtattgcagtgcttgtgttcagttcaataaagttaaggttcaataaagttaaaataaaggttcaataaagttaacctttattttacgtaatgaccctagggcacaagaatagtgatgatggcatattgtcatgattttttttattatttaatatcttattgtgcctaatttacaaattagactttctcataggtgtgtatatttaggaaaaaacatagtacgtgtaaggttcagtactatctgcggtttcaggcatccactggggttctgggaacatattccctgtggataaagggggactactatagtgaatttctattttcccttgtatatgcagtttcttttgaatgcctcagtccttgatgtttggctcctaaaaaaaaaaaaaaaaaactcgta

SEQ ID NO: 35 - DNA, 750 bp, Homo sapiens
ggcacgagtttcaacatgagactaatccagggtggtgacatgccggtctttgtagttcttgcttcggggttaatgaggggcaggaaagagttccttagactcctgcatggcatcatgaatgctgctgttcttcttaccttggtttttttcctcctcctctaccttttctaccttggtgtgctgggatcagatcctgcttatcttccacttcttaagaaaagctgacatagaagacacattgggactataacagggctgggtctcctcttccactcccactagacacatgctgcagtacatcagagagtttgtcaccagttaagcaggctcctcggaagtccccctccgacactgagggtcttgtaaagagtctgccttctggatctcaccagggcccagtcatatatgcacagttagaccactccggcggacatcacagtgacaagattaacaagtcagagtctgtggtgtatgcggatatccgaaagaattaagagaatacctagaacatatcctcagcaagaaacaaaaccaaactggactctcgtgcagaaaatgtagcccattaccacatgtagccttggagacccaggcaaggacaagtacacgtgtactcacagagggagagaaagatgtgtacaaaggatatgtataaatattctatttagtcatcctgatatgaggagccagtgttgcatgatgaaaagatggtatgattctacatatgtaaaaaaaaaaaaaaaaaaaaaa

SEQ ID NO: 36 - DNA, 1629 bp, Homo sapiens
ggcacgagaagaaaatgatttggatgattctttaagtgtaaaaaatggtgatagtagtaatgactttgtgacttgcaatgatatcaatgaagatgattttggtgattttggtgactttggctctgccagtggctcaactccaccttttgttactggtactcaagattcaatgagtgatgccacttttgaagagtcttcagagcactttccacattttagtgaaccaggtgatgactttggagaatttggggatataaatgctgtttcttgccaagaggagacaatattaacaaagtcagacctaaaacagacttctgataatttatcagaagaatgtcaattggcaagaaaatctagtggaacaggcactgaacctgttgcaaaacttaaaaatgggcaagaaggtgagattggacattttgattctgtgccaaatattcaggatgactgcaatggttttcaagactctgatgattttgcagacttcagttcagctggtcctagccaagttgtagattggaatgcttttgaggatgaacaaaaagatagttgttcttgggctgcttttggagaccagcaggctactgaatctcatcatcgaaaggaagcctggcagtcacataggacagatgaaaatattgatactccaggaacccccaaaacgcacagtgtaccttcagcaacttccaaaggagcagttgctagtggccatttacaggaatcagccacttcagttcagacagctttattaaaccgcctggagcgaattttcgaagcatgttttccttccatacttgtccctgatgctgaagaggaagttacttccctgaagcacttgctggaaacaagcactttgccaataaaaacgagagaggccttacctgaaagtggggaattgctagatgtgtggactgagctacaggatatccatgatgcacatggcttgagataccagtggggcggctcccatagcaacaagaagcttttgtcctccttgggaatagacacccgaaacattctcttcacgggcaataagaagcagcctgttatagtgcccatgtatgcagcaggattgggtatgttagagcccaccaaggaaccactgaaaccactttctgctgcagaaaaaatagcttccatcggtcagacagccaccatgtcaccagatatgaacacatgtacatctgatcagttccaggagtctctaccacccgtccagtttgactggagtagcagtggccttactaaccctttagatggtgtggatccggagttgtatgagttaacaacttctaagctggaaatctccacctcaagcctcaaagtgactgatgcatttgcaagactcatgtctacagtagagaagacaagcacatctaccaggaaaccgaaaagagaagagcacctaagtgaagaagctatcaaggtgatcgctggccttcctgacttaacattcatgcatgccaaggtgttgatgttcccagccacgttaacaccttccacaagctctcaagaaaaagcagacggataactgatgtgaattggacagtttctattgcttttccttttttccatcccttccctaccatcaaaagcatacctgctctaattaaaaaaaaaaaaaaaaaa

SEQ ID NO: 37 - DNA, 1076 bp, Homo sapiens
ggcacgagtcctgaccttgtgatccacccacctcggcctcccgaagtgctgggattgcaggcctgagccaccacgcccagcctattttgtgtttttttaaagctaactaccattaagatcattatagaagtttggtataatgaagatttgggtttttcagtccaatgagtttccatattcttgaatgaaaaagatccacatttcatcatttgcctgtttcattttcttttagtacttttgaacttagtttggtcagaaaatactagaattttagtttgatctaaagaaccagcttatataacttgctgttgccatgtacattgtatgtctttgctgtgtcaaataactggatcgattttagctcttttaagtggtgaaagcaatgcattttattcttcaaattcagacattgaatgtgtataaaatgtgtgtgcttacctttaatcctctccccaccgacaattaggaacacgtttctccaattactgttggcaagactaccaagaaaaattgttgaattagaatcccagcaccgggcacggtggctcacgcctgtgatcctagcactttgggaggccaaagcaggcggatcacctgaggtcaggagttcgagaccagcagggccaacatggcgaaaccccgactctactaaaaatacaaaaattagccaggcatggtggtgggcgcctgtaatcccaactactcaggaggctgaggcaggagaattgcttgaacctgggagttggaggtcacggtgagctgatatcacaccattgcactccagcctgggcaacagagcaagactctgtctcaatcaatctatccatcaatcgataagaaccccagattgtatagctacatgttttagcccccttttcaaagtatatgttctccttggtacttattttgacattctgacttttctacatatgctttatcaacctcttaattaaaccatcattgtctattttgagagataactgcgctgcttcccgttgtgtgttttaaatgttattgttcagtttgagtcaaataaaaggatatttaatctgtgaaaaaaaaaaaaaaaaaaaaaa

SEQ ID NO: 38 - DNA, 1639 bp, Homo sapiens
ggcacgagctgaaaatggatactgctttagtgatgtctgctttattcgtaaaatgcttatttcttttgctagatgtaaagatttggtgttaacaaaagtggttttaatatgtaaatatgaatgaatgcctttagtttaccctgtttgtctattattaatctgttttcatttatccttcatagaggaggatcctttcatgatcttgaatacatttcattagatattgttgcattttaagaatgaaaatacaactgttttctgtcttagattaatcctgctgctatgagaaactgaaaatcaagaatgtgatgcactttttacattactatataccatacatataccataggttgctttgatacctttcctgtagcacagccactaacaagagtgaatgaattataaaattctttttgggagggaatcaatacaagtaactaattcttagctgatattgtcctatgaaggacaataacttaggaatataagaattctgttaatagtacactttttggccttaaatgtcttctactactgaaaatagtttaaatcttagctttgtttctattattccctctctctgcctcagaaagaggaattgggaagaatggtttaaaggacgtggtgtcattgatttgttgctgatcttttagaaaacatttgtctatgtaagctggggacttattttttgtttgtatatagaggggaaatagtgctgccctgaaccaatcagatttagtttaaatcaaatcaatcaaaactccagctgtttctcttgtctttttacttagcaaaggaaaactttagtgaatgctacttgacaagaagaaaagtcatttctcaagcacatacccaaacttgaagtgattgaacccaaaataatgggtgggaaacaccaaatgagtggagaatgagaaagatgtgtgggccaaagctatctggttatattttgatgttgccaatatcgcaaagccaaaattttaatttgcttatttaatatatttgttggccagagatctatttttatatcaatgttgccttgcatgtatattaaaaaaaaaaaattggaaacgcccatgtagtaatgcctgagatagtcgatggttccttaccacctcactaatttttatgcagtatgaaagctcattctattgccccaactggtgctctctgtttaaagttacagatcttgcgaaactggaactattttataagctggggaagtgatttactttttttgttgtatcttttttgttcttagtctgttagtggctgtcctgtagtgggaaatagtaaaaggattcttcactcccttctcccctcagcaccttcttcaagtaaacatttcttgtgtgctttgaaaaaagtttcagcttgctgtctcttttagtgttttaaagaagtgttatacaaagcattgtttgcaaaatatagggagataatgtagtccactttaatttggaattctgtgtgagctatgatccaagttatcagctctttccaactttaaaaattttgttaaaagcaccttgcttagaaaattttaaatatttatgtctgcaacaattgtctcaaaataataaactgtgcaattcttgtcattaaaaaaaaaaaagatctgaaaaaaaaaaaaaaaaaa

SEQ ID NO: 39 - DNA, 726 bp, Homo sapiens
ggcacgagggatgacaaagctcatgaatcggcttttaagaactgtttccatgttggagtatttcatcaaccggagttgggaatggagcacgtacaatacagaaatgctgatgtctgagctgagtcctgaagaccagagagtattcaactttgacgtgcgccagttgaactggttggaatacattgaaaattatgttttgggagttaaaaaatacttattgaaagaggatatggctgggatcccaaaagcaaagcaacgcttaaaaaggctccgaaatattcactacctctttaatactgccctcttccttatcgcctggcgccttctcattgcaagatctcagatggctcggaatgtctggttcttcattgtaagcttctgttataaattcctctcctactttagagcatccagcacgctcaaagtttaagagcatttagccatcgctttttatctggaacctctcagatacctctaaaacagcaaactgtgattctcaagattagaaagtaacaaggaatatgcccaaactgtcaaatgtcacctgttatgtattcgtccctattccttaactatgtatttttatttcagtgagagaaggaaagttgtaaactagcccatagtcacctatattttagggaaaaaaatccaaattgtttcctaacattctattttatgcccttgcgtattaaacgtgaaagtactcccaaaaaaaaaaaaaaaaaa

SEQ ID NO: 40 - DNA, 1331 bp, Homo sapiens
tgccaggaattcccttaaactccacggggctcctttgtatacaacctatatttattcaacctctctcatttccattttgaaaaactggagtagtctgaaactcttttggcttatggtgaccagaaatagtgttctggctggcacctctctaaaagcatcttcttgacgagacataggttgaaatgttaaatgcatctccacttacccacaactctggtgttgtagtaatctgggagcatgcgctcacacaaagccacaagcagccagaaagcttcctcctctttggcataaagcagcagcactgaagtgacaatattcatggcctaaaaaagtgaaagaggatgtcatcaaatacagttgaaaatataagcaattctgttagcatattaaaattactcagttattctcacaagggctggcaaaccttttctgtgaaaagcgagataaatatgtttaggctttggaggctttacacatagtctctgtcatatattcttctgagttttgttttatgaccctgtaaaaacataaaaacctgagtccttgaaccagtaagtgtgcagggtcttccttaacaccaatattcaccagacagagccccgaactcatgctggcaaacccctattccaaaaatttgcccaaaggctatttcacaaagcttttaacctgttaaaatctctcagtgttcttaatccttaattcagtgaggtaaacatttcctttgtaactttccgtaatggtttctataatcaggtacacatggctccaggctctcctgagagaacaacgaaacctttcagacttggagtcctcacccaacatttccatacggagagagatggtagtgataactgagagtgatttaaattctaaagtaactgtagtttattaaaagatattatcagatacctcataaccactctagactcaactactttaatagtcttcttaattaaaaagaggaagatcaaaaggtaaatatgaactttatcatattagaggccaactacctcctgtacttcttttgatctcccagaaaccggtaactgttcatcaggcttctacaattcaatttcaaaaaaggtattttggtttaataggctctttcttgtaagtcttactcattatgttcccaagtgacatcatcatggaaattccacttgagaattaacctgctgatcctagtacatgatgatggtccctgccagttccttagtcatttagcggagataggtttttttaggggtctaccttgtaacaggctctggactaggtattggaggatgggggaggaattcgatatcaagcttatcgataccgtcgacctcgag

SEQ ID NO: 41 - DNA, 592 bp, Homo sapiens
  misc_feature (8)..(8): n equals a,t,g, or c
  misc_feature (451)..(451): n equals a,t,g, or c
tttgcctnctgccatgccttttccctacccgcttcctcagccctcgccacctcccctcttcccacccctgccccaggataccccttttttcccaggccagcccttcccaccccatgaattcttcaactataatccagtggaggacttctcgatgccaccccacttaggatgtggccctggagtgaactttgtgcctggccctctgccacctccaatccctggccctaatccccatggtcagcactggggcccagtggtccaccgggggatgccacgctatgttcctaacagcccctaccatgtgcggagaatgggggggccctgcaggcagcggctcagacactcagagagactgatccacacatacaaactggacagacggcctcctgcccattcggggacatggcctgggtagactggatcttgggctgggactggatgtgccaatggnccttcagggcctgcctggcacctcaggtactgggctagggtgtctgctatgcctggtattgttcttgtccattgctgtcaccaataaaggcatggaagaacagagtgacaaaaaaaaaaaaaaaaaaaaaaaaaactcgag

SEQ ID NO: 42 - DNA, 1219 bp, Homo sapiens
  misc_feature (575)..(575): n equals a,t,g, or c
  misc_feature (582)..(582): n equals a,t,g, or c
  misc_feature (606)..(606): n equals a,t,g, or c
ttttttttttttttttttggacatgtctatggaaggataattccagaagtatcatgcaacggtagccaaggcacaggtcctgtctttaagcagtttatggtatagtggggaaaaggggtggtaaaaacacaaaatacctcccatgcaaatgtcctaactctcttcattaatcaatatctacatgatcccacaggtctacttctttatcttcatctctgcaggactagatatttgatagttactactttcccaatgctaacttcttcatttatcctgtcatattttgtttgtttcagtttttatttttttgtttgtttgtgttctgttttttttagagacagggtctcagtctgtcactcaggctggagtgcactggcacacaaaaagctcagcagcctgggacttctgggcacaaaccctcctcacgcatcaacctccaaagtgggtaggactacaggcatgtgccaccacatctggcaaatttttaaacttttttttttttgcaaagacagggtctcactctgttgcccaagcgagtctggaactcccgggcacaagcaatccacccacctcancctctcnaagtgctgcaatcacaggcattanccaccttgcccagcctgattttgtttttaatatatttcacagtcacattcgctgaaacttacttctcccttattctcttatatttcagtacttttcaacattctgtttggataacgtcacttatctggtgccaaatacttaaatcgtagtctgatctattcccaggaattcagcattaccagtgttctgactcctaaagctacattcttctgcttatctatactcacaaatttcagatctatatcctgttaaatatcacttgcatttttcaaagataccttaagtacaggatatcttaaccagaatcattccaaggaaaatgtgctgctctttccacttttcccaaggttggcaaatggcaccactttttcctcaccctctcgggtaggtatctttggtatctcccactgttctccatagccttatccacatttctgcttagcaaatccctacttttccacccttcaaaccacggctatgattttttgtaacccacactcaagtcctcctctacttcttgtagcatataatcagtctctccatataatgcctctcatgcctttacttttaaacatcaaatctgctcgtgtcgaattctttggatccactagtg

SEQ ID NO: 43 - DNA, 1392 bp, Homo sapiens
  misc_feature (11)..(11): n equals a,t,g, or c
  misc_feature (17)..(17): n equals a,t,g, or c
  misc_feature (26)..(26): n equals a,t,g, or c
  misc_feature (71)..(71): n equals a,t,g, or c
  misc_feature (86)..(86): n equals a,t,g, or c
cttaagaaccncccccnattctttgncccatccagtcttttctaacttggtctggtcttttgtcccatccnttttgaagattttgnccgawttttgamcaaggccaccaacctgcagcaatgamcaaagttccaatgccaaataagtaaagaggggagccaccacgaacccggtgagggcatcgagattttggtttccaacatagcacaagccagtcagttcatctgcatccaccagtctcataatcaagatgacaatggttttcactgcggggatggcccaggctgcaatgtggaaataagagctgtgcatttcaatggcttcatgaccccatttgagtcctgctgccaaaaaccaagtgagtgtcagaataacccaccaaatggagctggccattccaaaaaagtacatcagcaagaaaattattgcacatcctgtgttcttaagtccttcttggatgagaacaggttctgctgcctcttcaaaatcacaggatatcctttcccggcctacagtcagcctgacaataagcaatgctataaatattatagcacatactgagaaatatgatggggcgctcagggtaggaaaacctagaagaatcgatcaggaaggtcagtactgtgaaggcagtggagatgaaacacaggctggcccacacagccatccagatatcagtgaactccttggctgagcggctgtataagccagcatcatagccacacttgagcacacagttcaggctccttttcacccagatgtactgatcagaattggttcccacagagtgacactcttccccaggctggatgggggttttgtgaggtaagggcacctcttcatcacctggcccttccatgcacatgtggttgtggtcgttctgtggtgggaatttgctgcagttcagactctctggccaggcaaatccaaattccttcaggacgggttcacagcgtctcttgactgaaagacacatgccgccgcatgggccaatggggatgttgatcttctctgtgcacattggcacataaacagaacaaaggaagaactggaaaagtaacaaaatgaacacacacaaaaaaaacaatgacttggaagtttgaccaaatgctcccacaaagctgagttgaatgcttccaggcaatctaggtatctacttttaaaccaacctatcgggagtctgtctgtttactctgacctcaaacaagggcgcctgataatccatcacttacatacttttcttagtttggctttagtaatcctttccagaagaatgtacataaataaataaataaaataaatagggtctgaagaattgcataagccctctttgcacaacacttgaaataaatcttaaaaaactgaaaaaaaaaaaaaaaaaaaaactcgtag

SEQ ID NO: 44 - DNA, 813 bp, Homo sapiens
  misc_feature (30)..(30): n equals a,t,g, or c
  misc_feature (54)..(54): n equals a,t,g, or c
  misc_feature (81)..(81): n equals a,t,g, or c
  misc_feature (97)..(97): n equals a,t,g, or c
  misc_feature (807)..(807): n equals a,t,g, or c
tttttaaccccttttagggcttccggggcncggtatggttggtgtgggaatttntggggcgggttaaccaatttcaccccnggraaccagctatggnccatggatttasgccagctcgaaattamccctycactaargggamcaaaagctggagctccaccgcggtggcggccgctctagaactagtggatcccccgggctgcaggaattcggcacgaggtttaggaggaatacaattcaagaacctcactttgaagctaaccatagcaaacctagtttacctctagaatgcaggtgacagtgtgcaaccactcctgtcatctgtcttttgtatgctcttcataagcaatcttcctcttccttcccagttcatttatttagcctctgattcattcttctcttctcccacccctttctcttctaccagccagcctaccaatacttattctctctgaaaggatcttatcctttaccagaagttcagttattacctctaagaaccagtcccttcccttttaaattttcttttccctgaaagagtcagttttatgtattagaaaaatgaaggtatatgttttcctttaaagggattataatcattacagaaaattttaaagttttcaaaaaattaaaaaaaaaacccagaatttcccaaaacctgactatccaaagagaagcacttaatgttatgtgtgtgatcttgagtgaaaatttaaaatttatattagaacattttataaattatccaaactttttgtacgaaaaaaacagaaaatgtaaaaaaaaaaaaaaaaactcgaggggggncccgca

SEQ ID NO: 45 - DNA, 1896 bp, Homo sapiens
  misc_feature (933)..(933): n equals a,t,g, or c
  misc_feature (940)..(940): n equals a,t,g, or c
ggcacaggaccagtggagtgagctgttcatggatgcgctagggcccttcaacttcgtgctggtgagttcggtgaggatgcagggtgtcatcctgctgctgttcgccaagtactaccacctgcccttcctgcgagacgtgcagaccgactgcacgcgcactggcctgggcggctactggggtaacaagggtggcgtgagcgtgcgcctggcggccttcgggcacatgctctgcttcctgaactgccacttgcctgcgcatatggacaaggcggagcagcgcaaagacaacttccagaccatcctcagcctccagcagttccaagggccgggcgcacagggcatcctggatcatgacctcgtgttctggttcggggacctgaacttccgcattgagagctatgacctgcactttgtcaagtttgccatcgacagtgaccagctccatcagctctgggagaaggaccagctcaacatggccaagaacacctggcccattctgaagggctttcaggaggggcccctcaacttcgctcccaccttcaagtttgatgtgggtaccaacaaatacgataccagtgccaagaaacggaagccagcttggacagaccgtatcctatggaaggtcaaggctccaggtgggggtcccagcccctcaggacggaagagccaccgactccaggtgacgcagcacagctaccgcagccacatggaatacacagtcagcgaccacaagcctgtggytgcccagttcctcctgcagtttgcctttcagggacgacatgccactggtgcggctggaggtgggcagatgagtgggtgcggcccgagcaggcggtggtgaggttaccgcwtggaaacaktkttcgsccgcagytcctgggactggatcggcttataccgggtgggtttccgccattgcaaggactatgtggnttatgtntgggccaaacatgaagatgtggatgggaatacataccaggtaacattcagtgaggaatcactgcccaagggccatggagacttcatcctgggctacyatagtcacaaccacagcatcctcatcggcatcactgaacccttccagatctcgctgccttcctcggagttggccagcagcagcacagacagctcaggcaccagctcagagggagaggatgacagcacactggagctccttgcacccaagtcccgcagccccagtcctggcaagtccaagcgacaccgcagccgcagcccgggactggccaggttccctgggcttgccctacggccctcatcccgtgaacgccgtggtgccagccgtagcccctcaccccagagccgccgcctgtcccgagtggctcctgacaggagcagtaatggcagcagccggggcagtagtgaagaggggccctctgggttgcctggcccctgggccttcccaccagctgtgcctcgaagcctgggcctgttgcccgccttgcgcctagagactgtagaccctggtggtggtggctcctggggacctgatcgggaggccctggcgcccaacagcctgtctcctagtccccagggccatcgggggctggaggaagggggcctggggccctgagggtggggtaggcagatgggccaaggtgaccaccattctgcctcaatcttttgcaagcccacctgcctctctcctgctgctcctccagctgtatctgcacctgcctctctgtcctggccaggggtggacaactggggtcccccaaaactcagtcctggcacctcaactgtgacaatcagcaaagccccacccaggcccccatctgggatgatgggagagctctggcagatgtcccaatcctggaggtcatccattaggaattaaattctccagcctcaaaaaaaaaaaaaaaaaaaaaactcgag

SEQ ID NO: 46 - DNA, 1732 bp, Homo sapiens
  misc_feature (6)..(6): n equals a,t,g, or c
  misc_feature (56)..(56): n equals a,t,g, or c
  misc_feature (83)..(83): n equals a,t,g, or c
ttaaantggtttttggggttttattcccaaaggaaaaccttccaccaaaggttacntatttacctaggttcaaaattatattntttaggaaggtgccctggatttttggtcaggagatttcttacmaaccatwttaaaaamcamactttgaaaagtmtcctactaccagaagcacttagactatcacagaaaaatacatgaagagttaatgtctgagataagaccagcagcttatagttataagaaaaacacactgtacaatgtttgggggggaaatctgttgtttatagaaaagctttacctttttcttatttatcctcagataacgttgtgaaatctgctcatcagtaaggatgatatggaaagaattctctttttctatctatggtttatttacatattaaaattttactcagtttattaagtacacatatgataccacactagatgcaaatatatatacaggctatgacagtcaatgttcaatttaatactggtcaataaagtgaatttattcaaatgtaacaacttcacttgaattttttggatcacacatatcctatataaagccatctggtttctaatattatgcacaacacattccattttaattataacattcatctacaagaaaaacaaggaaaacaattcaaaactatgttagtaattagttcttgtttggtccattgtacgcaatcaggraagtataggacttaattagttgctatcaaattgaagcmatgaaaaaggtaaaaatcaagtacttaaaataaaaatatggaaataaccccccctccccaatactwwagggacacwwaacaacaactactgtcccatcaagcaaaagtggaaaacaaacagagcatgtgtgtaacctcacttaccatctttttgttattctacttcaacgggtcaagaaaggtgaagagagagaaggtagaagtaagagtcagaaaaggcctaaataaaatcctcactgaaatgtttaaacatacaagcaatagagacaattaggttgaggtcagatgcagtactactatatttaatggagttaataattagggccaaattaacatggacagttattcctgaatgcaaattaactcattaaacgatttaaatttccatttttcagtctaccacattttagctaacaagacacaaaaagtataagtcaaaatactaagcacaggaattccaaaaagtaagcttctttaattcattactgaacttaagaactttaattaagaaaaataaatgataacagcaaaggtctagctgagtaggcagagtgttagatagctcagggttgtttttccaagctctagtgttcaagttaaatttatttgacacaggtatcttttgctgktttctactcgaagaataatttaacttgataggcttacaagattgcacagagtgaacagaattgagccaatagaatacagaatgacaaaccatacmagcaaatgctgctagggaattccttggcaaaaatgktttattagcatactgacaaatttgatttctatcacttggccttaaacacgaagaaagtgggcatgaagagatgtgtagttatttgtgcctatgttggaaaataaatttatggctatacatgatatttcttcatacctcaaaaattttattgtccagtatataaaaaagccattctttaaaaacctgacactgaataaaaagtatagccttcaacttcattaaaccggcacga

SEQ ID NO: 47 - DNA, 1419 bp, Homo sapiens
aattcggcagagatttaccttagcttactgtaatttttttaacttaataagctttttaacttttttttaaactttctgtctttttaaataacacgtagcttaaaacagcctcataatatggatccactgtagtatatgtggtctgttgtgttgacagaaatgtcattaggtggtgcatgactaattacttttgggcctcagcctcatcttgtactgtttttccccttgctttcctttgctccagttgtgtggggcctccttcattctcctgtgctcaccatattctccaccaggaatcttggcacttgttcttttcctctgcctggaatgcctttctttgttaacagttattcctggtctttagagtttggctcaagcatcacttttaatgaaattttctgtgtgcgtgcttgcacattttcataagataaagagattggactgtactgatattcatcaccgactccaacaagagcgaaactccatctgaaaaaaaaaaaaaaacaaaaaagttacaactttggcaccaactcaggcctaagtgtcatcttccctgaattactcctgtgcttctgcatgcatctatctcttctctattatctctttggatgtctatgtccccttccaaactctactgtattaaatgtcctgttatgatggtcactcacaccctctcaggtgtttaggaagcccaataacatcaattgaggacgtaagtaagagatccagtcctcagcctgtaatcacacctttctgccccctgaaaagatttaccaccataatctgaagcatgtcctcctaaatggacccataactaatcatagttcactcattagctttcatatattggatgtctccagtatcaacaccctcccagataccccatccagtatgtctagttatcgatttgatgccaccacttattggtctctgattcttcatatggccaaaacaaccctctggatatccacagtgaatattatgtcaataccaacgtcatctcagctgaagcagtgtgcatggttacagctgctaagatcaaaaaccttgggctcatgcccgattcctctttcatgctcctatcatccacattagaaaatctagctgtctgcaaggcatggtggctcgtgcctgtaatcccagcacttggggaggcagaggccggcgagtctcctgaggtcgggagtttgagactagcctggccgacatggtgaaaccccgactttactaaaaatagaaaaattagccgagtgtggtggtacatgcctgtgatcccagctactcgggaggctgaggcaggagaatcacttgagcccgggaggtgaaggttgcagtgggctgggattgtgccactagactccaggctggacaagagagtgaaactccgtctcaaaaaaaaaaaaaaaaaaaaaaaaaaaa

SEQ ID NO: 48 - DNA, 992 bp, Homo sapiens
  misc_feature (405)..(405): n equals a,t,g, or c
ggttccagcccaccccatcccacacccacctggctcatgtctctctgacctcagttcccgcctgcacccccagggatgggtgggaagggtctagaaggtatggacctggagtgggtcacttctgggtggtaatctggctagtcagaagcatgagtgatcgaatgaacaagaatgctctgtaaactctgagacctttggaggctgcagagggagaggggagcagaactccagagatctgcatcttgtcagaggagtccatcaagctgatttggggagaagtccccgcactcccccagctccccggctctcccagcagctcatctacctgcccccaccctggggcacctgcaaagctgttaccatggactcggatttggatttcttcgactcctacagcatcactgnctgccgcatcgactgtgagacgcgctactggtggagaactgcaactgccgcatggtgcacatgccaggtcaggcykggggytccgagcatactcctggggtcctgggsctttgctgccyttcactagctccccatccatatcaatctcccttcccatcttctcccagcttacaccttctaggcctttggtactaccaccatcaccagaccccttgaattcccatcctgcatcattgtcttttctcctctgtaggggatgccccatactgtactccagagcagtacaaggagtgtgcagatcctgctctgggtgagcgcccctggcctggggcagtctgggggagggaaaaggtgctgccagccacgtgcgcaggagtttcaggtcacgctcccagaagcctcacataactcctggactgggctgcaccctctcttgtgtctgacattaaagctgagaatggtcagtcatggtggcttacacctgtaatcccagcactttgggaggctgaggtgggcaaattgcttgagcccaggagttcgagaccagcctggtttcatggtgaaaccctgactctatgaaaaaaaaa

SEQ ID NO: 49 - DNA, 1229 bp, Homo sapiens
ggcacgagaaaatacaaaaattatccaggcgaggtggtgcacgtgtgtagtcccagttactcgggaggctgaggtgggaggatggcttgaatctgggaggtgaagattgcagtgagctgagatcacaccactgcattcagtctggataatagaacaagactctatctcaaaaaaaaaattgtatactttattgactcatttatgtctgatgggtatttttgattacaaattgtttagtcactactttaaggcctgctttatttttttcttaattttattgactcatttatgtcttagtcttttttattacaaattatttattgttcagtcactaccttagagcctgttttattttttcttaattttattaaaggatgatattgatgatgaaatgtcttacgatgatcatttagaggtttattttgaacaactggcaattccacgaatgatggaataaaacatatgaagtagaaggactggaacctccagaaaaagtactttaagttacctacaggtgatcctagtcaggtatgaattgataagaaatgcctgcaccttccctccttcctatctttcccttgcctacagaaaattaaaaggcaaaacaatggacatctacatattcttcattcagatcaaccagtggctagcatttgccaccttttgcagtttctttctctttccataagtactttcttctctgaatcatttgaaagcaaatgaaaacagtagcctaaagtgtcagtttcaaccagaaaataacagctctgatttctcatggctcacactcttctgaaacgactcgggtagaggctgaggaaggccgtgttgtttgtctacctgggactagtaagtatagaaatagaattcctttgttcttaaattctacctttgactttacttttaaaatataatttctttggtacgatttagctcatgcctgtaatcctagcattttgggaggccaaagagggagaattgcttgagcccaggagtttgagaccagcctggacatcatagggagactctgcgcacgcacacacacacacacacgcgcacgctaaccgggaatggtggcatgcgactgtggccccagctgcctgggaggctgaggttggaggatcatttggacccaggaggtggagactgcagtgagccatgattgcaccactgcactccagcctgggtgacagagcaagaccctgtttcacaaaaaaaaaaaaaaaaaa

SEQ ID NO: 50 - DNA, 2534 bp, Homo sapiens
  misc_feature (174)..(174): n equals a,t,g, or c
  misc_feature (1350)..(1350): n equals a,t,g, or c
agcaactctatagatcatagaggaaacggtacctgcagtaccggtccggaattcccgggtcgacccacgcgtccggcatgcatgggaatagcggccctggaggatgttagacttgctccctctccaagacagcagcagcctgcacctgccccgtgtgtgtggccggcctcytcntcacccttcccggcccccggccaaggacccaggcgctgcatacaggggaggggcgcacccacagctggggccggttttcctcagctctaggctgttctgtagcttatctgcccctcccccactttcaagacagatgagcaggagcttgggtctctctcggcccctgtctgttcccagcccctgcagattctgagcaaaggccctgggtaagaagggtgggagtggggcctttgccagcagagccagggcagggcgagctgcaggaatcacccctctgcccctgcagctggaatgtgccacagaggccccacctgaagggtgatgtgctggaggggtggcccagagccatactgcgtccaccctgagctcggggacaggtgacagtggctgctctgggaaggggcttttagatgtaacctacaattcagttaggctagagacagatgctggtggaggaagggctgggccaccagggatcacagaccacaggaagatgggaggtggaagcagaggccctgcccccaccccttcctgtctcactcttctgtcttgtccccacccatgcgccttcgtgcctgagaccagggtggccacacaggcagggcctggctccagtctcatcctcccattgcccagtgagccctgctcttctctccccagccccctcccaccgctgcctcgtagagtgacctcggacagagcccccctagcaatacagggaggctcccggggcctggacaggcgggctcggaggctacccgctgtggccggtgccagctgcccttgcagggtgggtgagctctcaggccgagagccttatttacctagtgcaaaaactgtaaaagtgtacagactcttcacagatttttatcttaattgcaagtctgccgattttgtaaatgttcttggtgtttgactgtaatgtaactatctcacctaatggttgtacatatcctttggtcctggtgctgccgagggctggccgggactgctgctctcccaagggttttattttatttctgaatctagagaacagtattgggcaggaggaaaaggcttggtgtctgcggggggtgtcttccctgcctgtggcatttgtgtgttggctttgcagctgctgtctgagtagtggccactggggtgccttcactgggccagtcaacggggggctcctgnccaggccacagagaacctgagttcccgggagctgggccctgcctgcagccagggctggggttgccagaggccctggagggaaggacagtccctgctggggaagaacagccccggggccccctggtcaccgagactcagcctctgctggagaaagccacgccctccctgctagcacagaggcctgactgacttttttgcttaacttccatgttctgggtgatggaaactgccaaacctcctgtcagtgaggactctttccgactgcccagaaagtgggggtggaggaccgaggctacagctccacacgccccggtcccccagagcatctgccccaggtacacctccccctgcgccccgcacgactgcgggagccagactgtccagggaaacagcctctctcttttctacacactcagccacaaagccccccagctcccacaccgcgtcccagctcccctcttttgtaagtatgtgaaaaggaaaaaatgcaaacgttggagtttgggctggagctcctccctccagctgcgacttttaactatgtaataatgtacagaggaagctgttggtgttctaagactctgtgtggctgtgcaatttctgtacatttgcaattagaaatattaaagatttatttagctattttaaaaaaaaaaaaaaaaaaaaaaactcgagggggggcccggtacccaattcgccctatagtgagtcgtattacaattcactggccgtcgttttacaacgtcgtgactgggaaaaccctggcgttacccaacttaatcgccttgcagcacatccccctttcgccagctggcgtaatagcgaagaggcccgcaccgatcgcccttcccaacagttgcgcagcctgaatggcgaatggcaaattgtaagcgttaatattttgttaaaattcgcgttaaatttttgttaaatcagctcattttttaaccaataggccgaaatcggcaaaatcccttataaatcaaaagaatagaccgagatagggttgagtgttgttccagtttggaacaagagtccactattaaagaacgtggactccaacgtcaaagggcgaaaaaccgtctatcagggcgatggcccactacgtgaaccatcaccctaatcaagktttttggggtcgaggtgccgtaaagcactaaatcggaccctaaaggagcccccga

SEQ ID NO: 51 - DNA, 1434 bp, Homo sapiens
ccacgcgtccggggagattgagttagagttgtgatgtttgggctagaggatgacaagatgagctgctttgtcggttccagatatctccagcccagcagagatggccctctgcagtctagccgtattttgcccttccaccattcttggctgtgacctggtccagctgggccctgaatgaatgtttgcttctcaggccagtattctcccctcctcaccaagccacctccacacagctctaaggaagctcccccaggtccaggcctcaggggagccctgccctcaggccgaccctactgccttttcagagccctccctgccctcctcggaagttgctgatgaacctcctaccctcaccaaggaagaaccagttccactagagacacaggtcgttgaggaagaggaagactcaggtgccccgcccctgaagcgcttctgtgtggaccaacccacagtgccgcagacggcgtcagaaagctagcaccatcccggccctccgcctcctggccctgcctctatttattgcattctggttctggccgcgccgcgttgctggggtaagggcaagcactggggtcaagagcctgcacacatgagccttccgggctggaaggctggcgtaggacttggggctgtagcatcatcttcctgaccctggcacctgtgtctacttgctcccgagaagaggagcgctcatgtcttttttgcaccccaagttggctggagcatcggccaccccaagattcatctgtgacctccaggcagcagtctctgctccagaatctctggacggagctgctggcagcttctgcgagaagagagagatgtggaaggcaccttttagaagagagcgtgcctcaggttactgaacttgaacggagactgtagactcccggactttcccctaggactgggggccctgtaggctgctgttggaggactgggtagagacattggagggaagggaagggcttttctccacacaagggcagagagtccgtctagatttcttgctgtcctgccagctctgcccatgcctgaggtggtcctacctctcacgggcaccctagctgctgacagccctttgtggccgccgtccccatcccctgccctcagcacacacatctgcacacacgcagctttgttctcacctctacctgtcattccagcatccctgcctcttgtcacaaactgccccagcaagaatttgaggttctgacaacagtacccatcccccacagtaccccttcagctcagtttctagaaagctcccttttctttgaaatctgcatgttgaattgaactttgtgattttattttttgtttcaaaaaagtttaagaaaatggaaatgggcaacagtgagtgaagacatattttagcactgaatagaatatttttaaaattaaactatttgaaatatgaaaaaaaaaaaaaaa

SEQ ID NO: 52 - DNA, 1359 bp, Homo sapiens
  misc_feature (1005)..(1005): n equals a,t,g, or c
  misc_feature (1128)..(1128): n equals a,t,g, or c
  misc_feature (1342)..(1344): n equals a,t,g, or c
tcacgcgtccggggctgcagtaggtcccggcaaccgcaggctcgcggcgggcgctgggcgcgggatccgactctagtcgtaatggaggcgggcggctttctggactcgctcatttacggagcatgcgtggtcttcacccttggcatgttctccgccggcctctcggacctcaggcacatgcgaatgacccggagtgtggacaacgtccagttcctgccctttctcaccacggaagtcaacaacctgggctggctgagttatggggctttgaagggagacgggatcctcatcgtcgtcaacacagtgggtgctgcgcttcagaccctgtatatcttggcatatctgcattactgccctcggaagcgtgttgtgctcctacagactgcaaccctgctaggggtccttctcctgggttatggctacttttggctcctggtacccaaccctgaggcccggcttcagcagttgggcctcttctgcagtgtcttcaccatcagcatgtacctctcaccactggctgacttggctaaggtgattcaaactaaatcaacccaatgtctctcctacccactcaccattgctacccttctcacctctgcctcctggtgcctctatgggtttcgactcagagatccctatatcatggtgtccaactttccaggaatcgtcaccagctttatccgcttctggcttttctggaagtacccccaggagcaagacaggaactactggctcctgcaaacctgaggctgctcatctgaccactgggcaccttagtgccaacctgaaccaaagagacctccttgtttcagctgggcctgctgtccagcttcccaggtgcagtgggttgtgggaacaagagatgactttgaggataaaaggaccaaagaaaaagctttacttagatgattgattggggcctaggagatgaaatcactttttattttttagagatttttttttttaattttggaggttggggtgcaatctttagaatatgccttnaaaggccgggcgcggtgctcacgcctgtaatcccagcactttgggaggccaaggtgggcggatcgcctgaggtcaggagttcaagaccaacctgactaacatggtgaaaccccatctctactnaaaatacaaaattagccaggcatgatggcacatgcctgtaatcccagatacttgggaggctgaggcaggagaattgcttgaacccaggaggtggaggttgcagtgagctgagatcgtgccattgtgatatgaatatgccttatatgctgatatgaatatgccttaaaataaagtgttccccacccctgaaaaaaaaaaaaaaaaaaaaaaaaannnaaaaagggcggccgc

SEQ ID NO: 53 - DNA, 2253 bp, Homo sapiens
  misc_feature (28)..(28): n equals a,t,g, or c
  misc_feature (100)..(100): n equals a,t,g, or c
atctgtgtgcagcaaccagaaagggatnaacttggccctcttgcgggcgtggacaaggtctcttccttaccctttctgttgccagtcagcaacctgtaantcacattctcttcccagtgaatccctgggagcgcctgaccctggtgggctgttcagcttcctgctgctggggccagcaatttttgaggatttatctttaggccaggcttgctccgtacttatccctgctctcccatttctctcttgtttgagagagaatgaggaagcaaagagtgagaaagaataggggctgaagacgccactcccagatggctctttctatcctgctcttctgttgaaacacacgtgctgtgggcctcaggcgtttctgaagtgctctttcttggattggacaggagatcagcagcgtgcacatctgctgtggtctgaagtggtttgcaggtcagcctcctctccctagtgtagagcaagccagtgtccttcgaggaacccacccggctggccgggaagttttacagcaaggcgcctgccttgggataattccttggtgaaattcaccttccccccgcctctgtctggagccccatcctgtgttatctgtggtttttggacccctaatgtcagcttggctgtaggactccccgaggtttggtatgtgctagaacaatgggaggctgtgatttgctgtgtaagctcacatccagccttggaatctaacgggcattcacaacccgagttaccactttccactccctgcttaggattctgttccctgggctgaaactgaaataagctaattttttgggtcayggtggcagtaggggaacctaggagggtgtgagtggcatttgtcagggatttagcccatgacgtgtttcttgaaccctactttctggaagtggagttgactctggaagttttctagcaactgaacaaaagctcaggtttgtcctggtcatgcacatgccttaagccagttccgtcttccctagaccttggcatcctgtgcttctatttcttggaatacgttctcctctgacctgcctgtaccacgtgggtcctcttcaagtactgttttgaagctgggctcttttgtgtagctcccacccacctgtagggctagctcggcttaagggaactctccccattggcaaaccggacccggccgccgccaggactgtgtttccaaaggttccccgcccccaaccccagcatcagcctgtagctcccctgctgaggcagtgtggttatgttcccagcagtgggggtcagacgcccttcctcagaactttctagttgccctctacctgactcctgacttgtattccttttagcagtagccttcttccctcggggagccaaagagtgtggtgtgtggcgctatattgtggctgctatttcatctggtttcttttaatgtgaggaactcacatactgacttcagtgggactcggtgagccggggccgtctgtgtggtgggaccccctttagcgggactcagtgagctggggccgtctgtgtggtggagccagggcctctccctttagtggagccaggttgtcgggccccgaatgtcactggtggatctaagaagggctgagtggtctgacaccaaaacatgccgcagggagggctgtggtgccggtgcttccaacaaggacagccctccttgaccctgaaaggaacactggcttgaaggactgcagacaggctctgaggggcacgccctcctcagcgagaggcagcaaggtggccacagtgtcactggtcaggtgcttctcaccacgggaaagccgccgacctgtgactcgcttgagatgggaaagcggcgccacagaccccgggtctccttggctgtctgtgggccgcccctggccaccttgtcctggctcgcagggtgcaggagcgcctcgttctctgggtggccggcttgctgctccggtttgggctgtcttaccataamaccgtcccagggctctgcaggccactgtgaacgctggctccctgggcagtgctcctccgtgtggactgtgcctcaggccagggctcaccagctggggtcctgtccggaaggatgggatctttctgggactgcgccggacagagtggggagctcctagtttgtggggggaagctttgatatccatgccacgtccatccaccccaccccttttcgtcacgagcacaatggtcttacattggatttttgtaaaaaaataaaaataaatggagactttaactcaaaaaaaaaaa

SEQ ID NO: 54 - DNA, 746 bp, Homo sapiens
  misc_feature (662)..(662): n equals a,t,g, or c
  misc_feature (672)..(672): n equals a,t,g, or c
gttaagactcttttgattcctgatttagaatgtataataggtgctttataattgattawgtccccagtragactcttaagcttttttgagtacaagaacaatgccttatatgtattcatcgcccctgccaatattttacacatagtargtcttgtcctagargcagaaccaatttggacagcagttttamcaattcagacaccctgtaacatgttgcttctgtaacaatccatggctttggacttaagcccagtgaaagcacattagtggttatgagtttctccctgtaaggtttttcctctttgtctcctttctattttttggtacgtgagcagcctctgtctctctgtagggaagcaacagacagcttcagtgagtacaaatgttatattcacatgtggaacatagccccagagataatcatatgtaccagtgatccgtcagtagatgctattacccgtgtggttcttttatcaaaggaattaagttctcttgatgtgttaataaacagtacttttttggccagctctggagtggatgaataggtgtttggatgtctgtctagattgacagctttagattgcttttttcctgaaatctggtgattccagatttacagtgaattttctcttaagttgtgttttcaagtgatcacaccgaantggtgggcancaattctttcttttaccaaaaaaaaaaaaaaaaaactcgagggggggcccggaacccaattcggcctatagtga

SEQ ID NO: 55 - DNA, 1728 bp, Homo sapiens
  misc_feature (165)..(165): n equals a,t,g, or c
  misc_feature (167)..(167): n equals a,t,g, or c
  misc_feature (198)..(198): n equals a,t,g, or c
gcggagatcgaaccctctcctccgaacccctcctttcgccttccccgcctcctcccctccgcctcgagcaccgcgcgcgcgcattcggtcccagccaccgctaacactacaggctgcttacccccgccccctccaccctacccctggcggcctcaggcgacgccnantgaggctgaggctgggggcgaatcgccgcanagctgggtgtcggcggcgcattctgattggacagcggggaagcccgtcagcctgttggccccgctgatcccgccccgtagcgcagggcagcctttaacctttagccccagtgggcgccagccactcagatcgcttcttgttggtatgtgtagcggcagtggccgccggcggagcagtctgagcccgacgatgaggccggggacgggagctgagcgtggaggcctcatgatggggcaccctggcatgcattatgccccaatgggaatgcaccctatgggtcagagagcgaatatgcctcctgtacctcatggaatgatgccgcagatgatgccccctatgggagggccaccaatgggacaaatgcctggaatgatgtcgtcagtaatgcctggaatgatgatgtctcatatgtctcaggcttccatgcagcctgccttaccgccaggagtaaatagtatggatgtagcagcaggtacagcatctggtgcaaaatcaatgtggactgaacataaatcacctgatggaaggacttactactacaacactgaaaccaaacagtctacctgggagaaaccagatgatcttaaaacacctgctgagcaactcttatctaaatgcccctggaaggaatacaaatcagattctggaaagccttactattataattctcaaacaaaagaatctcgctgggccaaacctaaagaacttgaggatcttgaaggataccagaataccattgttgctggaagtcttattacaaaatcaaacctgcatgcaatgatcaaagctgaagaaagcagtaagcaagaagagtgcaccacaacatcaacagccccagtccctacaacagaaattccgaccacaatgagcaccatggctgctgccgaagcagcagctgctgttgttgcagcagcagcagcggcagcagcagcagcagctgcagccaatgctaatgcttccacttctgcttctaatactgtcagtggaactgttccagttgttcctgagcctgaagttacttccattgttgctactgttgtagataatgagaatacagtaactatttcaactgaggaacaagcacaacttactagtacccctgctattcaggatcaaagtgtggaagtatccagtaatactggagaagaaacatctaagcaagaaactgtagctgattttactcccaaaaaagaagaggaggagagccaaccagcaaagaaaacatacacttggaatacaaaggaagaggcaaagcaagcttttaaagaattattgaaagaaaagcgggtaccatcgaatgcttcatgggagcaggctatgaaaatgattattaatgatccacgatacagtgctttggcaaagttaagtgaaaaaaagcaagcctttaatgcctataaagtccagacagaaaaaraaraaaaagaagaagcaagatcaaagtacaaagaggctaaggaatcctttcagcgttttcttgaaaatcatgagaaaatgacttctacaaccagatacaagtaagatgtttagtgt

SEQ ID NO: 56 - DNA, 1796 bp, Homo sapiens
aggggcaaacctaacctgggatctgacgggatgcgttttgccagctcagatctcctctgctactggaaacttgcattatttacagccattaggagctccctggcttccattccactcatgactagctttacctctttgaccccactgtattattgtctagcccagttcagctgaatctttcaacacaaaatatacagggaaccccttcctggggaacttcctttgttattgaggtcttcgctgatggcttcttccatttgatactcagtctcagtcacagtaggattacggaatcttttgccagagtatcaatctacatgggtgctacacattactgaaaaaaattaggaacatggtgctagttaattcaagtcttcatgtaaaacttcttctatcatagtggacattaaaaaaaatctctctgcaaagtgcattgaccctacctctagtagatgaatgttgaacaagtagcctatctaggaagcaagtgactagcatccatgggcatcccacaggttgtagtccagccccgatcttggtggttgggattgatgttgctgccaagtccctccgtttcatgttcaggctctgcctatgttcctggtgtctggtacctgatttttcaggatgctgacatttacttcttgcccacaacaccatataccctaagtcttgccaacatctttgaatgtcttctgctggtctgtctctcctccgttgttcttttactatgtcccaagtgcatgctttgttcagtatctgcctaagtctcaggatamtgattttagctttttactaggtcctgacattcccgtagtttcctcttacctttctggacatgccagacaaactctgaccttaggttctgtgaaaactggtacctgcagaattcctcagtgtttgtttatatgaaagttcattgtgcctcttgattgtgggtgagttgaggaaaagaggtaaagcagtgggcagaggttgcaacatttatttggttataggacacctttgctactggagcatcttgtagggtaatgtagttcagaacatgcatggagaaatgctgccatagagtagtagtgacatttgggacttgaaaaaaatcttaagagcaggtataattccctcaacaacagaagaacatcagtgctttagaatgtttgattttgaactttcttgatgttttctctgccgttctgtagtgttattctaattaaaatctttcctctaaactctgctcttttttttccaattgagcaaattcggcatttattgaggccctactacatgtcatatgctgttctatttgctggaaacacaaatgtgaatatggtaggcctgcccttaaacaatgaattacagtgtaaaatgaaccttttataaagctggtcctatatcaatctaattattttgtttttcttcatttcaggcctaagacagctttattttctttccactccaaataatgaagaatccccttagggcaaagaaggaatttctgagcatgttataaaaaaatagaaaataggataagttgcgtgaagatttaatatttctatacatcaaaacctaccataaacaaaattaaaaggcaaatagtaaacttggaagaacatttgtaacataaaagacaaaagtttaatatcataataaaataagcacatagtagcttttagtaaatcattgctgaatgaatgaatacatatatgaattcaaagcaatgaaaaaatcaccccaggaaaagatgtaaacatttgacataggacaagtcaccaaaaaaaaaaaaaaaaaaactcgta

SEQ ID NO: 57 - DNA, 2166 bp, Homo sapiens
  misc_feature (20)..(20): n equals a,t,g, or c
  misc_feature (2164)..(2164): n equals a,t,g, or c
ttggcacatacattacctgntttctcatcaattgctaaaycatcaaacatttattgagcatctcctctatgtagggtataagtaatgctgaggtagtactcgtgacttacagtggtaaaagacttaagttttaggccgtgagccactgcgtctggccagaaatctcttaaccatgggagttaagtctcaaaattctggtgatacaagtggttgaaacttaaaactgtatttaaaaaataggattcgtgaatttgagatagttcataagtctgcaaaaggctgtataaatacatattttacatttactattattaattttgtagtaaatttgagtacagcactctctttatctgtggaaacttcagactctcccctattactttaatttcagtgagacattattaaatataagtgggcttacacatttgttttgctttactgacaaataatacacaacttggaggcttttttttcctttctattcttcctctaaatgttcaacacttttctgattttgtgatttgaggttgtttaatagcttcctgaggctccattgagaccgtatatacgtgacacttaacagtctagccttcctcggtacatatagatatatgatggtggctttgcctgtagtaaattcatgccaaaacataggctttcagtgcctattacatatggctttcagctctctctactgagggatgtaggagtttatttctgaggtctgagcctcttttcctttacttcctttactctttcctaagccttctttataaaaactatgcatgttctattgttttcctttttgattccctttcttttattatccccagtaggagtgacttgtaattctcatatgttagaaaggcagrtctcctggttgaagaaaagatccacccaagcaagtcagcatgtttaataatttttgagggggatctcaaatgtgggaaggattgttatataagacaaccaaatgatgacatgagacaataaatgctataggaattatggaggaataattagctatttattttcttggttagggaagagatattattagttgtagaagtaattactaacttctacattttttattgtggaaatcaaaaatatatatatgaaaataaaatgttataattgacttcagtgtcccataaaccagcttcaacaattaccaaattgtgaccaatctttacacacatgcacaggtgtccctcagtatctgtggggcattggttctaggaccacttatggataccaacatctatggatgctcaagtccctgatataaaatggtggactatttgcatataacctgtgtacatcccgtattatttaaatcatccctagatcacttataatacgtaatacaatgtaaatgccatgtaaataactgttatactgtattaaggaataacaacaagaaaaatgtacatgttcagtacagacgcaattttttttgtgtgtggaatattttcattccaaggtcagttgaacccatggacataggaggctgactgcgtgtgtgtgtgtgtgtgtgtgtgtgtgtgtgtgtgtgtgtgcatacagacacacatatttctgaaatgtaaatattctctttttaaaaaaattattatcacagctaaacaaattaccagtaattcttttatcctcatatacccggtgttcagattttctagattggctcctaatttttttacagattatttgaatctgattcaattcatgtactgtaatgtttgataacttaagtaccctttataggttctcttttacctcttctttattaaattccttgtaatttgttgtactaaatagattgtcttctagaatttcctgtagtctgaattatgtagtattgtttcacatgttccagtgtcctcttatttcctgtgagttggtagttagatctagaagcttgattaaattcagattttctctctttagatcatcaactttagatcatcaacttggatcatttgtttcattttgcttttgatatgttgttttttagaattacctcttaaaattttgatttaattttataatcatgtaaaatgtttataaatttccaaattcagatcagcaaaacacaataaaatctattcagagaaggcaaaaaaaaaaaaaaaaaaaaaaaaaaaaaaaaaaaaaaaaaaanaa

SEQ ID NO: 58 - DNA, 530 bp, Homo sapiens
  misc_feature (308)..(308): n equals a,t,g, or c
tcggcagagctcccctgcggttggaagtgttcatgcaaattccagatctgtcctggcccagcttggaggtgggccttcctgactgggccatcccttgcgagcgttctcagcccacactggctccctctgcgcaggcccctacttgtgaaggagctgagccgcactcggtgggctgtcctggggcacccatgttgtgtgttttggttttgtttattttgtatctgcctggtttttccaagtctaatcaggatgtcccctggggtgacattctttgctgagagaagggcacatgcctcggttccctgggnctgtagaaagccagtgctcagccttgctttctgccgcagacttggtgcccggagactcgctatcaaagtgcagtggagataatgtccaatgggaggctgaggcaggagaatggcatgaggcagagcttgcagtgagccaagatcgcaccaccgtactccagcctgggcaacagagcgaggctctgtctcaaaaaaaagaaaaaaaaaaaaaaaaaactcgag

SEQ ID NO: 59 - DNA, 1143 bp, Homo sapiens
  misc_feature (1109)..(1109): n equals a,t,g, or c
tcgacccacgcgtccgagccgagactgcgaaggagaacgcagcaagcccaggcggcggtggaaaggctggaggacacacctaaacatgtggaatcccaatgccgggcagccagggccaaatccatatccccccaatattgggtgccctggaggttccaatcctgcccacccaccacctattaatccaccctttcccccaggcccctgtcctcctcccccaggagctccccatggcaatccagctttccccccaggtgggccccctcatcctgtgccacagccagggtatccaggatgccaaccgttgggtccctaccctcctccatacccaccgcctgcccctggaatccctcctgtgaatcccttggctcctggcatggttggaccagcagtgatagtagacaagaagatgcagaagaaaatgaagaaagctcataaaaagatgcacaagcaccaaaagcaccacaagtaccacaagcatggcaagcattcctcctcttcctcctcctcttccagcagtgattctgactgaatacaggccctggacccttccctcaagtctcaccagttctgctctcccatcaagcttcagatgccatgttgtactgggggaatgtagcccttgtgctccccaccccctacctscacctgagcctcaccctgctgttgagccctgagtggctaggggaaatgggaagaggattgccatggcctggccatcttgttgctgcttggttagatcatatagctaatgaattaggcaggggagctattttttgaagatgatgaactaaatgttgaagacaagtttgagatctgtaaaatgtgattttttacttccacttataatacttgtgattggggaggtttgtggaaattcaattatgatgaaaaacctatcttttttgtaatgttggcatacttggggaatttagtggcaaatacattccccagcaggccttttgttggttgcactaactgcaaggttgctgggaagtagagtccatttggttgatgagctttgactgcggttttggaaccttacctctcctccttagcccaatatgctgtcttgggtcctattcaaataaagttatttctcctggtcnaaaaaaacggcacgagcggcacgagctacgtggg

SEQ ID NO: 60 - DNA, 402 bp, Homo sapiens
  misc_feature (373)..(373): n equals a,t,g, or c
  misc_feature (397)..(397): n equals a,t,g, or c
gcccccgggtctgcagtaattcggcactagcacagcctctgcatgggcccagagccgggmcccccccagcccagccccgccctccccagactccgcgcaatcacatactgtatatagacgtgaatcgattttatttttattctttaaattaaggtcgtgataaagtgttgccaaagatacctgctgaattctcgcgtttcaggaaacaaacaaacaaaaaaaaatgatatttgaggagggtcgtgttgactccatatgaaaggacacagctcaaagcttttttgtttggttgtttggggttttttgtgttttctttttttggggtgttttttttttaactgcctggtacaaaaaaaaaaagagaaaaaaaacncggggggggccccggaaccaaatnccccc

SEQ ID NO: 61 - DNA, 471 bp, Homo sapiens
ggcacgagccagcacccacttcccacaggccttccctcctcccctgcctgctgacccggcagctcccgacagcacggccttgtttcccagggaacaatgcatctgtgtcacggacaacaatgtcctttcatgtcaggcgcactggccccggtgcacgccgggacgtggcacaaagggtgctttgtgcagctcagggatgtgagttcctggctttgccatgttggtgctgccgacccggggcctctgtccttgggtcccagttatgcaacagtcagtcgaggctgtggggctggcccaggggctttatctgtctccctctccaacttttgccaagttacccttctgggcttccgccagccaggagcccacactccctcagccctcccacacgctcctctcaactcctagctgggcttcgctgacttgaacctggccgagtttgcgggctcggggctccaaggtgcgctgctg

SEQ ID NO: 62 - DNA, 1550 bp, Homo sapiens
ccgggctaggagacctgttctgatgatgtgtgtggtcctcaccacactgccctgcctcaccttttccatagcagtgactgaggttcaaaagagcattaatgggtccgctgatgtcttacctgatatgttacctgacctgcccgtatctctggttctgttatccctgatcatggttgatattattgaaaaactcaggatatatcctcttagagggagtcaaaagagtaagtgttcttttaaatgtgaatattttttaaagtttgatatatttttcacatttctgccactgtgttatctgacaacatgtttaatgataccttttcttagggctaacattactgatagaagattgcaaatgaagatatctaaacataattatttttaaacctaccttgatagctagatagctgcttttgtttgctattcgcattttagtagtactgataaattaaaaattatcaaatagttaataccaaaaaccttaatgtttattccagcaagaaattatccaagtaaattattatagatgtatatttttctaggaagtctcttaaagcttatgtttaaatggattaataaaaagcttagtttggagacttttactacaggaattaatatgactgtggtagttgtgtcctagataatcatgtgtttaattgtgaattataaaaatgccaaagatcacactaataaaaccaagatatggctgggtgcagtggctcacacctgtaatcccagcatttttggaggccaggatgggaagatggcatgagctcaggagtttgagaccagcctgagcaacatagcaagacaccatccctataaaaaaataaaatttaaagaaaactcaacaagatgtgtcacatctcctccaaagtgatgagttgaaactaaatacagattggcccttacaaaaagatattttgttaatggaatattttatttatttagtcgtaaattactccagcctgggtgatagaacatacctctgtctcaaaaaaaaaaaaaaaaaaggaaagaaaatttgcatgcgtgtgtgtgttgaatgtgtgtgtttgggagaagggagagcttcatcatgatcaacaatatttttgtgtgtttaagagtggtgttttatgtgagatttcatttgggggaaaaaaaagcttcctctgctaaatgtttaaaaatcattaacctagggcttcattcagcattgtaaccgcacctgtttctaggacactaccatttctatgaagagatagataggttgccaactctctctccaggcccagctccctggcaatcatgactgcaccacctagaggcaaagtgagcccccatctaaggtcttgtgactactgctgctgctctgggcagtttcagctttgtaggcagagtgacccgtcttggtggggtacaaactggcttgaggctcaacacctttgaaaaacagataaaccttttaacatgccatgttgaattttttctttccaatgttgcatttttccaaaagaacacatactcatttaaaaaagttataaaatagagataaaaaaaaaaaaaaa

SEQ ID NO: 63 - DNA, 2625 bp, Homo sapiens
  misc_feature (780)..(780): n equals a,t,g, or c
  misc_feature (1594)..(1594): n equals a,t,g, or c
cccacgcgtccggtaagatgagttagggtgacttgctaatagacattgtaaatcttaatatttatgtatgtattttattattaccggttttccatttatgatggtaatattgtttcttctaagaatatttatttttccttctaaatattgagataaaattcatgcttttgaaatgttctattcagtggcttttagtatatttgctatgttgtgcaaccatcgacactatccatttctagaactttttcgtcatcccaaacagacgctctgtattcataaaaaaataacttcctacctgtctctccccctagtctttggtaacctttgttatactggtaaactttgttgtgctctctgtctgtgtgaatttgcctattctaggggcctcatataagtgtaatcatacagtatttgtctttttgggtctgtctgatttcacttagcgggttttcaggggttcattcatgttgcagcatataacagtactgcgttcctttttctgggctgaataatattccactgtatggatagaccccattttgtttattcacacatcatttggacatttggaataattctggtttttggctattatgaacaatggtgctatgaacagttgcgtacaagtttttgtgtgaacatatgttttcaattctctcattatatacctaggagtagaattactggggtcatatgggaactggtatatttttggagggactgccaaactattttcccacggtccatgcaccatttcacattcccaccagtaagtaaganggttccaatttctgccattcttgccaacactagttattatctgactttctggttataatcattctaatgagtgtgaagtagcctctggtgtcatttggatttgcatttctctgatgaatgatgctatcaagcacctttgctggtgctgttggccatatgtgtatgttccctggaaaagtgtctgtgctgagccttggcccactttttaattaggcgtttgtctttttattactgagttgtaagagttctttatatattctggattctagacccttatcagatacatggtttgcaaatattttctcccattctgtgggttgtgttttcactttatcgataatgtccttagacatataataaatttgtattttaaaagtgacttgatttggctgtgcaaggtggctcacgcttgtaatcccagcactttgggagactgaggtgggtggatcatatgaggaggctaggagttcgaggtcagcctggccagcatagcgaaaacttgtctctactaaaaatacaaaaattagtcaggcatggtggtgcacgtctgtaataccagcttctcaggaggctgaggcacgaggatcacttgaacccaggaggaggaggttgcagtgagctgagatcatgccagggcaacagaatgagactttggttaaaaaaaaaaaaaagtgacttgatttaagggaaaaaatgactggctatattcagtcagatatggcaaaaagtctcaaggtggtaatgtgaatgattaaggtcttggggggggtgtcccctatcagactacaggtggttaaaggcacagaaaaaggtncagttgggttcttaatgtgaaatgatgagaagcacaactccagtgtgtctctttgtgtagaatgtcagcagacaccccctgctagatgtgctggatcatgggaaagcatttccatttgttactagattgttcagaagttttaatttatgatgggtgtggtggctcatgcctgtagtcccagcactgtgggaggctgaggcaggaggatcatctgaggccaagagttcaagatcagcctgggcaacatagtgataccctatctcttaaaaaagaagaagtttttaaatttgaaataataataggtactggatttatgcaaatgtcttttctgcgtcttttgagatgagtatcaggtttttttttttccttttatcatctgatgatgaacttaatgtttccatttgtattaatggaatactaagtccctctgtgatttctgaaccaagctattcctaggcctgagttttattttgttgacacagaaataaattagaagsccaagcgtggtggcatgtgcctgtagtcctagttgctgaggtaagaggattgcttgagcccaggagttcaaggctgcagcaagctttgattgcgcccactgcactccagccttggcgacagactaagacgctgtctcaaaaaaaaacaaaaacgacaaaaaaaaaacaaaacagaaaaaataaactaaggcaatgacagtccctggcaaatgctgggagggaggcagcagtggtcagggaaggtaaccctgaagcaggacttgtaaagcaaataagattgggaggccaaggtgggtggatcacgaggtcaggagttcgagaccagcctggccaacatagtgaaaccccgtctttactaaaaatacaaaaaaattagccaggtgtggtggtgggtgcctgtagtcccagctacttgggaggctgaggcaggagaatctcgaacccaggaggcggaggttacagtcagctgagaccgcaccattgcactccagcctgggtgacagagcaagattccgtctcaaaaaaaaaaaaaaa

SEQ ID NO: 64 - DNA, 2196 bp, Homo sapiens
  misc_feature (1921)..(1921): n equals a,t,g, or c
ggcacgagctgagtttgtggctgcatttttatctctggtggctctgctacggcggcgcagaaatgaggcagaagcggaaaggagatctcagccctgctgagctgatgatgctgactataggagatgttattaaacaactgattgaagcccacgagcaggggaaagacatcgatctaaataaggtgaaaaccaagacagctgccaaatatggcctttctgcccagccccgcctggtggatatcattgctgccgtccctcctcagtatcgcaaggtcttgatgcccaagttaaaggcgaaacccatcagaactgctagtgggattgctgtcgtggctgtgatgtgcaaaccccacagatgtccacacatcagttttacaggaaatatatgtgtatactgccctggtggacctgattctgattttgagtattccacccagtcttacactggctatgagccaacctccatgagagctatccgtgccagatatgaccctttcctacagacaagacaccgawtagaacagttaaaacaacttggtcatagtgtggataaagtggagtttattgtgatgggtggaacgtttatggcccttccagaagaatacagagattattttattcgaaatttacatgatgccttatcaggacatacttccaacaatatttacgaggcagtcaagtattctgagagaagcctcacaaagtgtattggaattactattgaaaccagaccagattactgcatgaagcgacatttaagtgacatgttgacctatggctgcacaaggctggagattggggtgcagagtgtttatgaagatgtggytagagacaccaacaggggccacactgtgaaggcagtgtgtgagtcatttcacctggccaaagattccggttttaaagtggtggcccatatgatgcctgacctgccaaacgtgggactagaaagagacattgaacagttcacagagttttttgagaaccctgcttttcgtcccgatgggctgaaactctatcctaccctggtgattcgtgggaccgggctttatgagctttggaaatcaggaagatataagagttactctcctagtgacctggttgaattggtggctcggatcctagccctcgtgcctccatggactcgagtgtaccgagtacagagggatattccaatgcctttagttagctcaggagtagagcatggtaacctgagagagctggcacttgcaagaatgaaagacctcggaatacagtgtcgagatgtgagaaccagagaagttggaatccaagaaattcatcacaaagtacggccataccaggttgaattggtaaggagagattatgttgcaaatggtggctgggaaacattcttgtcatacgaagacccagatcaagacattttgattggcctcctacgattacgcaagtgttcagaagaaactttccgtttcgaattgggtggaggtgtctccatagtacgagagctgcatgtgtatgggagtgtggtccctgtgagcagccgggatcctactaaatttcagcatcagggatttggcatgctgctgatggaggaagcagaaagaatagctagagaagaacatgggtctgggaaaatcgctgtgatatcaggggtcggcaccaggaattattatagaaagatcggctacagattacaaggcccgtacatggtgaagatgctgaaataatggccacaccagtccactcttctgcagtatcctccctggcagaacacggagaatcaggatttcttaaatactcaacagagaggctgagcagagcaaatggggggcttcaccctcatcccgcagctgcagagactggaaactgccttcaaggccacggctggtcatctgctgaccacaccccagatccgccctctcctgcgtgcaccccaaaaaantcacttgcgtttttgaggcttaaatcatctatccagtttctacattttgcatgaggcctgcaggtggcctattttgactcagacggtgaaaaaagcaaattaactcatttggacaccataactcatgcaataaaactgattgtcattcgaggaaaaaaaaaaaaaaaaaaaaaaaaaaaaaaaaaaaaaagggcggccgctctagaggatccctcgaggggcccaagcttacgcgtgcatgcgacgtcatagctctctccctatagtgggtcgta

SEQ ID NO: 65 - DNA, 1978 bp, Homo sapiens
ccacgcgtccggagccggctgccagcactaggtcctgggcagctttgtttgtcccacttttctttgtttcttctcactaaaatgatcacgaagacctttgacaagaggagagatatgcactgtgatattaaattagaaataatttatcaaaatcagacctctcctaaaagaataagaaattcattgtttggcccatcctgaaaggtgaggtggcgagacagtggggtgcctccgtgccgcttcgtgcagcagcaagttcagcctgagatgctggctgtactcagcctttgcaatttttgtagatgtagcttaggacgtgagttatttttccgcagactggccaagagccaggttctaagcttggacctaaggtagaaagctgcccatcgggggccctagctcagccccaccaggccctctgttgggcctgcacacagctctgtggctagaacactccaaggcccttcggtacccatcagagtgggccccttgccaggtggcttttcagttacagagtccagtggaccattttgtagaaccatgcagctccctgcggaaggtggggtagggtgggaaagaggagcaggtctggaggtttgtggaacccagtcccctgcagaatctgtaaaacctaataaatcatggttgtggccattctcacggtggtgattgtgattagacgacccccgggaagcccagacactcggggcctggagttcctccccctgcctgacctagaagcagaaccgttttcagcgctctgccctgttggctttaaggctttgtcttaatttaaggaaaaagatcctcccgggttttatttctctctttcttgagtggactgtttccctataattaaaagaggtggtgagtcctggggcagcttccgcgcctccctgtccacgtgctaacagatcaggacgcccccagcacccctgcctgcttttgctggtggcagtgacgggaccccgactcctcactctcgggccgcagacaatgctgtgagcaagtgtggccatgggcacagaatgtccctttggacgccgctgctgggggctgccaggggccctctggggtcgtgctttgaggcccgtccggttcacgagggggtccgggcagcactgactgcttccgacctgcaggaggcgtaggagcggccctgcgggccctttcacggcagctgctgctgtatagatttgtctccactcagtgacgtgggatttttttgtcttccttttggctttatttttaaactgctttagatattactgctcagtgtttgtgaactttcctagttctctatgttgttagtgcagccagcacccagtggggacctactagaaaaaggaactggcatgcacacgtgcccagcaggaaaagcttcgtcttcacgtcggctgctgccatccagaagaggccctggagcctcacgccgtcgaggctgctctcaggcgttctgttccgggcgaggcttgtgctgcaaggaagggcaccagcatgcaggctgcactggagggtccgggtgctgcgggcagagttcagcgcttgtccaccctcccttagctctgactcagtgcatcctactgtggggacatctcgtgaggggacacgaaatgactgatctcaccctttcccagtattcagagctgtgaacccctgtggcgcaggactggcctgtgtctgttattttggttgtaaatcattctcctgtggaattggcaaaagctacatttttactgtccttaccagcaacagtttgcgtcgtcacatgctgtgagtgtgggctgtggtgtgtccgtgtgtgtacatatgtgtatatgtatatatcacgcagcaggagtgtcattcatgctgctgtcccctggtgaagtgacaagtacaattaaaggtggctctgaaaaaaaaaaaaaaaaaaaaaaaaaaaaaaaaaaaaaaaaaaaaaaaaaaaaaaaaaaaaaaaaaaaaaaaaaaaaaaaaa

SEQ ID NO: 66 - DNA, 1777 bp, Homo sapiens
  misc_feature (1066)..(1066): n equals a,t,g, or c
  misc_feature (1764)..(1764): n equals a,t,g, or c
cgctggggagagtccccagcctaaggccgcccccgaggcckcctcgccgcctgcctcacccctccagcatctcctgcctggaaaggctgtggaccttgggccccccaagcccagcgaccaggagactggagagcaggtgtccagccccagcagccaccccgccctccacaccaccaccgaggacagtgcaggggtgcagactgagttctaggccagtgggtccctgactgctgcacatggcacaggccgttcccttccggacccaggcaggctcagctctggggagggcaccctggtctgtgccttgtgggtggaggcggggcagggctgtgtggcaccgccagggagcgggcccacctgagtcactttattgggttcagtcaacactttcttgctccctgttttctcttctgtgggatgatctcagatgcaggggctggttttggggttttcctgcttgtgccaagggctggacactgctggggggctggaaagccctcccttcctgtccttctgtggcctccatcccctcatgggtgctgccatccttcctggagagagggaggtgaaagctggtgtgagcccagtgggttcccgcccactcacccaggagctggctgggccaggaccgggagagggagcactgctgccctcctggccctgctccttccgcagttaggggtggaccgagcctcgctttccccactgttctggagggaaggggaaggagggggtcttcaggctggagccaggctgggggtgctgggtggagagatgagatttagggggtgcctcatggggtgggcaggcctggggtgaaatgagaaaggcccagaacgtgcaggtctgcggaggggaagtgtcctgagtgaaggaggggacccccatcctgggggatgctgggagtgagtgagtgagatggctgagtgagggttatggggagcctgaggttttatgggcctgtgtatccccttctcccggccccagcctgcctccctcctgcccgcctggcccacaggtctccctctggtccctgtccctctggtggttggggatggagcggcancaaggggtgtaatggggctgggttctgtcttctacaggccaccccgaggtcctcagtggttgcctggggagccggacggggctcctgaggggtacaggttgggtgggccctccctgagggtctggggtcaggctttggcctctgctgcctctcagtcaccaagtcacctccctctgaaaatccagtcccttctttggatgtccttgtgagtcactctgggcctggctgtcgtccctcctcagcttcttgttcctgggacaagggtcaagccaggatgggcccaggcctgggatcccccaccccaggacccccaggccccctcccctgctgctttgcggggggcagggcagaaatggactccttttgggtccccgaggtggggtcccctcccagccctgcatcctccgtgccstagacctgctccccagaggaggggccttgacccacaggacgtgtggtggcgcctggcactcagggacccccagctgccccagccctggtctctggcgcatctcttccctcttgtcccgaagatctgcgcctctagtgccttttgaggggttcccatcatccctccctgatattgtattgaaaatattatgcacactgttcatgcttctactaatcaataaacgctttatttaaagccaaaaaaaaaaaaaaaaaactcgrgggggggccsgtaccmaattcgccanatagtgatcgtat

SEQ ID NO: 67 - DNA, 1489 bp, Homo sapiens
ccccctcccctttttttttttttttttttttttttttttttcactattcaaaatgctttgataatcttaatttttgtttctggtgctgagatattatgaaaggaactgcatttgcaacttattaaatacttccaggaacaaatagttcactttgcttgggacttgtagttttgagtaattaatcatccatggagcaggagccagtcaggagatacccgttggtaccactggtcccattggtggttgtcgcagtgtggggattctttcccggaggttctgagtcctcctcatctgagctagactcaatatcacttcgatcatccttggacaccttgcctcttgaaacagctttgcaagctattttcacaatcaagtaagaccagaagcagttcaacccttgtactagcaatagcagtaggttaaaaacccaccaggaagggtaaggtccaacgatctcccagctttcaaataatgtggtatttaacacccagagaggaaatacccagtcgtgtggtgataaaaaccacggcaaacataacaaacaggagatcacacattttctgaaacttggcataatttgccattttggcagcctccagaagagcatcagctgaatcatgaacacaaaggaccagcgttcctactcgggccatattgttgacatatgaaaaggtaatcaacaaaatatatacaaggtggtgcaggaacataatgccaaagtcctttcttttgatatcagtgaattgagaaatcatcaaagaccaataaaacgacagctccaggatgtaatagtagtgaaggtcagttgtgagtggctgataggggtagttgtaccagcaatgcctcgtattccacaaccagggggtctttttcaggaatctgactccgtaggtaaatacataaaggtaaaatgaaaatctccacatgctctcacagaacctcgtcagcgtgcttggcttctcctgattgcgtctttgtcgaaaccagcgctgaatgcttcgaacatcccagtccagttgcttggagaggccttccaatctcttttcatcaggatgctttgtaattgcagtgaagaccttttccagaatggcattgggcggagcaatttgtggtccattggcctgaatgttgagggctatggcgcacggtttggctacaaatctctcgaagatgagccgcaccatgaagatacagaaggccaggggaaaagcgagatagaggtcctcagcctgcgggaaggtggcctcctccgtgttcttcaggtccgcccaggtgacattgtgcgggagccaaaacctctcgttccagaaccaggctaagatccctgccatcttgctttgtccactcctgtcctgcggcacccgcagctccgccaagctctccaccgcgcagggcgcccggggatgcgcgcccggctggccccgagcctgtgccgccgccgccgctgctcccgcccgccgccgccgcctcctccgcggccgctctagag

SEQ ID NO: 68 - DNA, 645 bp, Homo sapiens
aattcccgggtcgacccacgcgtccgggcggactatgacttagttgcgttacaccctttcttgacaaaacctaacttgcgcagaaaacaagatgagattggcatggctttatttgtttttttttgttttgttttggttttttttttttttttggcttgactcaggatttaaaaactggaacggtgaaggtgacagcagtcggttggagcgagcatcccccaaagttcacaatgtggccgaggactttgattgcacattgttgtttttttaatagtcattccaaatatgagatgcattgttacaggaagtcccttgccatcctaaaagccaccccacttctctctaaggagaatggcccagtcctctcccaagtccacacaggggaggtgatagcattgctttcgtgtaaattatgtaatgcaaaatttttttaatcttcgccttaatacttttttattttgttttattttgaatgatgagccttcgtgcccccccttcccccttttttgttccccaacttgagatgtatgaaggcttttggtctccctgggagtgggtggaggcagccagggcttacctgtacactgacttgagaccagttgaataaaagtgcacaccttaaaaaaaaaaaaaaaaaaaaaaaaa

SEQ ID NO: 69 - DNA, 1063 bp, Homo sapiens
acgcgtccgctaattcccagagcccctggggagaccatgggctgcaggagagcagatgagactgtggctgggtgtccagagctgctgcctgctccggcaccttcatggaatggcattggcctcaagtcctcgctgcctcttactggctgtgtgaccttgggcaggccaggtagcctcagcttcctagagaatgtatgtaatgggcttggcatacagaatatggcacatagtaggtactcaactattattattctgtatttaatagctaattggctggcatttgctcagcactctgcatacattgggccattgcgaggtctctcgcctgcatcttagtttgctaattaggtgcttatctgggaccttcctggagcaggcattctctgctccattctctcctctgtacgcgtgacagccccaacccttgttcccccagcaggagcaaaaggggttgggtatgatgacctccagctcaatgtctaaggatctctgggtttcagtttccccctcggccagctcctcctgcccctaccagccacctcccaagctggggatttcactggcccacccttgttccctgcagaatcctagagtcctccagcccttccctctctggccttcacactccacatcctcagcccagcacaggagccaattttgcaaagaggtaaagagacctcaccactgctgcaccagtctgtccatttcctagcaggcaactggcacttgtttggttttataaattaaggtttcgattcttggccaggcgcgatgcctcacacctgtaatcccagcactttgggaggccaagggttggtggattacctgaggttaggagttcaagatcagctctgccaacatggcgaaaccctgtctctactaaaaatacaaaataattagcagggcgcggtgatgcgcacctgtaatcccagctactcaggaggctgaggcaggagaatcgcttgaacctgggaggctgcagtgagccaagatcacgccattgcactccagcctgggcaacaagagcaaaactccatctcaaaaaaaaaaaaaaaaaaaaaaa

SEQ ID NO: 70 - DNA, 1547 bp, Homo sapiens
gcattttttaacctgaagtatctcaccagggttccactggggaccttcctatcttcccaccctgtcatctacctaggtgacccagcctgttctgttggctttaaaaaaattaaaagaaaaatttttttatggctacacagcagtgtatatatwwrtwgctctgttggctttttatatactctctatatagaaggaagttgaacatggatcataccttctccccagagttctcctttagcttgcaggtgccacaaaattactgtgtcctgaactgagcttctgggcctctcgctgtccccagttcctgtgcctgccgtcacgaggtgtggttgagtcttcatgtggtcttctgtctccattctgtagccaccccatcctgttctcctcacgtccatttgtcctacatcctttcctgtcatccctttggaagaacagccttttatggactgcagtaccttgggggacgaatgcagggtcctgagcatggcatcagtgatgtagaagccctttggggattgaggcctcttcaacctcttcctccagtctcactttctgatcattcacctgggctctctttttttgccaaaacacttttctcttccccagccatctccctccatcctgctttccatagcaccctggcacttatcttagcagaaggccgttactcctctgtttggaaattacctttctcagggtacccaagtttctgagtctcatgcacctgtctccctagcacctaacctcatacctgacacctgggtgaagagctgaaggaatgggtgaagggctgacaactgggtgaagagctgcagaaggaatgcaagctcatgcttttacatttaragcttttacattgattacttgtatgttttgcagtcctccacgttcaacctgcaaccatattgccattgaaatacagactagtattkgtgtttaaggctgtatcttttatttttagttttattttttgagacagggtctcagtctgtcacctaggctttagtgcagtggcatcatcttagctcactgcaacctccgcctcctgggcttaagggatcctccaacctcagcctcttgagtagctgggaccacagtcacctgccaccacggctggctgatttttgtattttttttgtagagttggggtttcacgttgttgcgcagtcttgtctcgaactcctgggctcaagtgatccacccgccttagcctcacaaagtgctgggattacaggcgtgagccactgcgcctggcccagagactgtattattattattatttttgagacggagtctcactctgcactccagcctgggcgacagagcgagactccgtctcaaaagaaaacaaaacaaaacaaaaaccaaaaataagccgggcgtggcagcatgagcctgtagtcccagctactccagaggctgaggcaggagaagtgcttgaactcaggaggtggaggttgcagtgagctgagatcgcgcaactgcactccagcctgggtgacggcaagactccatctcaaaaaaaaaaaaaaaaaaagggcggccgc

SEQ ID NO: 71 - DNA, 566 bp, Homo sapiens
gagcagtgatgcactcacccagcttctggtcctctttcttccacctcttagagtgccttggctccctcctgtcgtcctggggaacctcggccccagccctgcctccccagccagtcacagctcctccctggtcaccctgagggagctcagggcccggctggtagctgggttgctctgcttctgtccccgactcctgtggagcctggcaggcaactccatgatctgaccccggttaccttgacagccctgcctggcctcccctctcatggcccagccaccccagaacctgaagaggttttctagctgccgtgcatttgccaggctgggttacccaccctactttccctgcctgccctccagtgctgccaggcctagtgtgccagccagcgctcagccttcagtaaagggttcccctgcttccaacctccattgcactgcttcccctaagactgtgacctcctggaaggctggagcacaactgcctctcaataaacgtgttgcaaaaaaaaaaaaaaaaaaaaaaaaaaaaaaaaaaaaaaaaaaaaaaaaaaaaaaaaaaaaaaaaa

SEQ ID NO: 72 - DNA, 1323 bp, Homo sapiens
agtctgtctcaaaaatgaatgaatgaatgaatgaacgaatgaatgtactatgagctgatactgggatttcaggtaccgcagtttgtgctgaatgatatgtttggggtaaatcagtttttttcttayagaatttcggcgtttttgctgcaactgccactaattttgcatttaaaagaacaaaagaggaatgtatttttcaaaggagtgaatgaggttaaaatcaagattttgaatggtataaatatgcaactaattcagttgtaggatattattaaattttttattgctaaatatgtttctttcatacgttgcagtgcttacagttccaacagctttccaagaaaacatttccatatttgtgttatttgtaaagtatacataaataatgtaaaataatttgggattatttcaactttacattgtatgtctgaatttcatcgatgttgtacctggctcagtcaatagttgtcacaggtattaagccattttggaatttgccacttttttctgggtaacctgttttagtttagtttacagcatttagaaacagaaggtaactttatagaagtaacaccmatatcctagtctgcttgccccgaatataactaatagtrttaggrtgtaagcaatattaagatggkttttattattttttatacactgtgtgcttttactttttatttaaactacagcaaaaaactgattttttaactaaaattgaatggcgtttatcttaatgaccagttattgaccaaagtgtactcagaagatgttattatgtcccaatctaaggaatcctttaatttggggattaattttacttacacatgccatttcagtttcagttgcctcattctattacatcattcttgtcaagtctaagctttatcatgtctgaattcttttaacactgaatctgtgatgtaaaaatgtatgatgtgccataaattttattcataataaactaagttatagcctattgtaatctgtaaaacatttcttgtaaattacctaatttattttttcatttatgtacagtatcttatgtaaatttgaaaaatgtttgccatggcgcattctgtaaacattcccgtattcttttccttaatgcttatttgcatgaaggtaacttgggttttgcttgtttgtattggataaccattaagccaacttcagtttctctgcctttttttctgtagtttaaccatttctaattttgttcatattctaaatagatgttagaatcatactttttattttctactttctaaataaattatctaagttgtttactaaaaaaaaaaaaaaaaaaaaaaactcgag

SEQ ID NO: 73 - DNA, 2000 bp, Homo sapiens
cccacctagggcacgctgccacgccgccgttacctggtccaagtgcccgggaggctccgcctgtcggcttcgctctgcagctgcatctctgatctgtcctgcaggctcaggctctgacacctccattctctgtccccaagcgccatgagaggccttctttgctggcccgtgtwgctgctccttcttcarccctgggaaacccagctccagttgacaggtcccaggtgtcacactsggmccctggatctggtgtycgtgattgacagctcccgcagcgtgcgccctttcgagttcgagaccatgcggcagttcctcatgggcctcctccgaggcctgaacgtgggtcccaacgccacgcgcgttggcgtgatccagtattcgagtcaagtgcagagcgtcttccctctccgcgcgttctctcgccgcgaggacatggagcgcgccatccgcgacctggtgcctctggcgcaaggcaccatgacgggactggcaatccagtacgccatgaacgtggccttcagtgtggccgakkkcgcgcgaccgccagaggagcgcgtgccgcgtgtcgctgtcatcgtgacagacgggcgkycccaggaccgcgtggccgargtggcggcacaggcgcgcgcccgcggcattgaaatttacgcggtgggggtgcarcgcgcggacgtgggctccctgcgcgccatggcatcgcccccgctagacgagcacgtcttcctcgtagagtccttcgacctcatccaggagttcggcctgcagttccagagccggctgtswggtccgggacctttgcaatggcgtggaccatggctgtgagttccagtgtgtgagcgagggcctctcctaccgctgcctgtgccccgaggggcggcaacttcaggcagatggcaagagctgcaaccggtgccgggaaggccacgtggaccttgttctgctggttgatggctccaagagcgtgcgtccacaaaacttcgagctagtgaagcgcttcgtgaaccagattgtggacttcctagatgtgtcccccgagggcacgcgggtggggctggtgcagttctcgagccgcgtgcgcaccgagttccctctgggtcgctacggcaccgcagccgaggtgaagcaggcggtcctggccgtggagtacatggaacgcggcaccatgacagggctggcgttgcggcacatggtggagcacagcttctccgaggcgcagggtgcacggccccgtgcccttaacgtgcctcgtgttggmctggtcttcacggatggccgctcccaggatgacatctcggtgtgggcagcgcgcgccaaggaggaaggcatcgtcatgtacgccktgggcgtgggcaaggcggtggaggcggagctgcgcgagatcgcctcggagccagcggaactgcacgtgtcctatgccccggacttcggcaccatgacgcacctgctggagaacctcagaagcagcatctgtccagaggagggcatcagcgcagggacagagcttcggagcccatgcgaatgcgaaagcctcgtggagttccagggccgcacgctgggggcgctcgagagcctgacgctgaacctggcccagctgacggcgcgcctggaggatctggagaaccagctggccaaccagaagtgagggtcacggacggcccagacccgggctggggcgcggcaccacggacggtgccccttgcgcgccatcggtgcgccggggccaggcagaacctgggcccgtccggcttgggctgtcggggcggaggcgctggcgggcttccggcattgagctgagttggcctcgcccggaccattaggcggactgcggcgtcagggggatagcgggtggtgagggaaggggcacgtgctagaccggcacgccctcgccgcgtgtgcgctcagttctttgttggatttcttgtttgtgttcttaaaaaaataaaaaaaactgatttccaaaaaaaaaaaaaaaaaaaaaaaaaaaaaaaaactcgtag

SEQ ID NO: 74 - DNA, 1526 bp, Homo sapiens
ggcacgagcaggggttgaccaggacagttccccatctcagctggtgattgggaacagagactcccttgttctcctgcacaccctggctcatggctcttacttggtgtgtggaggaaggaaaaaagaagaccttcaccatcacctctccccattcatttattcacagcacttaccaccctctacagtgatccccttggaagatgagctccatgagggcagggattgtgtgtatcttgtatatcttcatatgctcagtgtttgcacaatgtctggtgcacagcagggtttcaatgtatgaatgtgtgggatagtggcctggtagggcaaggttacacagcaagtccaggacagagcctaactctggagcctcagactatattctgccagtccaagcaagggaatcctgatttcggcctgagagatgcatcttctagcaaagtcaacatcgggatggctcctgagctttccttctcagaggggtgggcttcctacttccccctcccagactcccagtctgcaaggccaagatccatttccaggagaaaatcaatatttgatgttcccttccttccccagcattggttcagagctctggaaatctcctgccctccttacaccacgcagataggaaatctctcctttggcttttaccttctgggcccaggccacccactgctgccgtggattttagccatattattttctgctgctctgagtgccaacagcacactcagcactagacacaaacatgcaaagacgcagctcttgcctgccccaaaggcttgctgggtaagttaaacagactgtaaaatgcagacttcaaatatgccagaggcaaaggcatttaaaattctcagcgggggctggaaagagaacgcttttaaagtcttttcatttctccctcttcctttgccttcagcatcgagctgcctgtgagttgtcctgcctcttctgtctatgaccatttaaggatgactggtccttttgtgagcaggcaaaggctttgagatgttggctgtgaatgtggacagctcttcccaggctgcctgaaagagcggaggcagctaaacttggcaacaaatatttccaagcctgctttccattccatcatgcagaatggtgttattaaattgatgattcaggatctcaaaccagcagagctctgtcctttgggagaaacataatccatatgacaggtttcaccagggctatttctgaataccagaaaccagtgcctaggacagtgtagatcagagagcaggtgagctgggtgctttgggatcagaagccacctgggccagagttttgcaggtaacactctgcagtggacatgcctgggtcaacctggtgcaccgagtccatgctgtgttcactttggtgtccttttctcctgacaaagacttaacctggtgccatatctctcctaagcaatgtgaggaggatcaccttaacctggggggtcaaggctgcagtgagccatgatcacaccactgcactccagcctggacagagtgagacagtatctc

SEQ ID NO: 75 - DNA, 2114 bp, Homo sapiens
  misc_feature (676)..(676): n equals a,t,g, or c
  misc_feature (699)..(699): n equals a,t,g, or c
gattttgaatggcagccattgttatttttcattttctccccttttgctttctctgtttccctggtttaaagtgtgcactctaataatttagaagatggcagaagcattcaagagcgggaccttctgagcagggcgaggctttgagttcggggcagttttcatggtagcatctgcctgtgctgaagcagaaaacagcatctgggacccccatgacttgggcactcttaggacagcccgcagatggttgcgtggggttcaggggcccttcccgcctggctcctcttgtctgcatcctgccctgtcatgtggacctagttcacactctgaggccctgcaaaacatgtcacctgtgggcacctccagttttccagtgcctggtccgcagctcgtctcggcagctgcatccttagggccattcccaaaacctcgggtcacggcgggggcctagggggacagcaaggcctttgccccttaagcctgatgaaaatttgtaggagagacttcagtgtccttawgaatttcagtgaagccgagtgggattaaggtgacagacagaagctctaagtgctttcttcagggagataaagcgctggcgagtgcatcatttaaaccgaagatggagtgagcgccaacaggcactggtggttgttgctgttctaatgggattgcttcgtanatggcccttcatggcggaacacncgtgtgtcagtggggttcgggctgcgggtggckgctgartgtccctgtgtgtctcttacaggaacartgtgtggtggatgcagctctggartacgttcccggcgctcaccartttggtctcacacaaaacarccatttcatcttgccttttaatcagtcggctgtcagaaagaagctctcggttgagctaagcatccgcacgttcgcctccagcggcctgatttactacatggctcatcagaaccaagcagactacgctgtgctccagctgcacgggggccgcctccacttcatgtttgaccttggcaaaggcagaacaaaggtctctcaccctgcactgctcagtgatggcaagtggcacacggtcaagacagactatgttaaaagaaaaggcttcataactgtcgacggccgagagtctcccatggtgactgtggtgggagatggaaccatgctggatgtggagggtttgttctacctaggaggcctgccctcccagtaccaggccaggaaaattggaaatatcacccacagcatccctgcctgcattggggatgtgacggttaacagcaaacagctggacaaggacagcccggtgtctgccttcacggtgaacaggtgctacgcagtggcccaggaaggaacatactttgacggaagcggatatgcagctcttgtcaaagagggctacaaagtccagtcagatgtgaacatcacactggagtttcgaacctcctcgcagaatggcgtcctcctggggatcagcactgccaaagtggatgccattggactagagcttgtggacggcaaggtcttgttccatgtcaacaatggtgctggcaggataacagctgcatatgagcccaaaaccgccactgtgctctgtgatggaaaatggcacactcttcaagctaacaaaagcaaacaccgtatcactctgattgttgaygggaacgcagttggcgctgaaagtccacacacccagtctacctcagtggacaccaacaatcccatttatgttggtggctatcctgctggtgtgaagcaaaaatgcctgcgcagccagacctcgttccgcgggtgtttgaggaagctagctctgattaagagcccgcaggtgcagtcctttgacttcagcagagcgttcgaactgcacggagttttccttcattcctgtcctgggaccgagtcctgaacttcaagcagaatcctcagttggaatcattgctaatattttgaggagaagtgtatgtgtgaattaagaatctcttcagttcatatttcatttccaactcaggttaagtgtttctggggagagatgttgtgtttacgttacactaaaaccacatgtgcaacaaatacctccattaaatggtctaaaatgtaaaaaaaaaaaaaaaaaaaaaaaaaaaaaa

SEQ ID NO: 76 - DNA, 1189 bp, Homo sapiens
ggcacgagattgtttttcccaccttgtcgctgaacctgtctcctcccaggtttcttctctggagaagtttttgtaaaccaaacagacaagcaggcaggcagcctgagagctggcccaggggtcccctggcaggggaaactctggtgccggggagggcacgaggctctagaaatgcccttcactttctcctggtgtttttctctctggacccttctgaatcatagaccggacaagagcctgcagcggaagggactctgggctgtgcctgaagctggctgggggcaggacaacacagctgcttccccaggctgcccactctggggaccgctgggggctggcaaaggcatcggtcagcggggcagcggggctggccatgagggtccaccttcagccctttggcttcaaggatggagatggttttgccctccctctctgccctcgggtggggctggtgggtctgcagctggtgtgggaacttccccacggatggcggtggagggggttcgcaccgtgctgggctccccctgactgtagcacggagtgttggggctgggcgccatctccaggagggcttgagagctcagcctgcctgggagagcccttgtggcgaggcattaaaacttgggcaccagcttctttctcggtggcagaaattttgaagtcagagaagaaacggtcctttgttggcttctttgctttctcgtgggtcctttggcaggcctccctttggggagagggaggggagagaccacagccgggtgtgtgtctgcagcaccgtgggccctcaagctttcctgctgtcttctccctcctcctcctttcccctttctctttcctcatttcctagacgtacgtcaactgtatgtacataccggggctcctctcctaacatatatgtatatacacatccatatacatatattgtgtggtttcccctttctttcctttttttaagcaacaaaactatggaaataataccccaacagatgagcgaaaatgtattattgtaaagtttattttttttaatactgttgtctataatggggaaaaaggacattggccccgcagtgccctgccccagtcagcctggctgggctctggtgggggctcctgatccgcatccaagcttaaccaaggctccaataaacgtgctaggaagcaagcaaaaaaaaaaaaaaaaaaaaaaaaa

SEQ ID NO: 77 - DNA, 1820 bp, Homo sapiens
ggcacgaggtcaatggcttggacagacagacgggctcagtggcatttggaaccctctttggtgccctcccattctctctggaattgtttcaagtctgctggttttcaaacaagaaaagacctttctggccatagggagaatagcagggagtctatgttttggtggttacattggaaacatcttaagcaagagagggaaagttgattttaggcacacatgtaccctccttgacagcaggaactcagacttcaatcttgggggtctaagaccagaatattttccttctgccagaaaagaatcttgcacatatactcctgaggcatgagtgtgtggtccatggcaagaaatagctaaaggctgctttccaggacccaaagccccatttaatgcaagaaccagagaagtgttctaggccattagtggacaatgtcatgtttggagaaagataacaacacaaataatgtaacctttccttaaaaggcagaactcaatccattttatttgatgcttattctaaccctaaccctgggtcacctggaatgaagaactctatgaataatatttgattttacaacgtgttatggttatgtgaaaactaaacatttgccttttataaagactgacaaaatataaatctttattctaaccctatccccaaaactagccaggccacaccccagatgttcttattgactattgggaagatagaaaaggcgttgtgttttttgtttttttgttgttgttgtcattgttgtttttttcagaagaccagtgtctcagttctgtcttagtagtaccacacccgtaaccgtgttttaaaagtttgttttagcctagagacagatcatacgagttcaacaatgtacagtgtgattgaaaagacaggttggtgtctatttttctttttaaaatatctgaatgtgtatttgtaatacgtaaaggtaaaaaaaaatagtgccaaaaatgtgcaaggcatctcattacagctcatgtacgtctgtttttataagatcaatattaaaacccattgggattaaatatttttgaataggatacactcttgrgaaactcgrgaatggactgagccttcctacaagccactctttgtttttaaaacagtggggaaatacgtttacagagattgtgagcttcagagaatgcatgtgatggtgtgtattacatgctaattcatataagctgtatctgtcagctaccaccctgtgctttaaaaatgcacacactcaaccctctttagcttggagctcagctttttgcttttttttttttttttgtagaattatttagctaacataagtattctgawtgctacctgatggccattcttacttagtttcatagatgtgctttaactatgatcctttgaagctcaccccttggagascctacagaacctcaggctgatagctttgaagactgccaaacagcccagaaggaagcaaagcatctgcataatcaggagggttgtataacaagtagtgatttggcaaatatgtgggtagctttaggctgaggcacgggcctcaggcaaaaatgcccttcgagtgaatccgaagggcatgatcttcctatgtccttgactaggcatgacgagtcatttgaggtcagatattatttgagttgttcagcacccccaaaggtaggcattctcctgggaaattttcatttccattttatcgccaaacaaaataaaaagcaaaacaaactttctaagctagaataatgaaattaagtcattttccactttgtatatattgatgctaataaaacagatgaaaaaraaaaaaaaaaaaaaaactcga

SEQ ID NO: 78 - DNA, 1573 bp, Homo sapiens
  misc_feature (1549)..(1550): n equals a,t,g, or c
gacaattcctgcccctaaagcctaggagatccctctcccttgctagagagccacccccaaatcaaaatgtgaaaatccctagaaagcaatagccttcgaggtaccttgcactgaatttcccaccccagcccttccacccgatgggaggctgtaacttgggcactggggtgactttttccatgcccttgtcatctccagggtgggaggcaggccccacttcccctcccctatcccccacttcccattgttgttgccccacccctaatctccagactgaacccagatggagatctgagtgccaaaacaattcttgatgtaactttgtacatatcttctactaccgttgggggctcttggggttagaggtgggggcggctctgtgggccattgctcccctccacctctcaaaagaccttacagtatttcacagtatctctacccgcacgcgagtattacagtatctagctggaatatccccctacagccccccaggaccctatgaggaagggaaggagccagggagagtgaagtaaggtctgggactggggaggtgggatctgaatgaactcatttgcatatcatttgcatcctccgcttggcagccgctttctacaaactcattcactggagtctgggtcccaatcagccgggtccaggactcctctcacacagacacatctccggaggctgggcctcctgaaaagtgtttgcttggggtgtctgtgtaacaacccctccctattcatatttcttggggaccccctacccagccagccagggtgatctgaaaggtatactttgctagctcagtgagctagttcactcaccatgttggtgagcagagagccacacctttccccattttaccytgggaaactcactccaccatctttgccatctcttgaaagtcccttctgcaatctgacctcaatcttttgtgctgcagtttgtccagaggggacacagatgtggggtcagggatgaggattattgraaaacccatcatctctttttttttccccgtctccctattagccaatccgatctcagagtctctgagtggcctccttgcacccttctcttcagcacccagtaggtgcttaataagtgtttgctgcattgaattatctccctattccttctcatttgccctctagcttcccataccttctccaagtgtcttcctccctttctttgtctggctccctatgactttctatttttttttcctccgtgtggttcccattgttttctgtcctgtctctatcttagtctttgtctgtcttcctcctttcctcaaatgtctcaactctctctccccaatttccccatttaaaaaaaaaaaaaagtgccaaacttccttggaactgagccgctctggggggagaggaccttggatagaggggaggaaatgggaccatttctctttgaggaggtccctaagaggcattgcaaaagtgtggacatggagctaaattgggtcccccttccacagccctcccaccctgagtttttcttagaatctttgtaaaaaaaaaaaaaaaaaacnngaggggggggccggtaaccaatt

SEQ ID NO: 79 - DNA, 1304 bp, Homo sapiens
  misc_feature (41)..(41): n equals a,t,g, or c
ggcacgaggttgggccaagggcagagggggctgcacctgcnggcctgggaagcattgctcagggtggggggctgggaccatggcccgcagaggcactgccacagctgtgagggccaagatgctgtccccccatccaaaacccgtgcgccactgcagtgagtgttgagggcacctctcctcccctcttacacctactcagatgaggcagcagcagacccatctcgcggcgggggttttgttctgttgccgcctaactttctcatcctcggtctctggaaagtcaggctgagaaatcctttcccaggccaggccgctgcggtacactggatggttctgaagctggcccattgaaagagcctcttaaggcagctgggacagaggcctggtggccctgctgggcagcccaactgctgggggagacgtttctgccaccctgggtgatgagcagcttttcccccctggctttctgggggaggagtgggcctccttagggagacaggtgaccctgggtgccacccctgccccgtgtgtgccccgggtgttctcagtggttgctgaaggcaggtagagggtgctgtccagtatcccccatgtgaaggtcacttcccttctcatggagtcagctgagcatcagctcagccctgccatgtccccactcaccctcctcgcctcctgtccggccctgggtttctagcggtgcctgaggcatcactctggcccattgacagatgagaggtctgaagccttcctggccacaggcatcactttctcctcctcctcatgccctgccttgtccttgtcgtgttgccatggggttctgagaggctgggagttcacagacctcagacacagctgagtccgacaaccattggggtggggctgcatcagtctccggagtggcccgccacctcctgaagcagggcctggcccacccaaggtgcctggggcaggcgggcaccgtcattcgctgccattggcttctcagatgtatttcaaggactaaagtgggctctaagatctaagatggcccggcgcggtggctcccgcctgtaatcccagcactttgggaggccgaggcgggcggatgagttgaggtcgggagtttgagtccccgtctctactaaaaatacaaaattagccggacaaggtggcgcatgcctataatcccaggtactcaggaggctgaggcaggagaatcacttgaacctgggaggcagaggttgcagtgagccaagattgtgccactgcactccagcctgagcaacaaaagcaaaactctatctttaaaaaaaaaaaaaaaaaaa

SEQ ID NO: 80 - DNA, 1867 bp, Homo sapiens
ggcacgagctaaccacaccatccatctgcagatagaacatcatcagcaacattgaaataccccatgtgctctctgcttcctaatctcagcgccctcctgtcctccatgatgaatgtttctcttgaaatttactttgttgtctttctttcacttttctgtgtcgttttaccattacatgcattattcctaaagtcgttcttttttttggattttgcttgctttcaaattttatgaaaatggcagcaaaatgtttatattcttctgccacttgctttttttcatttaatattgttttgaagatctatgcatactgatgcacactgatcatattttcagtgttgtactaattacagtttatgactattccacaatttgttcatccatttattccctcatttttgtgtatttggtttgttggaagatttcctggctttttttttctattatcaactgggctgccacatatgtctttatgcctgtttcatgataaatacgtgcaagaggccaggctatgcaaagtgccagctttacaagatcatgagcagctgttttgctacgtggtattgccaatttagactcacacaagtggtaaagaagcatccccagtgtcctaaatccttgccaacacttagtgtcaccaggcttcttaatttttaccaatctggccagtggataatagcattgaaaagttatttttattgtgatttggagtccaatattttttctgtaagaaatgcatgtacaatgttataagaacatgcaaaaatcaaaatactttataaatgttcactttataaaaaatgaatgagaaaaacataacgcattttacataaagaaaatctgtaatgcttttgttattggctgggtattttcacaccttccaagtggtggctgttgataaattcagcaataatacctttatgtttattaatattaaatgataatgtcgaattaattaaatgaagttcaatttattgatagttattcattatatcctgctgttctaactcatcctggaagagaatagagtgaaagagaaattgcctttatatataaatgactcatagaatttcatatactgacctaaatagatttcattgcaaaggtattatagaggtaataacacagtaactcttaggactgttttgagattttcacaatttgaaaaatccttttagatccttggttgacaaatgccctggctgtgctaattatatgacatttcctgacactagtgacgtggcatggcctctcccggcttacattatagattgttttctgcccccatgggatctgatttgttaaggctcattttctattttaatgtggtggaagaattttagaaaccctagaaccccactttcaccctccactgaaacaaatagaagcagtgtattagtcagttttctcactgttatgaagaaatacctgagactgggtaatttatgaagaaaagaggttgaattggctcatggttccacagctgtacaggaagcatggcaacatctgcctctggagaggcctcaggaaacttttactcatggtgggaggcaaagtgggagcaggtgtcttatgtgacagaagcaggaccaagagagagacgggggaggtgctacacactttttttaaaacagagtctcactctgtccctcaggctggaatgcagtgatgtgatctcggttcgctgcaaccttcgcctcccaggttcaagcatttctcatgcctgtagtcccagctactcgtgaggctgagacaggagaatcgcttcaacccgagaggtggagtttgtggtgagccgagatcgcgccattgcactccagcctgagcaatcagaacgaaactctgtctcaaaaaaaaaaaaaaaaaa

SEQ ID NO: 81 - DNA, 1125 bp, Homo sapiens
gcttaaacctgattgtagctatctaagttgtagccaatgaggtgtcagaaaatgtaccatgcagtgcaacttcttaagtagcctagaaagatggggtcacatccccctgggttgtttccttctttgtgtcattttgatctctctcgctggaaaacagaaatgatgtctggagtgtaagcagccatcttgggctaggagactacatgctgacatggtgacacaccacccagaaagaatctgagtagtcgatgatcacagagctaccatatcagcactagactctctacctccacattttatttgtgtgacatagaaataaagtttaagctttgttttttctggggtgtatgtgtgtacacatgtgcgtctctgtctgtctcacatgcagtgagacctaattctaactgatatgccggtaggatggggggaccttgccacaaggtataattgtggtgggatggctgtgtcttgctcccattcaggatccatggaaagctcctcctccttcctgttcccctggatgccaagcgatgggcctgagaccctggctttgccatgtggatgctccccctcaggactttggatgtgcagtgattgctacaaaaagggcaatgaagatgcctggaccacagccacacagtctccatcacagcagtggtattctgtggaatgagtactaattttctggccacattttctgttaaaaactggttgttgagctgcccacttgtcttggtcaagggatgctggagtggcctgggaaggcagtgttgtttgcttttcttaggatggaacacacttaggcatatttttggtcaaagcaaaagaagaattcaaaggtgagagaagttgaagataaaaaggggaaaatgagggtagcagatgaagcaaagtcacacagaaagctggcaggcgagtagtagaatcagagtacaggctgagcatcccaaatctgaaaatccaaaatcggaagtgctccaaaacctgaaacttttggagcaccaacacaatgctcaaagtaaatgctcagtgaagcattttggatttcatattttcagatttgggtttgcccaaccggtgtaatacaaatattccaaaatcaaaaaaaaaaaaaaaaaaaaactc

SEQ ID NO: 82 - DNA, 859 bp, Homo sapiens
gaggtgaatgagctggcgtctccaggtccactctagtcactggggaatcaggggagtcccaacagctgagggcatgtgacagggaaactctgcagcttgcaagtgtccctgagtgtgcatcagatgctctgttcctccacggcagagtcgctccactagagagcctggcgccagtcaccaagactccctgacccttgtctgccaagaagaaacagccaagcctttgctgtctctgagggtctccctcgggtgtccctggcagactgcaccagcctcacaggcatctcccaagccgtgggtcagggatgagtctctcggtggcttggtggctctcagtgtgctcagcagcaggtgaggggcctaccccagggcagtgctcggcattcagaaggccgacaggaaaccagaagtttccgaatattatggccccatctcctcttcagtcttcctttccctgaagctcttgtaaacccctttctttcctagctcaacacaacaaaagaaaaccactggataggccgggcatgctggttcgtgcctgtcatcccagcactttgggaggcccaggcgggtggatcacctgargtcaggagttgaagaccagtctggccaacgtggtgaggccccgtctctactaaaatacaaaaattagctgatgatgcgtgcctgtaatcgcagctactcgggaggctgagacaggagaattgcttgaaccgaggaggcagaggctgcagtgagccgggatcgtgccacttcattccagcccgggtgacagagcgagactccgtctcaaaaaaaaaaaaamaaaaaaaraamaaaaaaaaaaaaaaaaaaaaaaaaaaaaaaaaaaaaaaaaaaa

SEQ ID NO: 83 - DNA, 887 bp, Homo sapiens
ctgcaggaattcggcacgaggaaaatattgtcttttttctttcctcactcttattggatatttgtttagtcctaaacaaagtagctttagcttttaatcatactcattactgtatttttgttcaatgtttcttgatttctgcctactttattaataattatctctttatttcagtttggtctgttcttctctttcaatgaatctaatagaattcatggctcattttatttcaatgtctttatactttctggtcagtgtatttaaagtkatacattttcctctgatttctgctttagttgtgccctgcatgattttatatgcagagatattgttgtcattcaattctaagtatcttataatttctcttatgatttctgcttaagcccaagggtaatttaatagcaggctttttagtttcaggactaggtaacatttttggttctttttaaaattattgtttttctaactttatttcagtagagttagggaacatattctgatgttgattcattggaattgtttgagcctttctctctgtaattgttacaaatttaatttttgtgaatattccatgtgagctaaaaaaaaatctgtttttgttctctgctctccaccctaatgagactttagaaattctcagctgtaatccatgatccctggtctaataaaaagaagggtgtaaacatggacctgaccttcagatggggagggggaggcaaaagaacacaactgaaaatgctcccccagctacattgaggaggggtaaagggtaggagggagctagggagagaacatttaaagggtgttgacagagtttaaataggtggtgatagggacttgaagtgatagcaaaaacaaaaaacaaaaaaaaaaaaaaaaaactcgag

SEQ ID NO: 84 - DNA, 1153 bp, Homo sapiens
ggcacgaggagcatcaccgcagaaacaaaggctccagcctccggacaccatgtctgtgcgcttttcttctacctccaggagacttggctcttgcgggggcactggctctgtgaggctctctagtgggggagcaggctttggggctggaaacacatgcggtgtgccaggcattggaagtggcttctcttgtgcttttgggggcagctcatctgcaggaggctatggcggaggtctgggcgggggaagtgcttcctgtgctgccttcacagggaatgagcacggcctcctctctggcaatgagaaggtgaccatgcagaacctcaacgaccgcttggcctcctctctggagaatgttcgagccctagaggaggccaacgctgacttggagcagaagatcaagggtggtatgagaaatttggacctggttcttgccgtggccttgatcatgattacagcaaatatttcccaattattgacgaacttaaaaaccaagtataatttctgcaactaccagtaatgcccatgttgtcctgcaaatgataatgcaaaactaacagctgatgacttcagactaaagtttgaaaacgagctagcgcttcaccagagcgtggaggcggacatcaatagtttgcgaagagtcctggatgagctgaccttgtgcagaacggacctggagatccagctggaaactctcagtgaggagctcgcttacctcaagaagaatcatgaggaggaaatgaaagctcttcagtgcgcggctggaggcaacgtgaacgtggagatgaacgcggcccccggggtagacctcacggttctgctgaacaatatgcgagctgagtacgaagccctcgcagagcagaaccgcagggacgcggaggcctggttcaacgaaaagagcgcctcgctgcagcagcagatctctgacgacgctggcgccaccacctcagcccggaatgagcttaccgagatgaaacgcactcttcaaacccttgagattgaacttcagtccctcttagcaacgaaacactccctggagtgctccttgacagagaccgagagtaactactgtgcacagctggcacagatccaggctcagatcggggccctggaggagcagctgcaccaggtcagaaccgagaccgagggccagaag

SEQ ID NO: 85 - DNA, 1157 bp, Homo sapiens
ccacgcgtccgcttggcattggtttacctgccaggtgtgatagcagcaattgtccaacttcataatggaaccaagtataagaagtttccacattggttggataagtggatgttaacaagaaagcagtttgggcttctcagtttcttttttgctgtactgcatgcaatttatagtctgtcttacccaatgaggcgatcctacagatacaagttgctaaactgggcatatcaacaggtccaacaaaataaagaagatgcctggattgagcatgatgtttggagaatggagatttatgtgtctctgggaattgtgggattggcaatactggctctgttggctgtgacatctattccatctgtgagtgactctttgacatggagagaatttcactatattcaggtaaataatatataaaataaccctaagaggtaaatcttctttttgtgtttatgatatagaatatgttgactttaccccataaaaaataacaaatgtttttcaacagcaaagatcttatacttgttccaattaataatgtgctctcctgttgttttccctattgcttctaattaggacaagtgtttcctagacataaataaaaggcattaaaatattctttgttttttttttttgtttgtttgttttttgtttgtttgtttgtttttttgagatgaagtctcgctctgttgcccatgctggagtacagtggcacgatctcggctcactgcaacctgcgcctcctgggttcaggcgattctcttgcctcagcctggccaatatggtgaaaccccgtctcaactaaaaaaatacaaagagtagccgggcgtggtggcatatgcctgtagtcccagctgcttgggaggctgaggcaggagaatcgcttgaacccgggatgcagaggtggccatgagccaggatcacaccattgcactcttgcctgggcgacagaaggagactccatctaaagaaaaaaaaaaattagccgggcatggtggcgggcacctataatctcagctgtgtgggaggctgaggcaggactattgcttgaatccgggaggcagaggttgcagtgaaccaagatcacaccactgcactccagcctgggcgacagagtgagacttcatctcaggaaaaaaaaaaaaaaaaaaaaaaaaagg

SEQ ID NO: 86 - DNA, 1031 bp, Homo sapiens
  misc_feature (1024)..(1024): n equals a,t,g, or c
acagcatgagcatgagctgtccctggttgggcacctgggcagtggtctgtgcttcacctagacaaagaaatgacagtcaaggaacagatgctaggggaggaaacagagctgaccagaggttacctgggcacaagaggaatctggaagagcgcacacctgctgagcaaacctaaggcagtgacatcagggtggaaaaaagaatacatatgcttattgttagtgttcaccaaaaaaggttcacagtgcgttgctctaaaagytcagttagcttctctaacacaaggtagatacagtgtgaagtgccaaactcagtttccataaaactttttacaagcatgtaagttccttattgactttttcaaaagaaattcatgtaggaaatgcatcctaactcattctatgatgccagcattmccctgatactaaagccagccaaagacactaaaagtaaagaaaactgtagagcaatatcccttatgaaggttgatgccaaaatcatcaacwaaatactagcaaatcaaattcagtagcaggctgaaaggattatacaccctgaccaagtacagtttgttcctggaatgcaaggatggttcgacacatgaaaactgatcagtgtaaacagaatgaagggggaaaaacacatgatcatctcaattgatgccaaaawaaaagcatttgacaaaattcaacatctttcatgatgaaagcactcaatatactagaaatagaaggaaactacctcaacataataaaagttatatgaaaaatctacagcaaatatcatactcaatggcaaaaaaactgaaatcttctcatctaaaatcaggaacaaggcaataatgcccacttctattcaacatattactggaagttctagctagagcaattggacaagaaaaagtggggggtgggggagaagaggcatccaaactggaaaggaagaagtaaaattatctctattcccagatgatgtgatcttatatgcagaaaaccctaacagttccacaaaaaaaaaaaaaaaaanactcgag

SEQ ID NO: 87 - DNA, 2735 bp, Homo sapiens
agtaggaaaggcttctcagaaaaaaaaaaaaaaagtataggctgaatttagctcagtgcttgaaatgggaagatatgaattattatatacgcatctgtccacacatacacacatactgttgtgtacacacacacaacatgcctgtgcacagagccaacaacccttcaaaagtgtgctctgggtgtgtacctctggataaataagatgcatgccargccaacccacagattttcaccagtgtggggcagtcaccaggcacctgttcaatgagctgtccacatggattgaagatgttttaaaaacacagaaaactcatggcttcaatggcagacttactagtctccatttcaaatgccaactctgagctgctgtacagcacaatctattccctattctctctttgaaaacagttaacccacctcacaggtgaatgargagagaagatgtgctttctgcttcagtctcttactctgtgtgtgaccacatgcaagagtaaacttgcacctcagtgcttcagttcaaatggggtttccaaccccagtataattaggggtgtttcagagcatccccagttatttagcacaacactgaaggagcacatcccctctccattttgacttctctccccacttttacagccactgccttcatcagttttgtagaggtttgatttccatgtgggttttgttgtcattgttttgcatttttgttttgttattgatattgtttgctttcattgctaaaactcatatacgacttactatgagccaagcactgttctcagtattacataggtatgaattcatttaagtcctgaagaaaaagaaaaaaaaatacgaagtggatattacccttcccattttcaaataaggaaactgaagcacaaaaagaacaagtaacttgacaaggacaccccggtagtaaatcatggggctggagctcaaccccagggtaggctggctccagagctgtgctctccttgactcttctgatggtctcctagctggaagcctcacatttcagtctcattcccccaagtggcccatcagctactccatctctggctccccaactaaacagtttctctcatagtgctggacctccactcactagttttttttccagctgttcttctcttttcttcaggtcactcttctcgaccgagtgcaaaaattatcccctccataccagctttgatgaccttccttccatactcctcaccagacacaacataataggtcacacactcctctgtgctttctggcacgttttaaacattattattattgacctttacctatagtataccatggcctatttatgtatccatctcccctagcatttttcctcaaagacaagaaccatgtcttacccatctcttgggtaagtgcctagcatggtggctgacgcttgggagggtgtcattaaatgttgctcaaaagaacaagcaaacatttaaggtggtggagagcagcctggggacagctgacatgctgcatgcttctcagtaccagcaccatcacaatgcaaaaagcaacatctttcttaacctcagcttattctgtttttcagtctactctgtgagagagcaggaatgagaccagactagcaacaccattgccaagctcaaggactgggctcaatgcagtcactccttcagagagaccccccaccccaagcatgccccactttaaaatagcatgtttattgaagggggcatcctttacagtagctagaaaatgactgaggcccaagccagggttgatcaaggatgtgccattaaggtaaagagttacagagcagggcagagggactctgggggcagaagtggatgatttgcccggcctcttccagggggtctggatacaactgaaggagctttagctacatgaggccctcagagccaaagacaggatgcaaatagagttctagagagtggccgtggaagcagaactccaggtggggaatgttcaatctctgsctcccttaaagcagggccaggctcagctggccccattgttcacttggtcacaagtttcctacctttgtttctggatgagtcaaaggccaggaaggcagttatggagagctcctgcacctccagctgccccacagaaaagcctgcaagagtacttccaggcacaggccctctcccaccctattccatttgtaagcaagggaggtcgaggaaaaggacatctccaaaagggagcataagaatagccatatatacaggggctgaaaaagtgctcatgagtccatcttttctggaaagcaaagaccagcctgaagcagtgggagctgctgcccaagcggtagtgaactggagagaaacaggccctggattttcagtgaggatgtggatctgaagagtcccccaaatgcctctgaagtctgacatctctgcttagccctaggagtctggttccctgccttcagttgcagagtgatgtgtttgtgtcattgttgatgtcacctcctaaaaagaccttcactttctggctgccacaaagccatatgtgttgctccccatatacagcctgacagagtaaatggagaggaagtgctggatttgtgtatcactggctatcagttcctcatgttgttaagcctcacacaggtgtgctagcattgaactgtagagtgtcacatacctgagtttgaaaataaaagcacatttccaaaaaaaaaaaaaaaaaaaaaaaaaaaaaaaaaaaaaaaaaaaaaactcgtag

SEQ ID NO: 88 - DNA, 1941 bp, Homo sapiens
  misc_feature (499)..(499): n equals a,t,g, or c
  misc_feature (558)..(558): n equals a,t,g, or c
  misc_feature (1890)..(1890): n equals a,t,g, or c
  misc_feature (1938)..(1938): n equals a,t,g, or c
cagtatccaaccatcctctccattctcctctggacctcaccactctcagagctgcttgtcctggcagaatctacarttcaccccaactctatgccttacccctcccaacccaacagcatttgcagtttgcaaaatatacagacccaagtcctgaggggactgaggacatgatgctgggcccaagtctcctgctcagggcttctctccaatgccagccctgccactccttcctcaccctccttggagcctcctctgctgcttgtctatcccaacggccctgctcccctcccttcctgcccttcaccagctttctggacaccakgcmswgrgraagggacctttggttttytctaaacatctttraagggctgaggcagtcagggctggctgccttgtmactctttatttggaagccactcaaaccattcccaagaagagggaacctcasctggcaatctgggaaacctggcccaggtctgggcmgatgtyttcacttctncctaccttcccagttcttgtgaatcctgtgaatgagcaccaggatgggccctgtgggtnccctagaagcaccccttcatggctgtagggtcctgcagccccatcctttctctactgggccctggtatcctggctcctctctcagctctgccactgatctctgtgccttagtttacttctctgcacgggggactcaccccaagaccatttccagcagcttcccaggtgatgtggtgccccaaggctgggctttgccagctgtggcccagctccttagtgctgcccaggagacaccaggctgctcagaatgaggtgactgcgggcaccattctcagccagtggttcttgtattgcattccagcagcaggaatatcacctgggaacttgatagaagtgcagattagcagccccacccaagacccactgaattagagcttgtggagtggggccctacaagctggggttttaaggagccctccaaatgattctgacgcataagaatatgccaactgctgatctgggctagccattagtagagcctggggagggactgggactggctaggccaagaacaggtggaaaacaccagccttatctggactcctgagattgggaaccaccaccaacaaaaaccaaccctatagtcgctcctcttggaagaggaagagaagttgaagggcctggagaaagcacacattgtttgtttccctgctcctgctcacctctctcacttgtcttggttttacaaaaggctgtgtggatggtgccagccagggagggggtgggagtcctggggaggcaggaggcagaagaccctgactgtttctcccttgggaacctcaccataggccagatagcgcctcttcaaactgaaagaaatcttaactccacaaagaaagcatcctaaatccccagttcctcctcctcccaaccccagggataccttgtagacagtgccaaaaaacagctccaacccccagcagctgggaagagagccagaagctgcccttcctcctcatcctggcccctccccagcccccgccaatactgtgaacccccttcccactcagcctggtttcctggtgagggtcctgcagtcatgggccctgggggacccccaggcaaggcccatgggagggaagggaccaagggcatccttgggccaactgtccacctctcttgtccactattctctcctttccacttctgtcttcaaaaggctccttcctaggatggatcgggtgctaggacaactgcagtccaatccaccagctctccctgcccctgtgtcttatttcagacatgagaataactgtacagtgtaaacttataaagcgtttttaatggttgtagattggaaataaagtatgtcatatgaacagctgctgtggnaaaaaaaaaaaaaaaaaaaaaaaaaaaaaaaaaaaaaaaaaaaaaaangga

SEQ ID NO: 89 - DNA, 820 bp, Homo sapiens
ggcacgagattaattacagtttaagccaaagcatgagtggctttttaaagtgcatctgtggaggggatgtggcaggtagcccctgttcacttgctgtaagataagtgttttagtatttcagccacccttaggcacaactcagccaggcctaggaagcaacccaacgtcattgccatgaaccatttacacaagtcacaccaaaatcaactgacacatttttttcctgatggaacagttaaaaaaacaaaaaactatacagtcaaagtctggggttgaagagcgtgaagttcacagctcctccacacacgcccaactgagcatgctcatcctgtgagggggaaccagagccttcctgtaaaccatgagagcttaccaatgtctggtatacaaaatattctggcccataaactcaacctgtttttgaggggtaggggattttccatcttgtacataaagaaagaaatctgggtatccttcaggttagaaaggcattctgtaagaatagtgttccagagttacaaatcatactggtaagagaaaagcaattcttcctcttggggaaaaagaggaaaagaaagaagaaaagagaaaaaagaaaaaagggggaaaaaagaaagcctatcaatgcttaatctgttctttcattcccactgtaaatcacatcaatacatttggtgaaactgcaacggaccaccatttacaaggtagttgaatgcagaaaccgaaacgattatgccccctccccactctaaaggaaaagacacagagtacatttcacatattcagagagtggctcagtgggctctttcaagcggcacga

SEQ ID NO: 90 - DNA, 1233 bp, Homo sapiens
  misc_feature (637)..(637): n equals a,t,g, or c
gaaaggcctccttggcattggctctggctctaaggcattttatggtagagaactggctgaaagacttctcttacatccgccagcattacttatggaagctgtataccattatttcttactgctgcttttggaaatattttctgagtacttaatacttcattttctcttgagctttgccattgaattttttattccaatgattacatcttaatattttcattttcttcatctttctattttttcttagtaactttctgtcctggtttcaaagattcagttccctcctttatttcagtgagcatttgaacatacttattttacagtttattakggattactgtagctccatttcttcacaggtaactttttcagtttgtagattcttagctgtttttcttggcatgcagcccccagtgagttagcaattcaaattttagtgttcatctgttatgggagttttatatgatcccttccctgtgaagcagtttcatggttccttcacactggmtgttcacagtctctgctttcagaccaggccttacatatacagattgctctatgctttcactctgtgtatatgcacaattctgggtccctcttctatgtcccttatctgctaggtcttggtcttatagangaacaatttctgtttttggcaagctagacytgtctgcctgcagtgctatgtgatggatgcagctctttaatctcytgctcctgtgtagacagtattaccccaattcccagctttatgctggatgtttaagttcagcaccttaccactctgttgggtgctgagaatttagtcctaaaaacccatatccagactgggccctacttaccactttggttttcctttctgcttctcttgttttgactacagatctgaatatttattattaatatttcctttttttttggagtggtatgagaggtttgtgctatgctcagccttctatctcgaccctagaagtagaaaaatagcttttaaatccactacaaagagcttttacttatataaggttaataggtggtagacagtctttgacatggggtgaaaaaatctaaaagttataaaaataaaaccaacttggctgggcatggtggctcatgcctgtaatcccagcactttgggatgctgaggcagaaggatcacttgagtccaggagtttgagaccagcctggacgacatagtgagatctcatctctaaaaaaaaaaaaaaaaaactcgga

SEQ ID NO: 91 - DNA, 1054 bp, Homo sapiens
ggcacgagtggatatatcacattttgtttatctgttcatcagttgatgaacttttgggttgtttctgctttttctggctattgtaaatagtgctgttatgaacactgatgtacaattttttggggtgaacatttgtttttattcttttgggtatatacctcggtgtggaattgcgggatcatatatggtaattctgtctttaacttaatgaggaactgccaatctgttttcctcagtgactgtaccattttatattcctattagcaatacacaagtgtcccaatttctccacatttttgccgacactgttttccattaaaaaatttttattgtagtcattctagtgggtgtaaagtggtatctttttgttttgatttgcatttccccagtaactaatgacattgagccttttttcatgtgcttgttggccatttgtatatcttctttggaggaatgtctgtttaagtcctttgcccactttaaattgtgttgtctttgtgttgtagagttgtaagagttctttatacattctgggtactagacatgattttcaaatttagatacatgattttcaaatcttttgcctmtaratgttttttacttttttatttttgatccttgaactcatctatattstakggttgtgatgwaawratgtcagaattggtgtcatttgtgtttatttaccaggttatttggaaggattatattttaggtgctctcctytcccccagtaaatggtattatgacacaagggttataaaggactgataagaaattacttaagacagaaagggaagttggcctgcttccaaaatatggtcccagcagaagtgaagttagttacacaaataactacagtcaaaaagctatttttatccatgataatgtatttgttgttattaatattaaagattatattttgccaggtgcagtggctcacatctataatcccagcactttgggaggctcaggtggatggatcacttgagctcaggagtttgagaccagccagggcaacatggtgaaaccccatctctacaaaaaaaaaaaa

SEQ ID NO: 92 - DNA, 2014 bp, Homo sapiens
tagcgcggccgccctttttttttttttttatcttaaatacaatcaaaacttcatgtttaatagggattcatctgtttcccatactttttacatgttcagttcagacagaactcatggaagaaaagacttttctgtgagatagaacagaccatctgcttgaccggatggctctgagggacagccaaactcccaatggccaaagggctgtgaggaagggcaacacatatcagaagaattttcagcaagggctgaaacacagtaaggttagccacaaaatggaatgagagaagccctaacccaatgggagtttgcctaattttaatgaacccaaactctaacattgtactggaaaagcagcattaaaatccagcctgattatcacaatttacagaatttctcaccagaggcccacaggtgaaaaagctgcttactctaaagcccttagaaccgtattgtgaactgcgcatgcgagggatctaggttgcgtgctccttatgagactctaatgcctgatgatctgaggtggaagtttcatcctccaccaccaccccgtccatggaaaaactgtgttccacaaaactggtccctggtgccaaaaaggttagggactgctgctttagaatataagaaacaactcaagcagccaacgggtctagagttaacacttccagccctcccctttgtacacactcaacacttcttgctgaactggccgttaataaccacttgtgaaatccctccccacacctgcacttaggcgtttgtctcttcctaccttcctttactgagtagtggcaaaataataggagagtggaagatggtgatgggcaatgaagagggacctatttctgaagaggagatgttttaaagatattttatttttcaataccagtaatgactgaaaattaaagaattaaagcaggaagcaaaacaaaaacaaacaagaaacccaaaacttgcaacctaaactctccgggaaaaaaaaaattgctataaatgttaaaagacttaaagagaacattgacaatgcagccctgatgtacctaatcatacttcaaactgctggatgttttaagctgagaatctccccagtgcctttctagtgctctaaaatcatctcccaaacagatgagaaatgaaacaaacaggtctcccttcttgagtacataatttttataaattgcgtcggacccacagtgaatgtattttagagagtttcaccaaaactatcaaagatcaaatggcagcaaaagatcagggaaagaaggtagaaaaactatgcagtcacagagctaacccgcaagctgcccttagtcctatacacctgaaatcaaatccatagccaatggtgaggaagaccacatcagaggttagctgcatgacagcacagctgggtcctatctccctgccaggggtctcaactgtaactcgcgctccaamtgctctgcagtcagggtgccctggatggcttcacagcctggattgaacacagagtaggcgctcttctctccctctttcttctcttcagggcctcgtgtcccgacgtacatccaatagaacaaggacaggacaaaatatgccaggccaaattccagttccacaaacagtcccagcaggaccaaccagagaagaaccttcaagaaggtgatattggtcaggaaagactggtcccagcacgacggcagaggaatggctgtgttccatggtgtctctgatgtgctgccctggggctgagccgcttcctgaactaggccgggctgggcccgggcactcgcgggcctaggtttccataccaggaaccgctttagccagcctggggctgcctttagagtcgctgctgcttccgccttctctcctggggtttgtgcgccctgactggcagcagggggttgggccgccagacccgcccgtttccgcgccgcccgaaactcagctaaccgctgttccatggcgcgcgcctcgcgtccgttggccgataagggagcgcgcgcccgcaggccgcacagcagttgcc

SEQ ID NO: 93 - DNA, 594 bp, Homo sapiens
  misc_feature (587)..(587): n equals a,t,g, or c
ttgaataaatagggaaaggggaaaaactggaagggggaatcattaggacccagctgcacagacatttgcagctaaaggagtggagatccagacgatctccgtgggactgggagcagctgtgtttaggattgacactgggggaacaggcagagggaagcatggtcttggcattggcagttttcacattgttggcttctgtctgttgccagcttcattctcattctttctatccttgtatgtcctgtttttactcttcattgtcattttagtgggtttccaggaggcagcagtgataaactgcatgcgtttagtatgccatgttttcctggagatcccactgactttactttcagtaacagtggttttcatttgccaactctggtgtttccccaccatgcaggtaagatagttaggctctaaacctattgaaatctggggttttcattttcatagggcacttatttatccttattcatatatgggaagkttatctctctgtgccaataggcagagtttttggctcatttttatggagtttttagctctgtgagagaacttgctttatacaggggtttcacttcaaaatntcttcct

SEQ ID NO: 94 - DNA, 1589 bp, Homo sapiens
acgcgtccggcggggcgaggaggagggtgggtatgaggcggtacggaccgcggagtcgagacctacccgaacgacgcgggcgagcggggctttggacgccggtggagacgcaggcgagcaggaagaagatgagccttaggtctgaacgccgaggaattcatgtggatcctgtgcaagaaaggatgtggttactgtggcaaccctacctggcagggtttctgctccaagtgctggagggaagagtagcacaaagccaggcagaagcagattcaggagtactgggagctggtggaacgactccagcgggaggaagaagaggcctttgccagcagtcagagcagccaaggggcccaatccctcatattctccaagtttgaaggaaagaaaaccaacaagaagacccgcaaggttaccacagtgaagaaatcttcagtacgtcttccagggtcggatcaaagaaggatattgaaatggattccaggcgtgtgcctcgagacaagctggcctgcatcaccaagtgcagcaagcacatcttcgatgccatcaagatcacctagaacgagctggcgtcagcagatgacttcctccccaccctcatctacattgttttgaagggcaacccccatgccttcagtctaatatccagtatatcacgcgcttctgcaatccaagccgactgatgactggagaggatggctactatttcaccaatctggtgagtaagtgagttcttggcgttgtggagaaggactaggaaggtggtggttttggggatgtgataggtcactcaggcccatgacaggtgaatgcttctgtgtgagaaggcagcacggctgaggaagctcactttgcatcagggagcacaaggaccaggccgtacagacactccgcctcccagcacttgatcagagattgtgtttatcctacagaaacagatgacatgtgttgggcatcactccccacggtcctgggtagaagagtccttcacttggcagggctttttcaaccaatgaataaggcaaattatatataagttaataatgccatttcgaaccgagacagatggcagctaaatgaagtttaattaaagaatgagtgctggggccctttttattgggtactgcatctacttcgaccacaaaagacgaagtgaccccaacttcaagaacaggctttgagatggaagaaagaaacagaagcttgccaaggagagagctgggctttccaagttacctgaccttaaagatgctgaagctgttcagaagttcttccttgaagaaatacagcttggtgaagagttactagctcaaggtgaatatgagaagggcgtagaccatctgacaaatggaattgctgtgtgtggacagccacagcagttactgcaggccttacagcaaactcttccaccactagtgttccagatgcttttgactaagctcccaacaattagagaattctaagtgctcagagcttggctgaagatgatgtggaatgagaaacaaatgttaacataataaaatctcagttaaaaataaaaaaaaaaaaaaaaaaaaaaaaaaaaaaaaaaaaaaaaaaaaaaaaaaaaaaaa

SEQ ID NO: 95 - DNA, 2632 bp, Homo sapiens
ggcacgagctgctggccaccgtcaccgagttgtcttttgacatgtggggactcgtcagcgccctcgccgccacgctgtgcttctcgcttcagaacattttctccaaaaaggtcttgcgagattcacggatccaccatctccggctgctcaacatcctgggctgccacgccgtcttctttatgatccccacctgggttctggtggacctctcggctttcctggtcagcagcgacttgacctacgtctaccagtggccctggacgctcctgctcctggctgtcagcggcttctgtaactttgcccagaatgttatcgccttcagcatcctcaacctcgttagccccctgagctactcggtcgccaatgccaccaaaagaatcatggtcatcacggtgtccctgatcatgctgcgcaacccagtcaccagcaccaacgtcctgggcatgatgaccgccatcctgggggtcttcctctataacaagaccaagtacgatgcaaaccagcaagccaggaagcacctcctccccgtcaccacagcagacctgagcagcaaggagcgtcaccggagcccactggagaagccccacaacggcctcctcttcccccagcacggggactatcagtacggccgcaacaacatcttaacagaccacttccaatacagccggcagagctacccaaactcgtacagtttgaaccgctatgatgtgtagagtccaaaggacaggaccagactgttggtgactccttccccggcccccacagcagtatcagaaacttctgacaatcagtgaatgtacaacccagccgaggggacggtgcataactctccatcagaagccctggggttcctggccccccgtgagccgcaggaggatgcgttgcctgcagtgcagacggccgtgagctctgggcaaacctaaacagagaccagtgtctcatgctctttcttcctggagtctgtcatctgagggccgtgtccctgcggagatcttggcacgttgtacctttcatgtggaattattccccaagcagtgttagctcagagcacttgtgtctgcattccagataacattcaggacctgtgtgaaaagctggggtcactgtggctgtagaccatgaactggcagtgggggtgtccagggcggtgcttgagaacgtcagactggctagtttaattccctggcgcagatacgcataggaccaacagggtcaccaagcagacagggagcccgcgagaatcattcaaaacatccccagccacagagatggatccagtttcctggtcatccccttagcagttcacaagttcctggcaaatgttccaaagcaaaaagcgattgcaattagcatccagttcctgcagcctggtgctctgccctgcacgtcagggttggcatccacccagatccagatggaagggaaacttctctcttctcctttgcctcctcttccctcaccagagcagggcgcttctcttggggtggtgagaaggatcttcgagaaatcgtgttcagtatttcaagctctatttctgtggcacatgtcttttgagaggcatcttcacctcttctgtgatgacttggtatgttgtttggtagatcttgattttcggaggatcttgcatttttctagggaatattttgtagttgtgtgtgtgtgtttttgccttggtccccattatgggatgcattaggactggcctatgcatcgaaaatctttttgtttgtaaacgtttaaaaacaaagttccccggccaggcacagtggctcacacctgtagtcccagcactttgggagccaagatgggcggatcacgaggtcaggagttcgagaccagcctggccaacatggtgaaaccccatctctactaaaaatacagaaattagccgggcatggtgtcgcgtgcctgtagtcccagctcctcaggctgctggggcaggcgaattgcttgaacctgggaggcagaagttgtggtgagccgagattgtgcactccagcctgggtaacagagcgagactccatctcaaaaaaaaaaacaaaacaaaaccaagttcccactggtgatgcctgtctgacacgttttggtatttagtaggaaatgaagtgtttcgaagcttcgagagaagcttcaaaattgtcacaattgctgaaaacagaatgaatcgtgaacattatctcaatattttgtataatagacaagaccacagtgttttggttccctgacctgtttttgtgtttatgttaggatctgaatcatgttctgggtaaggggacgaggagcgaacactgcactaagatttggtttgccaaatcagattctttggtcaagagtcagtttggggccaggcgtggtggctcatgcctgtaatctcagcactttgggaggctgaggtgggtggatcactggagtttgagaccaccctggccaacatggtgaaaccccatctctactaaaacaaaaattagccaggcatggtggcacctgcctgtaatcccagctacttgggaggctgaggcaggagaatcacttgagcccaggaggtggaggtttcagcgagctgagatcacaccactgcactccagccttggtgacagagtgagactctgtctcaaaaaaaaaaaaaaaaaaa

SEQ ID NO: 96 - DNA, 1816 bp, Homo sapiens
agaaagtacaggaagccgttcttgacaaatgggtgaatgaccctcaccgcatggacaggcgcttgctggccctcatttacctggctcatgcctcggacgtcctggagaatgcttttgctcctcttctggacgagcagtatgatttggctaccaagagagtgcggcagcttctcgacttagaccctgaagtggaatgtctgaaggccaacaccaatgaggttctgtgggcggtggtggcggcgttcaccaagtaactctgctcggggtgaaccattctcctttctctcaagtaaaccagtagtttttcttctgttgacttctggttttctgtaatttgtactttcccacactataattggcttctgttttacaaaatggtgggtggctttttcttttttgtacgtgtacaggattctgctggtacgagaggccttcctctttctgtttttaaaaaaagttttactgccatattggcattccattccctgttgccatcctcactgttacctgttttgggtttctggtctactttgactttcaaagtacctccagcctcctcatacgcacagcttttggatgactcagcttgagtttctccatatgtgcatgtacatctagcatctgcctacagttcagacagaagtcacaaaaaggccttcaactcaccaaaggtaaatatctgtatctattaggacatttttttacatagacttcagttgagatgtataattagcaaaattatttttaaattgaaacagcacagtaaatacttaatataaaatgtcccttggattttgcttcccatgtaaatctattgtattattacacttgttataattttaactataaaggtccaattgtttcacagagccagtttgggatgggctgcattccatttatgctgtatatagtttgaattatatataaattaccccttcttctggccacccctgctcccatcttagtattttgcaagatctaatcagttgtacacctggtgcccctcgcttgcttcaatcatggttatttgatggcaaaatcgacctcttgtcgctgaaggagagagaaaagatgtgtgtctgattggtcctgggattttttgagctgtgccatttatggtactctttgcctatgcatcccctttttagattttttttaaattttatcttactgtttttataatttctattgggaagaggcttgtgaccagtaccaatcttgagtttctttttctgtccacaagtaaattaatatctgctctgaaatgtcatttatctactcacacattcttggggaaaaaaatcaaatgtcagtcctagcagatgttgcatgtaaattggtagcaagtaatgattacaacccagaggattaagaattttgtaacagaaagctctatgttttaattttttatatacaattaggataattagcattgtcagactataaacctttgctttttaaagtttatttttactatttctttatcactttattgtatcatcaccattggtttcataatgtaaatactatatgttgaacaaattaaatgtcaaaattttttattaccatagtccatgttaatagtggggctttcaggtgtttagagattttttttgttgttgttaacattcattgcaaaagtactagatggtgtataactctagagttgaattttaagggattccctaatatgtatactatctttttatctgaagtaataaataaacaatgatcttgaaagtgcctgaaaaaaaaaaaaaaaaaaaaaaaaaaaaaaaaaaaaaaaaaaaaaaaaaaaaaaaaaaaaaaaaaaaaa

SEQ ID NO: 97 - DNA, 575 bp, Homo sapiens
ggcagaggcttttgaagttaatccttttgtgtgatacaggatgaacttgggatgtttgaaccctggacattccaaataaagaataggcccctgcctggctcctgggagataacctctaagccattagaatatcttgcctgataagagtgtttttgtttacctgtgggccttgggccatgcagtatcagcttgaccttgcaaggtcaagctgaggagactaagttagccatgtgggcagtgaagcatgccaatgtgatcaatccctagtaaaagccctggacacctaggcatgggtgagctactctggttggtaatactctgtgcacacatcattgtagccacacatcattgctgggagaattaagcattatcctgaagactctgccaggagaggataattggaagttctcttggaccttaccttatgtgcctttcttcattgctgattttaatctgtatcctttcactgtaataaactgtaactatgagtgcaacacttaaaaaaaaaaaaaaaaaaaaaaaaaaaaaaaaaaaaaaaaaaaaaaaaaaaaaaaaaaaaaaaaaaaaaactcgag

SEQ ID NO: 98 - DNA, 1584 bp, Homo sapiens
ggcacgagaaaattttataattatgataggactcctagctcttataagaagtggcctttataatgccacctttagtacttttcagcattctacaggtggacaattcaagaactatatttgtaaaataatgttttaaagagagccaacggtaaaggcaggaaatcactcaaaacattttgtatgttccagagactactcaaatattaatcctgttttcaggagtaacttcgtaggcgtggaaaagatttttgtttatttagaccaattcattatttattaacttcattcaataaatagttacattgtacctactacatgccaggcactatgttagtgagtttgttcactcagtcagccagctctgtaacatggaaagaaatgggaacaatttcacctatctcatagccacctgaaatagctcagcatagatagttttctgttcatttgcttctcaggctgttccctcactcactcattcactcattcatttgcttattcatcaagtacccattgagggcattctgggtgctgaaccctgtgctgggtaggcactgtgcgggtgtgagttgtgttctgaagggtgaaggctgaggatcttgagagcccagaggagggatccagcccgacccgagggaccaggaagagtggtctggaaccagcaccctttggacctaggctagaggccgagcaggaaccattgaggagagaggcaggaggtcagtggcccaggcgggaaccctcacacccaagccccaacatttttattttgttttgggaaatgtataggattaaagtaataactggaaaggaaataaatggaaacatggaatggaaacatttcctattttccctattgttatctgaagacaaacttaatttttatgttgctactttctctcttaaatatcctcttactaaatagtctgttgtattaattagactgggtagtcctaactcaagaaagcatttggcaattaaaagatggaggactcagggtctgaccgttttccttggccttcatttggctttctctctcttttctcccctccttcttcccaggcctggctggctggtgcctggacaccatttggggctctgagagggttgtggctgccacccccagtcccaatgcctggtcaggcactcgtatcccctgtcctgttcaccatttctcctttctcattgttctcataatttgtcctgcttaaaactcctaggttctaagggacacccctgcattgcttgcctttcctttgctagacaccagagagaggctaaaaagtgaaatgtggcctggtgcagtggctcatgcctgtaatcccaacactttgggaggccgaggcgggcagatcacttgaggtcaggagttcgaggccagcttggacaacacgacggaatcctgtctctactaaagatacagaaattagtcaggcatggtgacccatgcctgtagtcccaactacttgggaggtaggaggatggcttgggcccgggaggtcaaggctgcagtgagctgagattgtaccactgtactccagtctgggtgacaaagcaagaccctgtctcaaaaaaaaaaaaaaaaaa

SEQ ID NO: 99 - DNA, 1838 bp, Homo sapiens
aattcggcacgaggtcagaaatgattcagggttatttgaggggaaaaaaccccatagtgccttgattttaattcaggtgataactcaccatcttgaagtcattgtccggtttccgtagcagttttgaaaccttagtacctttttaacagcatgtgggtgtcagtgtcattattagtctcctaataagttcctctgaagactgctatcagtctcttggactggaggtacaaataatttagaaataaaagatgataacctaacactatcatagttattaatgtgatcctaaaattgtttcctaaatcagcatttttctttagtcatttaagaatttaccagaaatatttgctcaatatgatcttgatattcctacaaagaaaaaagaaggggtagggatttggctatgccttcactacaacattagaatattgtaactcacatgccttctaaacgtgaactaagatttcctttggcaatatcatattctaaaagtaataaattccaatacaagttacatacatttaaaaaacattttacagattttatggtactaatgaaatttacagtgatagaacaaaagaggattagtagaaaatacattattagaatataaaaaatgttattactgaggaaagggaggagaggacaagtgtaataaatcaaaattgacctcaaaagaaaatgtgtaacagagttgaggttgttaaaacagaaaaggttctgaataatgaagattaacctaatgcagaattgctaggtaaagaggtcaggggaatgctaagccagttcttaagacttctctgtcctctgctttgctgttatccttaaggcatatactttgtctttctgcagaaaattctacctggctacaattactttgaacattaatgttgaaaaagaaaacaaccaaagaaaattggtacttacccttctacaaaagaagtgtgactagatatcaatcagtaattaacatatcaaggagctcttctagctaaatgaccatccagtagagatttcccacattcccatgaatatcaagaatagttgtcagaatatgtatgtacctgagcatatgtacacagacaagggggatgttgtggaatatggcaatagcattgttcttctcccctttcaaattgcctttcttgaccttatgccattccatatatatctgagttgtgcctcatttatttattggcaatacctagtgatacggatttagctaacaaaagatatgaagaactattatattgaggcctgtcctctacataccacacttaaaagatggtgaactgtgagtactacttaggttgacagcaacaaagcataagacaagccccaggtaaacgtctaaactgtttactcacattgtcctactccagccccttcaattatttcccatctccacaaatagtcgggggaaaaaattaaaattttcctttatgattcttactgttcttcgcagctcatcttttcctgcttagaattaaccattgctaatttaaaggagcagctagctgcttttctgtcagtctgaagcgtagtagtggaagaggtagtaagcaccagctgcctctttgctgctttgttttcctcctgattctcttaaatttgggttgcaaagctatcccgccccccaccctgccccatgaaacttgagcattcaaatgaagattcagcagtgtctgttcttcatttctatagccaaagctgttagttaaaatcccaaatctatagcatttaaagataccaaatagaaacaccttccagctttaaaaaaaaaaaaaaaaaaaaactcgagggggggtcccgtacccaatcgcctgacatgcatcgta

SEQ ID NO: 100 - DNA, 1049 bp, Homo sapiens
  misc_feature (8)..(8): n equals a,t,g, or c
taccgggnccccccccgrgtttttttttttttttttttaaatattgctcccattatgcccaagaatcaaagattcttttgtttgggtggaggactctctgtccacttagctccctcccaactcagctacagattaggtttgtttcaataacataaggactgttctccaaaagctctggcaactgtggacaaaaagggcttcttcgagctattacacaacatgtgactttgctaaatcaaacctttatttataagatatggaagaatcagttatttgtgtgataagacatgcgaattctaggatagtaggacctaggcagatgtccacatgaacttgagggactttaaaaatcttaggattttaactataacccactttactccaacaaaatagaccaaatagctaatacttacagaatacttaccctgtaccaggcactaagtactttatatgtgcgaaattaatcctctcagctctaactttacaaacgaggagacggagacacaaagcagataaggaacttgcccaggatcacaggtgaagtggcagaggctcgccctagctgccaacagacaccgcccccatgccaggctgctgcccatcgtgagcagcagtcccatgctaccaggctccgggtagtcaagaggccagcagtgttacaggtaggctgcatcatacagtcggcaggcttttgtgagctagcctgagaatctttcacaacactaaaatttgatgcgtcttcccacaggaagaaacactggacttccaatactgataataacagcagtagctaacattctaagagcattacctacgttaattctttgaatcctcagaataccatgaggtaggtgttattattacccctattttacagatgaagaaactgaggcacagagagtctttgtaagtaaccaacagtttagtaagtgggagatttgagattccaacccaggcagcctggcttcagagtcttggctaccggagtttttaaccctcacattatgctgccctcagaatgcttatttaacctttccggacgcgtgggt

SEQ ID NO: 101 - DNA, 1444 bp, Homo sapiens
actgttcagtactctaggaagtgggtcaggcaccttgggggcccaacgctgctccgtggggatgtctgcctgcctgcctggttctcttttcctgctgtttcctccagcagggaggtatcagaggcggggacacccaagtaggcctggcatgggcagaaaggaggtcacagctaaggcggtagagtggggttggcaccagccacttgtctgtttcccttgtggatcttagcctgtcgtctcccaaccccagctgcccctctgtctccccgcagctggtaggtgagtgctgtcctcggctcactttcctcaagctctccggctgccacggtgtgactgctgacgctctggtcatgctagccaaagcctgctgccagctccatagcctggacctacagcactccatggtgagccctgtgtcccaaggggccctgaaaaaacccaggccggggtgacgggtgctcttgtattggggccccaggtggagtccacagctgtggtgagcttcttggaggaggcagggtcccgaatgcgcaagttgtggctgacctacagctcccagacgacagccatcctgggcgcactgctgggcagctgctgcccccagctccaggtcctggaggtgagcaccggcatcaaccgtaatagcattccccttcagctgcctgtcgaggctctgcagaaaggctgccctcagctccaggtgctgcggctgttgaacctgatgtggctgcccaagcctccgggacgaggggtggctcccggaccaggcttccctagcctagaggagctctgcctggcgagctcaacctgcaactttgtgagcaacgaggtcctgggccgcctactccacggctctcccaacctgcgcttactggatcttcgtggctgtgcgcgcatcacgccggctggccttcaggatctgccatgtcgggagctggagcagcttcatctgggcctgtatggcacgtcagaccggctgactctagccaaggagggcagcccctttttgacccagaagtggtgccatacactgcgagaactggacttgagtggccaggggttcagtgagaaggacctggagcaggccctggctgccttcttaagcacccctgggggctcacacccagccctgtgctctcttaacctcaggggcacccgggtcacaccaagcactgtcagctctgtgatcagcagctgcccgggcctgctctacctcaacctggagtcctgccgctgccttccccggggtctgaagcgggcctaccggggcctggaggaagtccagtggtgtctgtagcagctgctcaccagcccctcacccagctaggcagccacagacctgggacacctcagccagcttgcccaccctccacctttgcccaatttcagatatttgagcattttgttaaaataaaacatttttaggaaaaaaaaaaaaaaaaaa

SEQ ID NO: 102 - DNA, 1277 bp, Homo sapiens
ggcacgagctttaattcaaaaatgtttgtagttaacattattttgatttcttcagttgttgcttggaatgtttttatactgaccaagttggtatgtgacgtttatttttctctgactataaaagtaaaaaagaactgaaaatacccaaaaagtaatgttttatagaaagtctcccattgatttaagaagttatctattagattgatatcagaagtttcatatgagtatttggcttatgcatttctgtcttttggttttaggcaaaaggatgtcaattcttgatgttaaactttaggattcttaaagtataatgaagactggaatgggctgtggggaacataatagtggatgacagtgacttaggattcaattcagaaaatagttgtgaatctgttttattttggttacagcctactcatacgatttatttcatattttctaagtgtatttttgttcttcctgtatgtttcttggcccttgagtcttctctgtctttaatctttctctcctctcctactatttatagccagtctcatattaatttcctttctctagggcctttaaccacttggtgctcatttcagaccagtagtagtagcaacaaagttctgcaaatcaaatgtatcttcactcctgctgtatttaagacacagctatctcagtatcttaaaataacaatgtaattattttttggcatacccttgcctgacttctgaggacctcactaagtctagttctagcctttgtagaatggtcaacttctttcatcaaggctttggtttcattactggtgtctgaattagttccactcctagcttgacccagattttagtttttattatggattttttcttcaaacttgtttatttaatattaagttttcatttttggcagcatatggatgattttatttttaataatcatatctcttagtaaactaatggttaaataatattaaagtataagaagctaaaattggccaggtgtggtggctcacgcctgtaatcccagcactttgggaggctgaggcaggcagatcacctgaggtcaggagttcaagatcagcctggccaacgtggtgaaaccctgtctttactaaaaatacaaaaattagctgggcgtggtggcgcacgcctgtagtcccagctacttgggaggctgaggcagtagaatcacttcaacccaggaggtggaggttgcagtgagcaaagatcatgctactgccctccagcttggatgacagagcgagactccatcttaaaaaaaaaaaaaaaaaa

SEQ ID NO: 103 - DNA, 2154 bp, Homo sapiens
  misc_feature (461)..(461): n equals a,t,g, or c
cccacgcgtccgarccgagctgaggctcggcttcctgctgatggtcagggttttggcaactccccggtgtgagaggggtagggagtgctcccggcggcgacggggccgagttcaccagccgccggggcagtagtcgaaggcccggcgcggcatgtcctgggtgccgcggtgcgggcagtgaacgcgcgccgggcgggatgggccggcgccgggcgccagagctgtaccgggctccgttcccgttgtacgcgcttcaggtcgaccccagcactgggctgctcatcgctgcgggcggaggaggcgccgccaagacaggcataaagaatggcgtgcactttctgcagctagagctgattaatgggcgcttgagtgcctccttgctgcactcccatgacacagagacacgggccaccatgaacttggcactggctggtgacatccttgctgcagggcaggatgcncactgtcagctcctgcgcttccaggcacatcaacagcagggcaacaaggcagagaaggccggttccaaggagcaggggcctcgacaaaggaagggagcagccccagcagagaagaaatgtggagcggaaacccagcacgaggggctagaactcagggtagagaatttscaggcggtgcagacagactttagctccgatccactgcagaaagttgtgtgcttcaaccacgataataccctgcttgccactggaggaacagatggctacgtccgtgtctggaaggtgcccagcctggagaaggttctggagttcaaagcccacgaagggagattgaagacctggctttagggcctgatggcaagttggtaaccgtgggccgggaccttaaggcctctgtgtggcagaaggatcagctggtgacacagctgcactggcaagaaaatggacccaccttttccagcacaccttaccgctaccaggcctgcaggtttgggcaggttccagaccagcctgctggcctgcgactcttcacagtgcaaattccccacaagcgcctgcgccagccccctccctgctacctcacagcctgggatggctccaacttcttgccccttcggaccaagtcctgtggccatgaagtcgtctcctgcctcgatgtcagtgaatccggcaccttcctaggcctgggcacagtcactggctctgttgccatctacatagctttctctctccagtgcctctactacgtgagggaggcccatggcattgtggtgacggatgtggcctttctacctgagaagggtcgtggtccagagctccttgggtcccatgaaactgccctgttctctgtggctgtggacagtcgttgccagctgcatctgttgccctcacggcggagtgttcctgtgtggctcctgctcctgctgtgtgtcgggcttattattgtgaccatcctgctgctccagagtgcctttccaggtttcctttagcttccctgcttcctgggaatcaggagcctggacactgccatctctagagcagagtggaggcctggactccctttgctcactccattcgggtccacagctgaggttgcctctgacaagatgaatgggcactgcctgcccttctagtgaaaaggcttggctatggccctgtgtgactccaggtcccaggaaccttgccttcgtcatctgtggatccatccagaacagcggtatctgaagcccaggccatactccctgcctcctttcttctgcctaccagaggctccagagttgagcttgtccttatctagaaacatgtgaagatgcccaagagcctggaggcactgctgtccttcctgcagaaacagtttctcctcctcccctcagccttgtggccagttcctcttcacatgaagcccctggcatttgctggggaagggactggcctggtacttgctgttagggcaggaaggggcaaaaggaagacttgggtagtaatctgggggttcagatgggtagcactaagccagctggcctaaagatgcaataagttcctaggtagtctacccttaccttgaggaatgggaaaatgaacctcagcccattaggcaggaaaagttgatatttaataaacaaggaaagagtgaactgagaccccaaaaaaaaaaaaaaaaaaaaaaaaaaaaaaaaaaaaaaaaaaaaaaaaa

SEQ ID NO: 104 - DNA, 1009 bp, Homo sapiens
ggcacgagcaaaggtgaagctggttttcatggtctcctgagggcccctggcccctgggagatgggtcacactccctgaatgctgtgctgttggtttccctggaggattcttgctgcaggccaggtcccgtattctccacactcaccacaagtggctgggtgtgacttgacacggtgtgaaagtggaggggcgcgagcactcagtatccagcgagcagcattggtggtcctagaaaattactacaaagatttcaccatctataacccaaacctcctaacagcctccaaattccgagcagccaagcatatggccgggctgaaagtctacaatgtagatggccccagtaacaatgccactggccagtcccgggccatgattgctgcagctgctcggcgcagggactcaagccacaacgagttgtattatgaagaggccgaacatgaacggcgagtaaagaagcggaaagcaaaggctggtggttgcagtggaagaggccttcatccacattcagcgtctccaggctgaggagcagcagaaagccccaggggaggtgatggaccctagggaggccgcccaggccattttcccctccatggccagggctctccagaagtacctgcgcatcacccggcagcagaactaccacagcatggagagcatcctgcagcacctggccttctgcatcaccaacggcatgacccccaaggccttcctagaacggtacctcagtgcgggccccaccctgcaatatgacaaggaccgctggctctctacacagtggaggcttgtcagtgatgaggctgtgactaatggattacgggatggaattgtgttcgtccttaagtgcttggacttcagcctcgtagtcaatgtgaagaaaattccattcatcatactctctgaagagttcatagaccccaaatctcacaaatttgtccttcgcttacagtctgagacatccgtttaaaagttctatatttgtggctttattaaaaaaaaaaaaaaaaaa

SEQ ID NO: 105 - DNA, 665 bp, Homo sapiens
cccacgcgtccgcacaggaagagtgtgtagaagtggaaatacgtatgcctcctttcccaaatgtcactgccttaggtatcttccaagagcttagatgagagcatatcatcaggaaagtttcaacaatgtccattactcccccaaacctcctggctctcaaggatgaccacattctgatacagcctacttcaagccttttgttttactgctccccagcatttactgtaactctgccatcttccctcccacaattagagttgtatgccagcccctaatattcaccactggcttttctctcccctggcctttgctgaagctcttccctctttttcaaatgtctattgatattctcccattttcactgcccaactaaaatactattaatatttctttcttttcttttcttttttttgagacaaggtctcactatgttgcccaggctggtctcaaactccagagctcaagagatcctcctgcctcagcctcctaagtacctgggattacaggcatgtgccaccacacctggcttaaaatactatttcttattgaggtttaacctctatttcccctagccctgtccttccactaagcttggtagatgtaataataaagtgaaaatattaacattaaaaaaaaaaaaaaaaaaaaaaaaaaaaaaaaaaaaa

SEQ ID NO: 106 - DNA, 1017 bp, Homo sapiens
ccacgcgtccgctcagcccatagtggagagcctcggcttccaggggggccgtctgcagcgcgtggaggtgacctggcgaggctcccaccctgaagccctggaggtgcacgtggaccctgtaggccccctggacaaggtgaggaaggccaagatccgagtcaagaccagcagcaaggccaaggtggagtctgaagagccacaggacaatgacttcctcagttgcatgtcccggcgctcgggtctgcctcgctggatcctggcctgctgcctcttcctctccgtgctggtgatgctgtggctgagctgctccaccctggtgaccgcgcctggccagcacctcaagttccagcctctgaccctggagcagcacaagggcttcatgatggagcccgattggcccctgtacccgccgccgtcccacgcctgtgaggacagcctaccaccctacaagctgaagctggacctgaccaagctgtaggcctccactggccccatcactgccaactgcagggggcccctcgggcctcacttgccctgagcccaggagtccaagggcagggtgggtccagccttgagcccctccacccccaaatccttcctctcctcccagtcccaccccttgccccacggagtcctggggacgcagtgccccagctgggaagagggcgggatcgggcactggttcctccttgtccccgctttcttgggggcttgctactttttgtcttctattgtgtggctttctgagtatttgaaccccagtcctgtgtcaccttcctttttccttctctgtcccctctctgcgggggggcgctgaggctgagggggagctgcgtcttgctagggcttcccccttctccccatcccggtctccagagacccagcttctgagagacagggtgtgggcatctccatgcccctataaagcgtgcctggggcttgtctggggctggggaggaataaaccatgtatataaaagaaaaaaaaaaaaaaaaaaaaaaaaaaaaaaaaaaaagg

SEQ ID NO: 107 - DNA, 2886 bp, Homo sapiens
  misc_feature (391)..(391): n equals a,t,g, or c
ggggcgtggcggccggaggaggcgttggcagcgggctcggacccacgcggcgccgcggcccgcctggcctgcagcgctcccacccccggcggcggcacgatgccctttgacttcaggaggtttgacatctacaggaaggtgcccaaggaccttacgcagccaacgtacaccggggccattatctccatctgctgctgcctcttcatcctcttcctcttcctctcggagctcaccggatttataacgacagaagttgtgaacgagctctatgtcgatgacccagacaaggacagcggtggcaagatcgacgtcatctgaacatcagtttacccaatctgcactgcgagttggttgggcttgacattcaggatgagatgggcaggcacgaagngggccacatcgacaactccatgaagatcccgctgaacaatggggcaggctgccgcttcgaggggcagttcagcatcaacaaggtccccggcaacttccacgtgtccacacacagtgccacagcccagccacagaacccagacatgacgcatgtcatccacaagctctcctttggggacacgctacaggtccagaacatccacggagctttcaatgctctcgggggagcagacagactcacctccaaccccctggcctcccacgactacatcctgaagattgtgcccacggtttatgaggacaagagtggcaagcagcggtactcctaccagtacacggtggccaacaaggaatacgtcgcctacagccacacgggccgcatcatccctgcaatctggttccgctacgacctcagccccatcacggtcaagtacacagagagacggcagccgctgtacagattcatcaccacgatctgtgccatcattggcgggaccttcaccgtcgccggcatcctggactcatgcatcttcacagcctctgaggcctggaagaagatccagctgggcaagatgcattgacgccacacccagcctaatggccgaggaccctgggcatcgccagccttgcctccagtgccctgtctcctttggccctcaatctggtcccaaatctggctgtgtcccaaagggtgtgtgggaagtggggggaaagtagaggatggctcgatgttttgcagctacctcttttccccgtgtttctttttagacaaattacactgcctgaagttgcagttcccctttccctggggagccccaagaacagagtcaggcaaggggtggggagtccagggatcttggggacccctcctaggagagctgcagtctcttccctcaggggaacatcccagaatgcatatcgatcagctctcagccaggcttcgacaatctcgcagcccccactaggtggacacattaatgatttggtttctcccctgggcagccaacctgccccagaggcaccagacctgggctttcagctttgggaccaggctgcccaaaggtactcctttatacacccggcaccttccacgaaagatggtacttcccaagcaagcccctatgatttgtcactatagatggaaccctgacttctgccccatcccttcctgcccaacctagaacccaggcctcaagtctttaccccacccctttcttgttcttccaagaagcagatgcccagttgctcagcagcagcggtagagacttgaatctgcccaccagtcacaaggcgggtcacagattcctcttcctctcttctcctcgttcctctgaaccctccaccaatgtgcctcagcctgtgtgctgtgtggcaacagcattctggttcccactgccaagatctcccaccactctgctgggatctgcagtggcagggagtgggggttgtgtaaaggggaagtcatcttttgagatccagatagacatggtttgtgcacttacgtccagatgggaagcatccttcctgcaaccctaaaataatcatgcagcctctcagacggacgccatcggtcccaaggccttaggtggaggaagcaaagcaggccaggcctgtcctgtccgtggacctctaccttctggactccctacgggtgcagagcayttgggtttctctacagccatcgtggcccacttgacactgtgctcctccatcagctggtcacatgccaacacgttcccagcccctgaggcagctccagggtgccccacctgctcctgaggtgggtccctaccctgctgctcctcttcatcctttcccttttgtcctgaaagggaggagcaatggtccaggcattaattccacccagggaattttagctatgccctcatgtcccagggagagagccacacgcctgttttccatttatagcaagattgtttgcatacttttgtaatgaaggggagtgtccagtggaaggatttttaaaattatcttatggatagctcaagtctctgccatttgtaatttttggctctaagctccgattggagacgcttctccttgtgcatgtgagttgactgatgttgtgagtgtaaatgcatttggttatttctggtatcggtggccacttggatggatttttttacattctgttccccagttacaggaaggagtccctttggtgtgtgaatatgtgtgcctgtagagggtggggcagggtggggtggggatggaaatgtgtggcatgcacatgagttgaaattcttttatgcatttttttgaagaaaaaaaaaaaaaacaactctgaggacataggggatgtcagtttcctatggaagagacacctctgacccgttattcttataatcaaaatctgaagggaaaaaaatgttttagttctttccccactcgttgggttcaactagattaaaaggctgattttcagaaaaaaaaaaaaaaaaaaaaaaaaaaaaaaaaaaaaaaaaaaaaaaaaaa

SEQ ID NO: 108 - DNA, 1298 bp, Homo sapiens
ctcttgcttgctgtgactggtggagctgccgcgctgtccgcgttatctcctcccggtgagaacgaaccgcagtgtccaccggcgaggagccagccctgtcccggtcagagaaagacgacgaggatacctgggagcgggcggcggccgggctgggccgcgccggtgcgggctggcgactctgctcctccgcttgctgctgtctctgggaactgggtgccagcgctgaggggcttccagcggacagggacccccttccccggctcccctgcccaccctgccggggagggcggaagatgccggtgaagaagaagagaaaatcccctggggtggcagcagcagtagcggaagacggaggcctcaaaaagtgtaaaatctccagctattgcagatcccaaccccctgctagactaataagtggagaggaacatttttcaagcaagaagtgcctggcttggttttatgaatatgcaggtcctgatgaagttgtagggccagaaggaatggaaaaattttgtgaagacattggtgttggaacctgaaaatattattatgttagttttagcgtggaaattggaggctgaaacatggggattttttaccaaggaagaatggtttaaagggaatgacttcattacagtgtgactgcacagaaaagttacaaaacaaatttgactttttgcgctcaacagttgaatgatatttcgtcatttaagaatatctacagatatgcctttgattttgcaagggataaagatcagagaagccttgatattgatactgctaaatctatgttagctcttctgcttgggaggacatggccactgttttcagtattttaccagtacctggagcaatcaaagtatcgtgttatgaacaaagatcaatggtacaatgtattagaattcagcagaacagtccatgctgatcttagtaactatgatgaagatggtgcttggcctgttcttcttgatgaatttgttgagtggcaaaaagtccgtcagacatcatagcaagaactatgtgaagaaaatgcaaacctttcaattcccacgtgtatacaagctaatgtgatgagggggaaaaaaatccaacgggtgcattttcattcatatgaaagacttctcatagtacttttttttcctttttttaaaggaggtttttcttgttacatgtgatgggcattgagccacacctcttcttagactgaatattgaagtttttgttttgagttatgtttataacatttatttcagaacaataaagattcagatttgtgacaaaaaaaaaaaaaaaaaaaa

SEQ ID NO: 109 - DNA, 879 bp, Homo sapiens
ggcacgagaaattacagcagtgcaaagcagagctaaactctaccactgaagagttgcataagtatcagaaaatgttagaaccaccaccctcagccaagcccttcaccattgatgtggacaagaagttagaagagggccagaagaatataaggctgttgcggacagagcttcagaaacttggtgagtctctccaatcagcagagagagcttgttgccacagcactggggcaggaaaacttcgtcaagccttgaccacttgtgatgacatcttaatcaaacaggaccagactctggctgaactgcagaacaacatggtgctagtgaaactggaccttcggaagaaggcagcatgtattgctgagcagtatcatactgtgttgaaactccaaggccaggtttctgccaaaaagcgccttggtaccaaccaggaaaatcagcaaccaaaccaacaaccaccagggaagaaaccattccttcgaaatttacttccccgaacaccaacctgccaaagctcaacagactgcagcccttatgcccggatcctacgctcacggcgttcccctttactcaaatctgggccttttggcaaaaagtactaaggctgtggggaaagagaagagcagtcatggccctgaggtgggtcagctactctcctgaagaaataggtctcttttatgctttaccatatatcaggaattatatccaggatgcaatactcagacactagcttttttctcacttttgtattataaccacctatgtaatctcatgttgttgtttttttttatttacttatatgatttctatgcacacaaaaacagttatattaaagatattattgttcacaaaaaaaaaaaataaaaaaaaaaaaaaaaaaaa

SEQ ID NO: 110 - DNA, 2007 bp, Homo sapiens
  misc_feature (1991)..(1992): n equals a,t,g, or c
gccaacatgagccaccgcacccggccctctccatcttccttgaacgaccccattcacctactgctcctatttctaagactgtgaccaacagagcactggagcatgcagcagcacacagaccccccgcccagatgcctcgtcgtctgggaccccatgcttgccccaggtcccttgggccacatactaatccccctctggagaccttgagggaggtaagattgggaattagcaatacctgaaatgtgttaattctctaggtcatgtttgactctactccagtcctcgtcgccctcttcctccaccccagacttggtgcaagctattccctctgcctacaacactcttcttctccatgtttacccamctcataaccactgatcctttaggcctcagcttttctcaacccccatgcagccattcaacagaatctggsctgtggmaggctctcttctaggtaacgaagtgsattccttgcagcmtttagggacccagggtatcaagggctccgcaattaactttgacacwtggtttccaagatcgccctgaccctgaatrtcccaaggccagacaggagaagagcgaaattggagggctgtgtgagaggcattttggattgggactggaggtagggaacatccctttagccttcattccactgcctggatagctttcacatggccatgcctaatggccagggaggcttatgaccatggtcagaaagtcagctgtgtttccagggtgacaaaggaacaggtttgtgaatcatcatggtctgaagttcctggtacacgggatccatttcactcatcttgcctcatagagaaccctcattctcacctcccacaagggagaaaatgcaaagtttcatgcagtcactgcacagagtcttccagtgatgtgcatttctggacatcaagcctgaaagcggtacatcatagtttgtcaatgtaaaaactaaaataaaaccgtaacaattccccaccacacaccaaaaaatacctaacatcaggttaatgttacctccctycctgagtacagaaacaggatacgcacaaggaaaactgccattagaaagggaaggtttggaggcccatggcaagttcctggtccacaagcaattatwaaactcttctgggcaggtactgtgaagtcctcatactcctgctggttcaaaccaaaggacccaaggttgttttaagcatgacagttaaaggagtttggggtcctagcatgagctgattggtttcttggcaatgcaagtttctcagaaatgtaataggttctgatgacttgtttctagttatttccatgtatccatagccatgtccagagtttcttgttgtacataattccctaacttgatgaattatgctttctagttcatagacttctctctctctaatgatagagtttatgcaaaaccatcagacacaggtgggaagattacacctattattattacaccaattatttcatcttttctacagggctcagtcttaactggccacttaaaggatttttcatacttattttctattattgagctttaggtacaatcagctttttcaaccctgtgaaataccaaatttctrrgtratctgttctctatatcatttatatcatttataaactagcccttccttccctrarcctawttatctcctctaataagctttttaaaagcacaactaacaggccaggcacagtgctcacgcctataatcccagcactttgggaggccaaggcaggtgaatcacttgaggccaggagttcaagaccagtctggacaacatggtgaaaccccatctctagtaaaaatacaaaaattagctgggcgtggtggtgcacacctgtaatcctagctacttgggaggctgaggcacaagcattacctgaacctgggaggcagaggttgcagtgagccgagattgcaccactgcattccagcccgggagacagagcaagaccctgtctctgaaggaaaaaaaaannaaaaagggcggccgc

SEQ ID NO: 111 - DNA, 788 bp, Homo sapiens
  misc_feature (274)..(274): n equals a,t,g, or c
ggcacgagaaaccactatgcttaatgttaacatgattctgtttgttaatattttgacagattaaggtgttgtataaataatattcttttggggggaggggaactatattgaattttatatttctgagcaaagcgttgacaaatcagatgatcagctttatccaagaaagaagactagtaaattgtctgcctcctatagcagaaaggtgaatgtacaaactgttggtggccctgaatccatctgaccagctgctggtatctgccaggactggcanttctgatttagttaggagagagccgctgataggttaggtctcatttggagtgttggtggaaaggaaactgaaggtaattgaatagaatacgcctgcatttaccagccccagcaacacaaagaatttttaatcacacggatctcaaattcacaaatgttaacatggataagtgatcatggtgtgcgagtggtcaattgagtagtacagtggaacctgttaaatgcataacctaattttccygggactgccatattttcttttaactggaaatttttatgtgagttttccttttggtgcatggaactgtggttgccaaggtatttaaaagggctttcctgcctccttctctttgatttatttaatttgatttgggctataaaatatcatttttcaggtttattcttttagcaggtgtagttaaacgacctccactgaactgggtttgacctctgttgtactgatgtgttgtgactaaataaaaaagaaagaacaaagtaaaaaaaaaaaaaaaaaa

SEQ ID NO: 112 - DNA, 797 bp, Homo sapiens
ggcacgagcccacctgactgacaaaaaaaagagcaatcctttatgcctctgtcctcccccagttattctaggttctggtcccttacacctggccaagctgtcaggtattattatggcatcttgttcagctaattaagcagtacaactgagacaattgccaccccatttgtcatgtgtggtgccttccaagatagcccccagtgattctcacctcctgatattcacacccttgtgttgtgtcctcccatgtcataccaaggttggtctttgtgataaaattcagggaagtgatggtgtgtgacttgtgacactagatccgaaaagacacggtgatgtctgacttgttctcttggatgtctctccctgagtgaagccagctacttttcatgaggatactcaagcattcctatggagagatccacatggtgagaaactgaagcctcctaccaagagccagcaccaacttgccagctatgtgaatgagccatcttagaagtgggttctctagccctagtcaggccttcatatgactgcagccagggctgatattttgactacaacctcatgagagactgagccacaacaacctagctaagaagctcctgaattccctaccaacagaaactatgtgagataatgtttgttgttttaactaagttttcaagtggtaatttgttatacagaatatgtaactaataaagcatggctcctttaggtctaaaaaaaaaaaaaaaaaaaaaaaaaaaaaaaaaaaaaaaaaaaaaaaaaaaaaaaaaaaaaaaaaaaaaaaaaaaaaa

SEQ ID NO: 113 - DNA, 652 bp, Homo sapiens
ccacgcgtccggagatgactcatggaaaaattgtgttggcttggtctgcatgtttaatgatgtgcttgtatatcgattagctgtgtcacttttaaataagaagtccacacaagcaagccaaatttttagatgacgaagtccataaataactagagaatttttgttatctgttgttaagttgaaatgtataatcatttatcactaaattgcacattgcctttatttatttgtgctctgtttttggtttacagtgtaataatacctcatttaaaaaataaaaaccactactgttacattttattaatttaaaaagctagaaaattcatgtagttactttttttacatatataatctgttaatgaattattgatttttgtatctgccacagtaaattaaagcattacacagtatttatcagtattttttaaacatcctgtccttttttaaaatctttgcttagtcagtcatatttttgtctgtatgattagaagtttttacgtccttccttttttgtacaaatctgtattgtattaatttctggatgcaatttttcaaatattaaaattatacagtcagtcaggcttcagtttattttttgaacacttgggcaattaattaaagccatatgtttaaaataaaaaaaaaaaaaaaa

SEQ ID NO: 114 - DNA, 1488 bp, Homo sapiens
cgccaagtttccggagggagagggtagaaactggagggggtggacctgtcactcacgggactgagggtccttttctcccgctcccaggaggaacgagaatgaatatgactcaagcccgggttctggtggctgcagtggtggggttggtggctgtcctgctctacgcctccatccacaagattgaggagggccatctggctgtgtactacaggggaggagctttactaactagccccagtggaccaggctatcatatcatgttgcctttcattactacgttcagatctgtgcagacaacactacaaactgatgaagttaaaaatgtgccttgtggaacaagtggtggggtcatgatctatattgaccgaatagaagtggttaatatgttggctccttatgcagtgtttgatatcgtgaggaactatactgcagattatgacaagaccttaatcttcaataaaatccaccatgagctgaaccagttctgcagtgcccacacacttcaggaagtttacattgaattgtttgatcaaatagatgaaaacctgaagcaagctctgcagaaagacttaaacctcatggccccaggtctcactatacaggctgtgcgtgttacaaaacccaaaatcccagaagccataagaagaaattttgagttaatggaggctgagaagacaaaactccttatagctgcacagaaacaaaaggttgtggaaaaagaagctgagacagagaggaaaaaggcagttatagaagcagagaagattgcacaagtggcaaaaattcggtttcagcagaaagtgatggaaaaagaaactgaaaagcgcatttctgaaatcgaagatgctgcattcctggcccgagagaaagcgaaagcagatgctgaatattatgctgcacacaaatatgccacctcaaacaagcacaagttgaccccggaatatctggagctcaaaaagtaccaggccattgcttctaacagtaagatctattttggcagcaacatccctaacatgttcgtggactcctcatgtgctttgaaatattcagatattaggactggaagagaaagctcactcccctctaaggaggctcttgaaccctctggagagaacgtcatccaaaacaaagagagcacaggttgatgcaagaggtggaaatgttctccatatcaagatgtggcccaaggggttaagtgggaacaatcattatacggactcttcagatttacagagaacttacacttcatctgttccacctctcctgcgatagtcctgggtgctccactgattggaggatagagccagctgtctgacacacaaatggtcttttcagccacagtcttatcaagtatcctatatgtattcctttctaaactgctactcatgaatgaggaaagtctgatgctaagatactgcctgcactggaatgttaaacactaaatatataacaagctgtgttttcctaagctgaaaaaaaaaaaaaaaa

SEQ ID NO: 115 - DNA, 721 bp, Homo sapiens
cggccgtgtcacagctgggaatgatgaggtggrggctgctgctcaggctgcaggcatccatgatgccattatggctttccctgaagggtacaggacacaggtgggcgagcggggactgaagctgagcggcggggagaagcagcgcgtcgccattgcccgcaccatcctcaaggctccgggcatcattctgctggatgaggcaacgtcagcgctggatacatctaatgagagggccatccaggcttctctggccaaagtctgtgccaaccgcaccaccatcgtagtggcacacaggctctcaactgtggtcaatgctgaccagatcctcgtcatcaaggatggctgcatcgtggagaggggacgacacgaggctctgttgtcccgaggtggggtgtatgctgacatgtggcagctgcagcagggacaggaagaaacctctgaagacactaagcctcagaccatggaacggtgacaaaagtttggccacttccctctcaaagactaacccagaagggaataagatgtgtctcctttccctggcttatttcatcctggtcttggggtatggtgctagctatggtaagggaaagggacctttccgaaaaacatcttttggggaaataaaaatgtggactgtgmraaaaaaaaaaaaaaaaaaaaaaaaaaaaaaaaaaaaaaaaaaaaaaaaaaaaaaaaaaaaaaaaaaaaaaaaaaaaaaaaa

SEQ ID NO: 116 - DNA, 1842 bp, Homo sapiens
  misc_feature (1134)..(1134): n equals a,t,g, or c
  misc_feature (1210)..(1210): n equals a,t,g, or c
aattcggcagagtttgggtctcagctgccacctcccttccttggatgctgtcccaaccaccccattccaaaagaggttatcgcttgtgattctctatcactgggccaaatctgcctgttgcctagtgctcctagccctttctatattaattcatttcattatttcagccctgtctcctccactaggatataagctgcacgagagatgggctatgtctcttactcactgttgggcctcccaggacctcagcacagggcctgacacacagtargtgggttaatagatactgattgaatgaaagaacaaggtgggtactaaaatcccccttttaaagaggaggcttggagttatgaggttgtacgagcaaagcttattccctaactaccacagtcccccccctgcagccagggccgggatcataccacaattccctgcccatcaagctgtcatgaatagccctaagatatcaggaagcacaaagatatcaatgccaggagggataggaggaggcggccaagaaaccccggaattgtacttaaaawtctggctacgcaaactgcttgcccaactttagacaccatgatgaatgatcaggtgctgcaaccatgaaacatgacgtaattagtgctgcactcttggctgggggttggcttggaggccccacctcgaggttagcctcccccagagggtcactgcacgargcagtctggtgcggggtgggggttacaacagagggaggtggaatcagaccactcggcagccctgtgaccattatgtgcacttttatacaaaggatacaaaagacaccaatactggggaatttatttaagaatacttctaggatgtgtcctgtgatgcctcaggtctatgtcccacattttcttaaatctatagtcctgtgtaataagaragartatttgaaagattagtcaattaattggtctaacaaaaagaattctatttctgcagccccaggagtggaagaaagagccagaactctgtggtgcagggctttagacttgcttcaggtcttctttcccctgggtcttctggatcttgctgccctggccatgaaagggaaaggataaaggaagtttgttcccttaagaccttgtgctgccctgtgctatctgnttctggccaacctgaatttgagaacgcttcttcagtttgcatctgtgtgaccttgggcaagataggaactgtctgnatctgctccttcagctacccaccttgtaaagcagttgggcaccatagagtagctgctgkcacagtggggtattctcttaccatcaatatggctggcatagtcattctacttctcctttacttgggcccttgcctaggccactcagcctccccagagcaggccccctctcagtcccaaggcctcctaggcctaggtgtctgccctagctggagaaaggcacaagaagaaaacaccagtcaatgggagaaaagtcccccaggccagtcttccacctagagcccctcccctttctcaccacaaagrttgcttcactgagggcggggcgcagtggctcacgcctgtaatyttaacaytttgggaggccaagacaggcgatcacttgaggtcaggagttcaagaccatcctgaccaacatggcaaaaccccgccttcattaaaaatgcaaaaattagccaggcatgatggtacacacctgtagtcccagctattggggaggctgaagcaggagaatcgcttgaacccaggaggtggaggttgcagtgagtcgagattgcgccactgcactccagcctgggtgacagaatgagactctgtctcaaaaaaaaaaaaaaaaaaaaaaaaaaaactcgtag

SEQ ID NO: 117 - DNA, 1427 bp, Homo sapiens
gaacatttcaagtagcctccctctatgttcctttcctttttaaatatattgataatcctactgcagggaatttgggagccatacttggtcttcgcatgcaacgtaattagatataactatactatgtgaatatgactaaagaaatgaaaatgaaaacagtatcttgtgctctgtaacgattgttattaaatatatcatagaaatgagaagagtaggctcaggagctgaactgcctagttcaaaaggccaaatttactactttttgttccgtgattgaatttgttgtgctcctgtttccttagttgtaaaacagagataacaataggacgtgcccataagcttttcatgaggattaaatgagttaatgtgtttggtggggaccaggtggacatggtactggtagggccctatttgacattggctttaagtatcattggctttaagtgcatcagtagatatatgatgacaataattgtattatcatggtgatatggatttcttataaatacttgtattatgttagtcacttctagaaaagaatacatctatacagtagaatataattcaaaaaataatgtcatatttttgtaaagaaattttttgtaaaacttttcagtcttcaaagagtttcatagactttattccatttatattgagagcctactttgtgttaagcattttgctgaacattgtcctcactcttatgttacttaccatctattgggaagagaaagaagtaaacaaataattacatgtagagtagtagtgtcaatggtagaggcatgaacacaacacagatttaacactagagaaagagtgatcacaaaagaaatgatgtttcagttgagttttaaatggcagctggagttcatctgaatgattaggtgtctaggacaggtttaaaggttagggagtaaggaagataatattcaaaataaaaagaacctgaggatattcacagaggacatttgcagaggcctgaaatagcattggtacattcctagaaccataaatagtttgatggtaatgtaaattacagtatgttttgaaaaatcatggaagatttataccacgatagaaacttcaactttattctaaagttgatgagcatttgacagattttaagcaagaaacaaatattaaatttatattttagaaagattctagatacataaaaagcacttattataatccagtatccattcatgataactctcagctaactggaaataaaagggaacttccttagtctaaggaagaacatctacataaattctacaaccagccacatacttaatggtgaaataatgaatgtttttctcctaagatcaggaaaaagaaaaagatgtctcctcttacttctattcaggatggtactggtagttcaggccagtacagctatgcaaaaaaaaaaaaaaaaaactcga

SEQ ID NO: 118 - DNA, 1768 bp, Homo sapiens
  misc_feature (1743)..(1744): n equals a,t,g, or c
cccggaatttccgggtcgacccacgcgtccgtttgaggatgagccacctttattagaagagttaggtatcaattttgaccacatctggcaaaaaacactaacagtattacatccgttaaaagtagcagatggcagcatcatgaatgaaactgatttggcaggtccaatggttttttgccttgcttttggagccacattgctactggctggcaaaatccagtttggctatgtatacgggatcagtgcaattggatgtctaggaatgttttgtttattaaacttaatgagtatgacaggtgtttcatttggttgtgtggcaagtgtccttggatattgtcttctgcccatgatcctactttccagctttgcagtgatattttctttgcaaggaatggtaggaatcattctcactgctgggattattggatggtgtagtttttctgcttccaaaatatttatttctgcattagccatggaaggacagcaacttttagtagcatatccttgcgctttgttatatggagtctttgccctgatttccgtcttttgaaaatttatctgggatgtggacatcagtgggccagatgtacaaaaaggaccttgaactcttaaattggaccagcaaactgctgcagcgcaactctcatgcagatttacatttgactgttggagcaatgaaagtaaacgtgtatctcttgttcatttttatagaacttttgcatactrtattggatttacctgcggtgtgactagctttaaatgtttgtgtttatacagataagaaatgctatttctttctggttcctgcagccattgaaaaacctttttccttgcaaattataatgtttttgatagatttttatcaactgtgggaaaccaaacacaaagctgataacctttcttaaaaacgacccagtcacagtaaagaagacacaagamggccgggcgtggtagctcacgcctgtaatcccagcactttgggaggccgatgcgggcggatcacaagggcaggagatcgagaccatcctggttaacacggtgaaaccccgactctactaaaactacaaaaaaaattagctgggcgtggtggcgggcgcctgtagtcccagctactcagraggctgaggcaggagaaaagtgtgaacccagragscggagcttgcagtgasccgagatcacaccactgcactccatccagcctgggtgacagggtgagactctgtctcaaaaaaaaaaaaaaaaaaggagacacaagacttactgcaaaaatatttttccaaggatttaggaaagaaaaattgccttgtattctcaagtcaggtaactcaaagcaaaaaagtgatccaaatgtagagtatgagtttgcactccaaaaatttgacattactgtaaattatctcatggaatttttgctaaaattcagagatacgggaagttcacaatctaccttattgtagacatgaaatgcgaacacttacttacatattaatgttaactcaaccttagggacctggaatggttgcattaatgctataatcgttggatcgccacatttcccaaaaataataaaaaaatcactaaccttttttaaggaaaatatttaaagttttacaaaattcaatattgcaattatcaatgtaaagtacatttgaatgcttattaaaactttcccaattaattttaaaaaaaaaaaaaaaagggcggccgctctagaggatccctcgaggggcccaaggttactcnnaaagagtttcccttaaagatcccg

SEQ ID NO: 119 - DNA, 840 bp, Homo sapiens
  misc_feature (789)..(789): n equals a,t,g, or c
  misc_feature (805)..(805): n equals a,t,g, or c
  misc_feature (836)..(836): n equals a,t,g, or c
gtctgtctcctactggcacaacagaattttggctgggaaatgagaagattcatttgataagcacacagtctgccatcccatatgcattaagagtggaactggaagactggaatggcagaaccagtactgcagactatgccatgttcaaggtgggacctgaagctgacaagtaccgcctaacatatgcctacttcgctggtggggatgctggagatgcctttgatggctttgattttggcgatgatcctagtgacaagtttttcacatcccataatggcatgcagttcagtacctgggacaatgacaatgataagtttgaaggcaactgtgctgaacaggatggatctggttggtggatgaacaagtgtcacgctggccatctcaatggagtttattaccaaggtggcacttactcaaaagcatctactcctaatggttatgataatggcattatttgggccacttggaaaacccggtggtattccatgaagaaaaccactatgaagataatcccattcaacagactcacaattggagaaggacagcaacaccacctggggggagccaaacaggctggagacgtttaaaagaccgtttcaaaagagatttacttttttaaaggactttatctgaacagagagatataatatttttcctattggacaatggacttgcaaagcttcacttcattttaagagcaaaagaccccatgttgaaaactccataacagttttatgctgatgataatttatctacatgcatttcaataaaccttttgtttcctaaganaaaaaaaaaaaaamwnggggggggcccgkacccattggccttatggngggc

SEQ ID NO: 120 - DNA, 903 bp, Homo sapiens
ccacgcgtccggatgaattagaagaaagaggtttggggactcagcggatactagttcttttaccttctgcttggtaacttagattaaactgagcattgtttttctgtcacaaatgttttccttatgacactggtttcgacatgtaaaatgtgtttgaaaacctgctttgtagatgcagagagaagctataggaaacccagtaccacccctggtctgttctgacgagacatcgttcataaggcacagcacatcgcaagatgaacagttgttaataaaagctgttgctggaaacttgctttaggaacagctcaagaaccttggagttcatatttcacaaatattaataaatataagtccaagagctgtcagcctaatctgtaggagcagaacctctgattgaccaaaaggcatatgggtttaggttggttttttgatgtcatatgtctctgatggggctgcaagtgctacctcgcgcttgtacactgctgctgtggggctccgcgcctgccggtgaagagctgcagatgccgagaagccagcaaacacagggcccactggaaaaaaatagttttttcattagtatttctcgggaggacccaaaagttaaggtcagcttgttcactgtaatttctggaagaagttcactcagaccttcctgaattcagatcatctcagaagtctggagggaaatctggcgaaaccttcgtttgagggactgatgtgagtgtatgtccacctcactggtggcaccgagaaacttacttccttgtattaagtgcacttcttgtatttctaataagatgactttccagaaagtgagatttgttatgttctggcttttaaaaggtaaaatataaataaatttcataacttaatctaaaaaaaaaaaaaaaaaaaaaaaaa

SEQ ID NO: 121 - DNA, 976 bp, Homo sapiens
ccacgcgtccgtgaagattcaagtcagttgttcagttacttgaagcaaaacgaaatctttcatttcagtcaaatcactgcagtcatgaaatactgaacaattgccttaagtctttgcttgactcactgggatagactgaggctttgggtgtgtctgtattagcatttcattagtacttcacatgcttttgatgtactcttgagattgctttaaattttgtattgaaacaacaatacattttgcactgtagtaatgggagcactaactcttacaacagttagtgaatcgttttaaagaatcagttcagtgtagacattttgaaaagattgtttcctgtgctttacgatagcttagtgcaatgtgcacttctgttttacttgccattttcctgctctgtttctctgtgacatgaagcaacagaaactgagatcaaagttaagattatatcctgtttgtagtatcagatatttttctgtgtacaattataggattgtaatctaaactggaatttttaggcagtaagtcaccacaaaatgttttagataagacacaataaaattattataaataaaagcttaatgtttgtaaaaaatctcttttttagtatttcttttttcacatgaaagaagtggtggctgctaaaaaaaaagctacagtgtttattaagggtctttttgatttatgtaaatatttgtaaattggtcagtgcctgtaaatttaaatataaaaagtaaccttgaaaacagttttaactttttcaaaagaactatgtccaacattttttagacctgctgtagtacagttttgtacctctaacgtattttttttttgcagaccaaatgctaaaacttttgcttttctttgacttgtaaaaggtgcacattttcattttcttccttaagttcaaatttttgtatgatgtcaaatgcaataaaatttatatatggacaaaaaaaaaaaaaaaaaaaaaaaaaaa

SEQ ID NO: 122 - DNA, 804 bp, Homo sapiens
ggcacgagctgatgtgggctggggccagtaggggcaggacaggtgccaggctggctgttcctctgcatgcctggtgcaccctgtggccgctagcccttggccaggccatcctgttgcagatcccagtgctgccacagggacaccaccaggcacctccctaggcaacgccaagcaggaggacctcacccacacccatggcaaagcaaaacaaaagaggcaccccgaccccattctacagaagccccagtccatggtcacctgtattctacctcacactccagcgtgggctttttccaggatgtgccctgagcctgttctgaacagctgtaaccccaactcccccacacaatgtgtctgcctgggaggtaagtaagtccagactgggtgtccaggagctggaacccagagagcgtcctgtccctaaccagccactgcagccctccagctctggccctcagctgcttgacaggacggactgctgggagatggcagccggttggcagggcccttgccctcacaccccgctgcccaggagccaggtctgaacttctgtgcacaggcctggcccctcagactcactcctgccaagaggggccacttcttcagggtgagccccggctatcaggcagccgtgagctccagggcgggctgcagctcccatccccttgcgccatgtttggagtaaagggatcagtggaagtggaggagccacttgggttctcctaagaccagcccttccggaggggccggtcctggaagaaacccataatccctggagtgtgaaaaagggcaaaaacggcacga

SEQ ID NO: 123 - DNA, 2062 bp, Homo sapiens
ccacgcgtccgatcaattagatgccccgaaatctacagtcgctgaataaccaataaacagtaacctccatcaaatgctataccaatggaccagtgttagtagctgctccctgtattatgtgaacagtcttattctatgtacacagatgtaattaaaattgtaatcctaacaaacaaaagaaatgtagttcagcttttcaatgtttcatgtttgctgtgcttttctgaattttatgttgcattcaaagactgttgtcttgttcttgtggtgtttggattcttgtggtgtgtgcttttagacacagggtagaattagagacaatattggatgtacaattcctcaggagactacagtagtatattctattccttaccagtaataaggttcttcctaataataattaagagattgaaactccaaacaagtattcattatgaacagatacacatcaaaatcataataatattttcaaaacaaggaataatttctctaatggtttattatagaataccaatgtatagcttagaaataaaactttgaatatttcaagaatatagataagtctaatttttaaatgctgtatatatggctttcactcaatcatctctcagatgttgttattaactcgctctgtgttgttgcaaaactttttggtgcagattcgtttccaaaactattgctactttgtgtgctttaaacaaaataccttgggttgatgaaacatcaacccagtgctaggaatactgtgtatctatcattagctatatgggactatattgtagattgtggtttctcagtagagaagtgactgtagtgtgattctagataaatcatcattagcaattcattcagatggtcaataacttgaaatttatagctgtgataggagttcagaaattggcacatccctttaaaaataacaacagaaaatacaactcctgggaaaaaaggtgctgattctataagattatttatatatgtaagtgtttaaaaagattattttccagaaagtttgtgcagggtttaagttgctactattcaactacactatatataaataaaatatatacaatatatacattgstttcactgtatcacattaaagtacttgggcttcagaagtaagagccaaccaactgaaaacctgagatggagatatgttcaaagaatgagatacaattttttagttttcagtttaagtaactctcagcattacaaaagagtaagtatctcacaaataggaaataaaactaaaacgtagatttaaaaagaactgcacgggctttagggtaaatgctcatcttaaacctcactagagggaagtcttctcaagtttcaagcaagaccatttacttaatgtgaagttttggaaagttataaaggtgtatgttttagccatatgattttaattttaattttgcttcttttaggttcgttcttatttaaagcaatatgattgtgtgactccttgtagttacacttgtgtttcaatcagatcagattgttgtatttattccactattttgcatttaaatgataacataaaagatataaaaaatttaaaactgctatttttcttatagaagagaaaatgggtgttggtgattgtattttaattatttaagcgtctctgtttacctgcctaggaaaacattttatggcagtcttatgtgcaaagatcgtaaaaggacaaaaaatttaaactgcttataataatccaggagttgcattatagccagtagtaaaaataataataataataataaaaccatgtctatagctgtagatgggcttcacatctgtaaagcaatcaattgtatatttttgtgatgtgtaccatactgtgtgctccagcaaatgtccatttgtgtaaatgtatttattttatattgtatatattgttaaatgcaaaaaggagatatgattctgtaactccaatcagttcagatgtgtaactcaaattattatgcctttcaggatgatggtagagcaatattaaacaagcttccactttaaaaaaaaaaaaaaaaaaaaaaaaaaaaaaaaaaaaaaaaaaaaaaaa

SEQ ID NO: 124 - DNA, 626 bp, Homo sapiens
ccacgcgtccgatagacgagttgaagattttgtttttcatatacaattcagccagtcctagctaaaacgcaatcactggaaatttaaccttaaattcatttaaaactgaaaaaggtcttttgaaatcaaactaatgcagaaactgctttacccaaaattctgatccatggccctcattagacgacccatcaggacaaataaagtttagcttgtgaacaagtcccagttttgtcaaaaatataatttggattgaagtgtcttttagaaactgacacatttgtgttattatctcatgaccaaaattctaaaatgaaagctacagtgtcttatttgtgtgcgtatgtggttaatgtgtttatgcatatgtatgtgtatatgttgtatgttgttatctacatggtaaaatctggcatcatcaacaaaaaatctattaagggattctatctagattggcttagataaataagcattcataaaaaatatgtactaattaacccaaatgccttttagttcatgtgacttaagtatatctttaataaacaaatcagttttaaaattgttggtaaaataaaaatacaaatgttctcagaaaaaaaaaaaaaaaaaaaaaaaaaaaaaaaaaaaaa

SEQ ID NO: 125 - DNA, 752 bp, Homo sapiens
ccgcttaatacagtatcctttcgatagcatctaaattggtgttttgttttgttttgttttcaactgttattagtaggcaaagccttctttcaaaataaaatcgacatgaagcctgtgggatttagcagactgaggcaaagcttccctggttgctttggaatgggaggcctggacctgctggctctttgccctcctgacacatcatcccttgtttccacagcacactcagcattggaagcacactgcagacggtgtctcattaaagcagtagctcccttgaacccacaagttaaaacgccagacttttatttatttgtttattttttctgagttcttattggcagacttcagaatgaggtacctgaggaaatatagaaacctctgccttaaggttgattttactaaatgctctattttctggtgcagttattgactgtcttatctcttttgtcaggaatgtcttttttaattagaagacaggaagaaaacaaaaaccagactgtgtcccacaatcagaaacctccgttgtggcagaggggccttcaccgccaccagggtgtcccgccagacagggagagactccagccttctgaggccatcctgaggagttcctgtttgggggtgtgagggaaaatcagcgcggattttaaaaagatggctgtggcctgcccggcgtggtgggaggggagctggtttcctggtgaactttctaaaaggaaaaataattttaagtaaagaaaaaaaaaaaaaaa

SEQ ID NO: 126 - DNA, 640 bp, Homo sapiens
ccacgcgtccggttacaatttgggtcagaaacggagagatctgtgttaatttttgcagaacttactgatttttgttcttttattgctcttgtcattaggatgaaaaccaaaaaagtatcttcagaggaaaaaaatcaccttttaatattgctagttagaaaatgtcatgaacagtgtatcttagaaatataatattctacttatttacacatgtcaaaatttgtgtctcttccagtgttccttgcctgtatctccccttggttcaatagctaccagatttttggaagaggaggaactgaggtctcatcacattctagagcgcttggatgcccatattgaagaactaaaaagagagagtgaaaagacagtgagacaattcacagccttaaagtagcctcttaaaaaaatcacaatcttggaaataaaaataaacaccaaagagttactgtcatctgaagtagcagctctttaaaaacatgaagagataaaattataaaaatgatacatctaaagcagtggtgaagaaagctgaaaaactgatacttttgataggcattttctctgcactggtttgtttaaaggacttcttccagcaataagttgaaagaataaaccactttgctagaaaaaaaaaaaaaaa

SEQ ID NO: 127 - DNA, 443 bp, Homo sapiens
ggcacgagagcgcccatcctgcagctcaactgggagcatcattctcctgctttgtacatagggtgtggtcccctggcacgtggccaccatcatgtctaggcctatgctaggaggcaaatggccaggctctgcctgtgtttttctcaacactacttttctgatatgagggcagcacctgcctctgaatgggaaatcatgcaactactcagaatgtgtcctcctcatctaatgctcatctgtttaatggtgatgcctcgcgtacaggatctggttacctgtgcagttgtgaatacccagaggttgggcagatcagtgtctctagtcctacccagttttaaagttcatggtaagatttgacctcatctcccgcaaataaatgtattggtgatttgaaaaaaaaaaaaaaaaaaaaaaaaaaaaaaaaaaaaaaaaaaaaaaaaaaa

SEQ ID NO: 128 - DNA, 1190 bp, Homo sapiens
ggcacgagaacagatggaccattgacaatccatatatttagaaatgatcaaacctaatgttttccttttttaagatgaaagtaaacataaatagagatggtatttttttctgcaattctctttttatacatcttatatctctttgcagattacagttctatatttgacttcccataacatgtcacaggacatgtgctttaaatcccccacaagttgttctcttgtggatatagtctaggtcttctgggttgtcccaaaatatgatgtgcacagacacaaacatattctgtatattggttttggattaacacagaatgcagtgggatttccttcctattatcattatatttcccttaatgcagtccaagatatgtattagtgtctaaagaagtataccacatccttaggtcttttaaaaagtatcatctgcctcttgggactctgggctatctttactaatccatctcaagtattattttggtctctcctttccactaaaactaaatatcctccactctgctgtcctaccaaattaatgtatggccattggcagtaaactcctttatacttagtgctttctcaattttaaaatgtttgaatattacactgatgcagaagttatttcataagcatagctttttcttgtgtggggtggaaagggaagaggattaaatcactgcctcacttgagcacatacatagctggaaaatgtgtggaaagtttcttgatgttgagaaaaaaagacagtgtcttgttaatcaataaattccgtttatttttcttttactatgtcctttactatatcataactgtagccttgctatatcctgaactcctcacaaaggccttctctgagccaactaaattaatgataaagaattgtaattcttggctgggtgctgtagttcacgcctgtaatcccagcactttgggtcactgaggtgggcagatcacctgaggtcaggagttcaagaccagcctggccaacatggcgaaaccccatctctactaaaagtacaaacattagctgggcatggtggcatgcacttgtagtcccagctactcgggaggctaaggcaggagaatgacttgaaccctggaggcggaggttgcagtgagccaagattgcaccactgcactccagcctgggcaacagagcgagactccatctcaaaaaaaaaaaaaaaaaa

SEQ ID NO: 129 - DNA, 1204 bp, Homo sapiens
ggcacgagcccacgccaaacctctgggctggccaggctcactccagccccacagtcattgccaggactgcctttgaccttacacagaggaaacatcttccacctgtcgggagggagccgggggcggggatttccatggcaaaatttactgttctctggtgatagagttctttcagttttgctacatggtcttgtggcaaaggactgggtgcaggtgcagccttggttatttctggaaacacttctccttttcttttattttgccaggtctggctcatcagtcaccttcctctcagaaaggtgattttggctcctctgcccagaccatcaaacatttctggaggtgtcacaagcttccgtgaggttctggtctctgcgaattgcaggaagaatccaaacataggaaaggggtgatgtgtatcagggtgtccatcctcagctttgctccacaaagaccctcacacttgcacattgttttgttaacagtattatctctgagtagtgggtttattgtttttgcttacctgttttaaacacttcttcaacaaacttgctttactttccattttttaaaagtgtatttcaattttttattaataatgccattttactcctgcaaaatttctcactccttcaaagtctgtgtatggcaaagatcttcctaaccatcattcaagttagagcaactccatttctgtatcaaaaagaaatacctttagttattgtctgaacttgtcagaatttctgagaacgatgccagaaattctgtaattgttttgtcacattaattgaacaatgagagggcaccagcattcctcactcatgaggtagaagcaccacatctacatttctttttagctatgggtgatgtttttgcttttaaatcttagaaatctgttaataaacaaataacacaacaaagtttggggtacttccttgtggggactgggatgcttaagctaaaacaaagtttaaatttggactgtgtgtgttatgtttcgcagaatctatatgtttctcaaaagtgggtgtcaccctccttcctcccccaacacacccttcaggggtaagaggagaagtaatgtagaaaaattaactgtttctccactgtaaaagtagggtgtctttagaatgtttcatgttcaaaggaaagattgtgcttctcccaaggcaaggtgttcccttaaaaaaaaaaaaaaaaaaaa

SEQ ID NO: 130 - DNA, 2276 bp, Homo sapiens
aaaccaggtcaaagcttctttggcattcagttttccccagagaacaatttaatgctgatacttaattttttcaagatagacaagagtcgggccacaaaaagttaaaaagtaccatccagagaagcacagaaacaggcatggcagctgaaatgagaaagatggtaaggcagccgagccgagagtctactgatggcagcatcaacagttacagctctgagggcaatttaatatttcctggagtgcgactgggagctgacagtcaattcagtgattttcttgatggattgggaccagcccagcttgttggccgccaaacccttgccacccctgcaatgggtgatatacaaataggaatggaggacaaaaagggccaattagaagtggaagtcattagagcacgaagcctcacacaaaagcctggttccaaatctacacctgctccatatgtcaaagtatatcttttggaaaatggggcctgtatagccaagaagaagacaagaattgcacgaaaaacccttgatcctttgtatcagcagtctctggtttttgatgaaagtccacagggtaaagttcttcaggtgattgtctggggagactatggcagaatggaccacaaatgctttatgggtgtggctcagatcttgttggaagaactcgacctgtccagcatggtgatcggatggtacaaattgttcccaccgtcctcactggtggatcccacactcactcccctcacccggcgggcttcccagtcatctctggaaagttcaactgggcctccctgtattcgatcatagtgaactcataccagagtcattccaataaaactctacttttcaggataataatctgaaccagatatttcatgatcgaaagcattgttggagacagacaatcaacttgtgttttgcctgtagtagtttttcaataatatgtcccaattgttatttaaaacatggcttcatatgacagaacaaggcaatctatcaaatttacaggaagaatcaacatgctggtgagagtcactgatgcttctaacaaatagaaaaagaggaaactttaaatccacgcatacacgtacacacacacatgcacacacacacacaccaaattgaacaaactggaaactctcactctgtgaaaagttgtattctacacatttctgcacagaccacaagcagtgttatttccctgatgtttgagttgttttgttcttttgtgtgttttgtttatttgtgtgttgtttgttggttttcgtttcttgagtttttgttttgttttcaccacatctgttatttccactagtttttttttggctgtgtcatgacaggcctcatgatgctaacagagattcttcccttcttttttccaaaagcaccaaaaaaaagggctgaagtagtctctgtagcatctccccaaagtgttaaacagctacataaggtgaagccaaggaagggtttcactagctttcattttataattatttaaagtcttatgtgtggatacccaagagacaaaaagttatcttccaaaataaataatcacagaagtacttttttaatgaagagcctatctgtttgcattctagaaaattaatttatggtttccattgttttgcatggaagacttttaaagaagtcaatctgcaactaatgctggggactaaaactaactgcataattgtactttgaaaacactccttgtaatgcctttttcttcctgatattaaaaaaatgctcatgtgtataaaccatactttgacttcccaaaaatggtgactaggaatggatttgagcctaagacactttgagctatgcccaggcttctcagccatgcctcagtgtagacacatccatctgccctggaaagagcatggtatgagctgktcaatattccactggaaattccagttgaaatattctgcactaaactattgtttttattgaattttagtttacatttctttgagattgatgcaagcacaaagcttgattttttaatgcaaagtatcttactttttggggggaaaataaacaaaatgaactttcaatttgcattttcatttagtttctcttggccttgaatttcccttgtgacattctgtacatgtgctacaaactgcagtctctgcaggtgcattgatatgttctccctccttttatgagtcactccacttttgtgattacacaaatagagcagcatgacttggaactgttcagagctgcatgcacattttgtaaaaaaaaaaaaaaaaaaaaaaaaaaaaaaaaaaaatt

SEQ ID NO: 131 - DNA, 1064 bp, Homo sapiens
ggcacgaggaagagtcagccttcttcttttcctggcctaggtagtagagctcatatagaaaaagtgagacaatattggtacaaaactacattatttattgcttccactgaaatgtcaagaggcagcaggtgaggcatgaggatgggcagttctcagaagttttcctgaacctacaggtttatgttaatttttttatgtataatttgtcttccttgtttatgatctcatttctagtctgccatgtaaccccttctcaaactttaaaaggacctcccttgagctggagctaacgagaccatttcttgtctgcttacaattttaaaaaaaaagctatttgcaagtaatttttctcattatgatgctgttatcataaagtgagattccagtagccagggtgtcaagggatggtatatggacagtgcaactttgacttactttactctacttagtcaaattttaactattttctggttcctttcatttgaatataatagttaaaataatgcagaccattcacagttcatatgttctccctttgtttttctctgactccacatgcactgacatgtatagtttctgctgaatttattaatttggtccagtttattcctgctgttaactttgatttcttttcctcctcttatctaatatttttcactatgatcagtatgttccatgaaatatatatattccttatttttctctcctaaagtataaacaaattgtcattgggaaaggagaacacttttctctgactcacataatgtagtagtaatcattcatattttacttatttgtggctgcataattgtaataggaagagtgtgtggccagggtgagcgaagccagaaaatatgttgctttggtagtttttccacattgctctcaaattttcatatattttgcttatttactggsccgtgtgtgacagtagtcacacaaatagtacctattattgtctaacttggggatgccatggggaaaggtgtarattttcttggcactggattctgcaacacttgattaatcttaattctatggcaaaaaaaaaaaaaaaaaaaaaa

SEQ ID NO: 132 - DNA, 1738 bp, Homo sapiens
ggcacgaggaaggcttaaattaagtatgttgacaataccccaaactactggatgatatttgtaatgaatttcaccctatatcagtacagaagggtgtcacagttcagcaaaacaaaagagaatacgctttgttaaacctctactttctgaattttaggacagtgaggaaatttaacattttcaatttttttttcttttcttgactgaaaagaaagtcaagccagcaatatgtttctgagagagcagtgatgcatttcacaacactgttaactgtctgcttggctttttgaggcttccagagttcagaattgtcttctcttgaataggtcagtgcatttttttccttcagtttttctccttaagcagcaaaacagaccatttaacttccaaatatttacagcttgcaaacagataaacttcccaaatctgttttttttttatgaaaaggaaaacgatcagccacaataatctataatatgatatatttgaatcaaagttattagatgccctagggtcttttcatggcagattttatatatcaccaccattaataaatctgttatcagaattatgtctttctctctgctgatagttatttttagactaacatattcatacctccttctgatgaaaaacattaaaatttgaataaggcatattagaaaaccctaaagctctgtatttacacaaaggagactcataaatattggtttttcagggtgaagcattgtgtgttattccattttgtaccacagggaaagcctagtcacacatggggcctcattaaaagaggatctaaagaaatatttaatggttgaaatataaggtcttattctgaatatctaccttcactttataataatagaaactgaactgaaaagattcagtaagtgatttagaacatccactcattttaaaagtaatgtctaggcctaggaaagtgacatcatgttccaaatgttacaaatccagcgtttttccttgatgtctttataaatacattgtttacagtttttattctcctccatatatgatgccccttttctaagattatttcgtaggtatatcctttaatgagagaacctcataaataaacttcctgaatttgaaaacgagtgagaggagacttcaagtttgtggactgagctaaacatgtgtctactctcccttcaaacatcccatggaaatggcagtaaagacagaacaaagagaatacatttctgaatatactgaggaacatatactccagagagcagaaacaggaagaggggcctctgctaaagctgaaggagtcttcaggaggtaacccagctgggctctgtgttctggttggcagatacagagagtagccaaggtcaaaagcagacaaacagaaagtgaggtgattggccacaggtttggaaatggctcaggtttgctctttccaaccccttgcatgtcactgcacatttacctccagaagtaaagcaggagaactctgcaaagggaaccaacaatctgcatgggagggcattgcctccaagtgtgtgggctggcgaccaagtgcagccctctgccctagttatgggagttggagagggacttactggtttgcatgttccatgcaagagctaaagcaaagcacatctcggagaagtgagccaggaaagtggatcaatccatgccaacaacctatattaattaacctgataattaatatgtatataaagtgaaaaaaaagaaaaaaaaaaaaaaaaaa

SEQ ID NO: 133 - DNA, 1772 bp, Homo sapiens
aattctaaaataccaatgtatttttaggttgtagctaatgttgtattcactttcaattctcagttgtccacactggtgatataagaggaacaaatcagaatcattaaatactttgtaatgccatcataaactcatatattcatcctcaaactcccttgtttaatgctaattggtggcctggaacttcactgagatgcaaaatcaagaactgaagcctagttgctagataacaaaaagctataaatgtttatgtatgtgaattttaaattagaataaccgtcttaaactcctacttgccatttctaaggcaaagcattcattttaatattgtactttgccttttcattcagttagtggagtaagtcatgaaacccttaggaagaaaaacaagttatgacttattcactaaaattgatgcaagacagttggttctagatgaccatggccatgtgttcatcatataaaaccttcagttctctctatggtgcttggctggagattgacatgtgaggatgtgccaatcatattaaatggatttggtctatgtgggtgatatgtggcctgaatgtaactgtgatagactgaaatttgttcttagctctcaaaatccactgaagaagtcaagtgaaggtgggtaaaatagggagattagtgacaactttgtgccaaattttttaaaaaatggaagcaggtagccaatattagaatgataatttaagggtgtggttgaattttagttagttgtcacatagttattgaacctcatatgctcagtgctgtgggaatcaaacatggaagaggtatggctcctgcccctaatgagaacaagggggaaaaatccagatataatctaaatgctaggttatgtcagggtataggaacacagagaatgggggacctgtaagaactggaagagtcagagagggctccattgaagaggtcaaacataattccggaaagaattaggtagtgaggagattgtgccaggaaaataagtgggaaaggccacagttatgtttcctttgaatggaagagagacaaagctatcagctatagatcattgttttcttaagacagccaaactggccctttgaaaccattcaaattaccccagtttagctccctaccttttagtctccgtgaggaagacaagctgttgcattatcatattcctctgtgctgagcagctcaagactcagccacaatatgcaaattgctttaatgccatattacggcagttgatttagacatttgccagtgcaccaaaccatgagagattgtcccgacctaatgccacctggcagatgtgtacccagagatttttctgtagctccatgtttcccataaagggcattggaaatgcacagatgaagatcttcctttggaaccaggcacatttggccccttctcagtgactgcactgtgggaactcttcttaagaaaatattgaaaacagcttaatgctttcatatagtgaccgacatttagttgaaaactactgctgcatagcaaatattgtgactcttcatgtgtccacaggagctcttgtgtgggtttaaagctatgaagtgtattcacattgtgaagttttaattatctttattgaaattaattgtgtaaaaatggtatgtgctctattaggtattcagtttgtatgtgaattctatatagaaagtggtttttgttctttgagtttgttttatttcttgaagattacaataaatatctaagagactatattcctgaaaaaaaaaaaaaaaaaactcgagggg

SEQ ID NO: 134 - DNA, 799 bp, Homo sapiens
tgctggtggtgttctgcttgctcgcaggcctggtgctggccgtagtatcacagtgctgagcggcgcggcctacctgcaagtgggcaggcttttgtgcaagagtgctggttatgcaaggcttggggcgctttggcgctgatcacgccccgcgttattacttctacttctctgcaggcttgctcacctatggcgtcacagcctttatcgcattaaacgtgatcatcaagaagggcaaacacttcttggatcgctcgccggcgccggccactcagatgctgctgtacctgacggttggttattggtagtgatcgtactgttcacgattccaagttccaagaaagcgcgttacattctttcgattacgccggcgatttcattattggccgcgtatatcttcgtggatcgcagtcagcgctttgcaagtacccgcgacaagttgctgaagttctgcctcaacttacctatggtcggcctgggcatgttgttacttgcctttatctatggcctgtatgcagcgacgccgctgcggcctaactatcttggcgcgtgtgccgggttgatcagccttattgccattcgctcttgggtgacgtcgcggtttcatgcacatccacaccgggagttcgtactgttgtgttttggtgctgccgccttcctggtcctggatatgtttttcttcaattcgattacttaccacctggaattggccgatgagccgacacccaagtttctgccttattggttctggtaggcgcgttctatcgcagttttaactttcgtttggcgacccacaaggcac

SEQ ID NO: 135 - DNA, 3839 bp, Homo sapiens
ccacgcgtccgcccgctcgctgggagagaggtacctctccttttccctctccctttccctaagagttgtctgctggttctcagcttgaagaagattctgcagtccttattgatcctttttcttggcgttaccattttttgaagcaaagttaacctagctttctagtttgagctttctttttggccgtctttaaaaaaaattttttttttaatctataaaatagacaagagctagttctacaatgtccaagtcattccagcagtcatctctcagtagggactcacagggtcatgggcgtgacctgtctgcggcaggaataggccttcttgctgctgctacccagtctttaagtatgccagcatctcttggaaggatgaaccagggtactgcacgccttgctagtttaatgaatcttggaatgagttcttcattgaatcaacaaggagctcatagtgcactgtcttctgctagtacttcttcccataatttgcagtctatatttaacattggaagtagaggtccactccctttatcttctcaacaccgtggagatgcagaccaggccagtaacattttggccagctttggtctgtctgctagagacttagatgaactgagtcgttatccaggaggacaagattactcctgagaatttgccccaaatccttctacagcttaaaaggaggagaactgaagaaggccctaccttgagttatggtagagatggcagatctgctacacgggagccaccatacagagtacctagggatgattgggaagaaaaaaggcactttagaagagatagttttgatgatcgtggtcctagtctcaacccagtgcttgattatgaccatggaagtcgttctcaagaatctggttattatgacagaatggattatgaagatgacagattaagagatggagaaaggtgtagggatgattctttttttggtgagacctcgcataactatcataaatttgacagtgagtatgagagaatgggacgtggtcctggccccttacaagagagatctctctttgagaaaaagagaggcgctcctccaagtagcaatattgaagacttccatggactcttaccgaagggttatccccatctgtgctctatatgtgatttgccagttcattctaataaggagtggagtcaacatatcaatggagcaagtcacagtcgtcgatgccagcttcttcttgaaatctacccagaatggaatcctgacaatgatacaggacacacaatgggtgatccattcatgttgcagcagtctacaaatccagcaccaggaattctgggacctccacctccctcatttcatcttgggggaccagcagttggaccaagaggaaatctgggtgctggaaatgggaaacctgcaaggacctagacacctgcagaaaggcagagtggaaactagcagagttgttcacatcatggattttcaacgagggaaaaacttgagataccagctattacagctggtagaaccatttggagtcatttcaaatcatctgattctaaataaaattaatgaggcatttattgaaatggcaaccacagaggatgctcaggccgcagtggattattacacaaccacaccagcgttagtatttggcaagccagtgagagttcatttatcccagaagtataaaagaataaagaaacctgaaggaaagccagatcagaagtttgatcaaaagcaagagcttggacgtgtgatacatctcagcaatttgccgcattctggctattctgatagtgctgttctcaagcttgctgagccttatgggaaaataaagaattacatattgatgaggatgaaaagtcaggcttttattgagatggagacaagagaagatgcaatggcaatggttgaccattgtttgaaaaaagccctttggtttcaggggagatgtgtgaaggttgacctgtctgagaaatataaaaaactggttctgaggattccaaacagaggcattgatttactgaaaaaagataaatcccgaaaaagatcttactctccagatggcaaagaatctccaagtgataagaaatccaaaactgatggttcccagaagactgagagttcaaccgaaggtaaagaacaagaagagaagtccggtgaagatggtgagaaagacacaaaggatgaccagacagagcaggaacctaatatgcttcttgaatctgaagatgagctacttgtagatgaagaagaagcagcagcactgctagaaagtggcagttcagtgggagacgagaccgatcttgctaatttaggtgatgtggcttctgatgggaaaaaggaaccatcagataaagctgtgaaaaaagatggaagtgcttcagcagcagcaaagaaaaagcttaaaaagcgtcgttttccagggagtatggaaggttttgtcactctagatgaggttggtgatgaggaagattcggaacttcagaaacttcgtaaatcgggcatggcatttaaatctggtgacaaaaatgatgatggtttggttgaaattaaggtggacaagatcgaggaacttgatcaagaaaacgaagcagcgttgggaaatggaattaaaaatgaggaaaacccagaaccaggtgctgaatcttctgagaacgctgatgatcccaacaaagatacaagtgaaaacgcagatggtcaaagtgatgagaacaaggacgactatacaatcccagatgagtatagaattggaccatatcagcccaatgttcctgttggtgagatttaagtctttgttcttcaccttcctcactctcctcaaaacaaactcttaggttttaaaataagattttaaagttggtcttacataagctgtgatagcattttaaatttgctttgtttctatggggaacaatttataaatcttaattgatatattttcctctcatgcatgtctctgattttgtattattttctgttgttattccacaatgtgttcccttttttcgtaaaatttcttgcaagttacacgcttttgttttgcttttctgtgttgtttttctgtattatatttctttttttaagaatacagttaggtgagacctcaaacatcaattaggtaaaagcaaaatatggttcggtttttgttttttatcttaggctgtattggacttctcaaaaacatgttgtttcatttaaattatgttgacaggtgaaattgtgaatactaaataaaatcttcagtttaatttgtaagaatgtatgtttgtatttctaggtatagactatgtgatacctaaaacagggttttactgtaagctgtgttcactcttttatacaaatgaagaagttgcaaagaatactcattgcagcagccttcctcattatcagaaattaaagaaatttctgaataaattggcagaagaacgcagacagaagaaggaaacttaagatgtgcaaggagatttaatgatttcaaagaaaataatggttctttgtttttaatgttaaccttttttaaatacaatactgatagttagaagaaaactattgtactcttttgttttagtggagaaataatagatgtctgttcatgtgttaagtgttatagcaaaaaaaatacacatatggttaagttaatgaatagtttttgttttatcagaatggcaacagacagaagtactttgtagagattgacttcctaagctacttaagacaacttgcaccactaagaaaaaaatgtagaaccatttggaaaaatgaaatttagtagttccaagtttcaaagaaatgtcaacattttattccattcaataaagaacaaaaccaaaaaaaaaaaaaaaaaaaaaaaaaaaaagg

SEQ ID NO: 136 - DNA, 2000 bp, Homo sapiens
  misc_feature (99)..(99): n equals a,t,g, or c
  misc_feature (580)..(580): n equals a,t,g, or c
  misc_feature (1790)..(1790): n equals a,t,g, or c
  misc_feature (1858)..(1858): n equals a,t,g, or c
  misc_feature (1862)..(1862): n equals a,t,g, or c
  misc_feature (1904)..(1904): n equals a,t,g, or c
  misc_feature (1913)..(1913): n equals a,t,g, or c
  misc_feature (1951)..(1951): n equals a,t,g, or c
  misc_feature (1985)..(1985): n equals a,t,g, or c
cggcccaggccgcctggtctggcgctggaggccggagtcccgcggcctgtgctggatccgcgcacacccagtggcggcggatgggcggccggggcggcnggagcggcgggtcctgagcgcggcccgggctgtcagggctggctgctggcgggatggacaccctggaggaggtgacttgggccaatgggagcacagcgctacccccacccctggcaccaaacatcagtgtgcctcatcgctgcctgctgctgctctacgaagacattggcacctccagggtccggtactgggacctcttgctgctcatccccaatgtgctcttcctcatcttcctgctctggaagcttccatctgctcgggcgaagatccgcatcacctccagccccatttttatcaccttctacatcctggtgtttgtggtggcgctggtgggcattgcccgggccgtggtatccatgacggtgagcacctcgaacgctgcaactgttgctgataagatcctgtgggagatcacccgcttcttcctgctggccatcgagctgagtgtgatcatcctgggcctggcctttggcacgctggnagagtaagtccagcatcaagcgkgtgctggccatcaccacagtgctgtccctggcctactctgtcacccaggggaccctggagatcctgtaccctgatgcccatctctcagctgaggactttaatatctatggccatgggggccgccagttctggctggtcagctcctgcttcttcttcctggtctactctctggtggtcatccttcccaagaccccgctgaaggagcgcatctccctgccttctcggaggagcttctacgtgtatgcgggcatcctggcactgctcaacctactgcaggggctggggagtgtgctgctgtgcttcgacatcatcgaggggctctgctgtgtagatgccacaaccttcctgtacttcagcttcttcgctccgctcatctacgtggctttcctccggggcttcttcggctcggagcccaagatcctcttctcctacaaatgccaagtggacgagacagaggagccagatgtacacctaccccagccctacgctgtggcccggcgggagggcctggaggctgcaggggctgctggggcctcagctgccagctactcgagcacgcagttcgactctgccggcggggtggcctacctggatgacatcgcttccatgccctgccacactggcagcatcaacagcacagacagcgagcgctggaaggccatcaatgcctgagggcagctgccagggcctgtggaggacaggccagagaggaggccagcaggcccagagtccccaggggaggaggaccaggtcaagggacgttctgtgggcagtagccctgtgtggccctgttcccaccatgagtctggaggccccacctccctggggctcccaatcccctttgccatctctgctctcactggggaccctcctccccttcccacctgctctcatactgctcagtgacatggcccaggctttccttccagggccatgcttggcaaggttggctgagggcaccctccttctctgcacccttggcacgagggcagggctggctctcccaatgcctccatcccatccccatggtgctttggcctcctcaaagcatccaccatggtggatggactgaagtgtgtatattttcttgatctattttttaataaaaaggaaaaggagcaaaaaaaaaaaaaaaaaaaaaaaaaaaaaaaaaaaaaaaaaaaaaaaaaaaaaaaaagggcggccgntctagaggatccctcgaggggcccaagcttacgcgtgcatgcgacgtcataagctctctccctatagngagncgtattataagctaggcactggccgtcgttttacaacgtcgngactggganatctggtacttgggaactttgggaaggaaccttacttntggggggggacataaattggacaaactacctacngagatttaaaagctt

SEQ ID NO: 137 - DNA, 2709 bp, Homo sapiens
ccacgcgtccgcgcgtcctgtcccggcgccttccgcgcaccggccaccgccagtctccgagccccgtgacctgcaggtcctccggccgcgactccgggccggccctgcgtggtggctgtcggggggcgcgcggggaagcagcggaacttgcggtgtgaggggccggcggggcccggagcggtccccggcccgggaaacttggaccgagaccaggccggcgaccaccaggggcctgaggatgaagccaagtctgctgtgccggcccctgtcctgcttccttatgctgctgccctggcctctcgccaccctgacatcaacaaccctttggcagtgcccacctggggaggagcccgacctggacccagggcagggcacattatgcaggccctgccccccaggcaccttctcagctgcatggggctccagcccatgccagccccatgcccgttgcagcctttggaggaggctggaggcccaggtgggcatggcaactcgagatacactctgtggagactgctggcctgggtggtttgggccttggggggttccccgcgttccatgtcaaccatgttcctgggcacctctgggtactcatggctgtgatgagtgggggcggcgggcccgacgtggcgtggagtggcagcaggggccagcagcggtggtgagacacggcagcctgggaacggcacccgggcaggtggccaagaacagccgcccagtacgcggtcatcgccatcgtccctgtcttctgcctcatggggctgttgggcatcctggtgtgcaacctcctcaagcggaagggctaccactgcacggcgcacaaagagtcgggcccggccctggagtggaggcagtggaatcaaccctgcctaccggactgaggatgccaatgaggacaccattggggtcctggtgcgcttgatcacagaaaaaagagaatgctgcggccctggagagctgctgaaagaatacacagcaaacagctggtgcagacgagccacaggcctgtgtccaagctgccgccagcgcccccgaacgtgccacacatctgcccgcaccgccaccatctccacaccgtgcagggcctggcctcgctctctggcccctgctgctcccgctgtagccagaagaagtggcccgaggtgctgctgtcccctgaggctgtagccgccactactcctgttcccagccttctgcctaacccgaccagggttcccaaggccggggccaaggcaggcgtcagggcgagatcaccatcttgtctgtgggcaggttccgcgtggctcgaattcctgagcagcggacaagttcaatggtgtctgaggtgaagaccatcacggaggctgggccctcgtggggtgatctccctgactccccacagcctggcctcccccctgagcagcaggccctgctaggaagtggcggaagccgtacaaagtggctgaagcccccagcagagaacaaggccgaggagaaccgctatgtggtccggctaagtgagagcaacctggtcatctgaggggcggtctagtctaaggacactgcggccctgccctgggaggttccgaaggcttcctggaggaggtggagctgcagctgggactgtgaggaccgagaagcaatggcccagcagacgagacagcaaagaccaaggcctggaggtgggagcgtctgccccagtgaggaggcaggtggccggcgggcactgtgtacaggagcaggctgagccccgcccctggccctgctgccatgttgctcccctgaaggatgccccgacccccgtgcctgccctggctggatcctaggagcccacgggattctctgtatcatcagaggctgggcttggcagaggggaggggcctgtgcccgtcacccctggccccattccttggtaattagccacacccttgcctctgtacagggccctagagcagatgtgcgtccccctcctcttccagcaggtctataaagggaaggggtagcagaaagtcctgggctaggagagtgagtccctgggttctaatcttgggcacatctgtggccatcgctgggtccatttttctgactgtgaagtaaggagagacgtctcagtacccagggcctcttcagctctttgtaggttctgggctgggttgtgggggactggggagctgggctctaccatccctccattagtagctttatccagccccgtttttgctgctttcaggcctctgccttcaaggcccccatggggctgtccatccatggctctgcctacggaaggggcttaatgcatgtgcctgccctcccccagctgtttttaatgaaactgaaaaaatagacttgatcccggcaggactgtgatacagagccctagcctgcccagccagccccaagatctcaggagctttagggagaagacttggtggggctggagcacaccttgggcctcagtggtttctgtgtccctgtggtgccagtgcttctgggcagtgcaggcggctgccaggcccagccctgacttccactctggctcagcaacctggttatttatgtggggccgtgcaggcatgggcccactgcctgtccatcctgtttctcttatttattgaaactcaccattgccctatccttgtgtctccacccccttccatgtgttgaataataaaaggtgggaaagtgcaaaaaaaaaaaaaaaaaaaaaaaaaaaaaaaaaaaaaaaaaaaa

SEQ ID NO: 138 - DNA, 2556 bp, Homo sapiens
  misc_feature (1663)..(1663): n equals a,t,g, or c
  misc_feature (2553)..(2553): n equals a,t,g, or c
tcgacccacgcgtccgccgggctgcagccggcgcgtttctccgggctacagccggcgccgccgcccgctagtccgccgcccggcgccatggcgggctgcgcggcgcgrgctccgccgggctctgaggcgcgtctcagcctcgccaccttcctgctgggcgcctcggtgctcgcgctgccgctgctcacgcgcgccggcctgcagggccgcaccgggctggcgctctacgtggccgggctcaacgcgctgctgctgctgctctatcggccgcctcgctaccagatagccatccgagcttgtttcctggggtttgtgttcggctgcggcacgctgctaagttttagccagtcttcttggagtcactttggctggtacatgtgctccctgtcattgttccactattctgaatacttggtgacagcagtcaataatcccaaaagtctgtccttggattcctttctcctgaatcacagcctggagtatacagtagctgctctttcttcttggttagagttcacacttgaaaatatcttttggccagaactgaagcagattacctggctcagtgtcacagggctgctgatggtggtcttcggagaatgtctgaggaaggcggccatgtttacagctggctccaatttcaaccacgtggtacagaatgaaaaatcagatacacatactctggtgaccagtggagtgtacgcttggtttcggcatccttcttacgtcgggtggttttactggagtattggaactcaggtgatgctgtgtaaccccatctgcggcgtcaytatgccctgacagtgtggcgattcttccgcgatcgaacagaagaagaagaaatctcactaattcacttttttggagaggagtacctggagtataagaagagggtgcccacgggcctgcctttcataaagggggtcaaggtggacctgtgacgggcagtggccccggtgaccttggggcctccgaccctgtgcagcctgggacaaaactgtttccggttggccgctgccacatggattttcttaatcgttttatgtcattagtcactcttctggaatgtcactcaagaccaagcggtcagaaggcctgrggacccaaggccccactggagcagtctgtccttatgccgaatcaaggcggaacatgggtgaaagacgagtaaggggcaaatcacagcaatattccacagcgccctccagagttacctggggaggaccgaggccacacgccactgcccccgaggccagagtgtaagtaaaggataaccaggactcgctgggagagatggactctktcctcagcaacactccacagcagaaaggggtagcaggtaccccttcttatcagcggtaaaaatgcatttacaacctttcatttaaccgaaaaacacagaccgctttaacctctttatttctgtcccccactgcatgaacatctatacaattttaaaaatacttcctcataggatgctttggcccttcatctatttaatcatagctacatacctattttttataagtagcagtacacattcaaaggggtattcctagctcaatgcttggtgttctagttcaacttttatcctgcagcaagtaagcctagataactctacacgatttggctgagtggctttgtgtgaccgtggccccaggcnaaggggatcatggccctggctggctttcccgggggtctcagctcctgttgtcagtgataggcggctcaaaggagcatcagtttcttttgatccaagaagtgcttactgaatgcctgccctgtgcgtggccttaaacattgagaagtgctgctctccgtttatttgggatttgattctcattttaccatagcttatattctcaatttcaatgccagtctcagaactcttgttttctgtgttctgttctcaaaattacattgtccctcatgtcatttcaaactgttttccaaagggatttgagcatatacaactacaaatccaagcagattgactctcaaaaataatcttaaatactgcaaatagtcccaactaagattcagtcagtatgtttgttttgcaagtttgggagagtaagttggctttgagtcacacatcgaagctttaagaggtgagacgctggcttcattctggactagacaggaacttggcctcagcgtgagatcctgccatgcagtgttgcggtggcactgaagaagtgtgaatgtgaaggcggcgtcggcgcggggccagagcaccactctgctgccccaccacgcggcctgtgaggagccactaaacctttccgtgcctagacctccccatctgtggaatggggtcaataccacctacctcacaggggtgttgtgaggactgagaagaacaatgtcaaatgtttttaatactcagatgtgggagcgacatcaatgaaatctgtactgtatgaaagctacacaaaaatgggcagacatttggttaattgtgccagatacctaaaatgtatgttcagaaaagcattttatcaactcagaaatatgacttatttctagaaaaaaaaaaaaaaaaaaaatttnctc

SEQ ID NO: 139 - DNA, 2596 bp, Homo sapiens
aaaccctggagctccaccgcggtggcggccgctctagaactagtggattccccgggctgcaggaattcggcacgaggaccgcgcggctgctccgctctccccgctccaagcgccgatctgggcacccgccaccagcatggacgctcgccgcgtgccgcagaaagatctcagagtaaagaagaacttaaagaaattcagatatgtgaagttgatttccatggaaacctcgtcatcctctgatgacagttgtgacagctttgcttctgataattttgcaaacacgaggctgcagtcagttcgggaaggctgtaggacccgcagccagtgcaggcactctggacctctcagggtggcgatgaagtttccagcgcggagtaccaggggagcaaccaacaaaaaagcagagtcccgccagccctcagagaattctgtgactgattccaactccgattcagaagatgaaagtggaatgaattttttggagaaaagggctttaaatataaagcaaaacaaagcaatgcttgcaaaactcatgtctgaattagaaagcttccctggctcgttccgtggaagacatcccctcccaggctccgactcacaatcaaggagaccgcgaaggcgtacattcccgggtgttgcttccaggagaaaccctgaacggagagctcgtcctcttaccaggtcaaggtcccggatcctcgggtcccttgacgctctacccatggaggaggaggaggaagaggataagtacatgttggtgagaaagaggaagaccgtggatggctacatgaatgaagatgacctgcccagaagccgtcgctccagatcatccgtgacccttccgcatataattcgcccagtggaagaaattacagaggaggagttggagaacgtctgcagcaattctcgagagaagatatataaccgttcactgggctctacttgtcatcaatgccgtcagaagactattgataccaaaacaaactgcagaaacccagactgctggggcgttcgaggccagttctgtggcccctgccttcgaaaccgttatggtgaagaggtcagggatgctctgctggatccgaactggcattgcccgccttgtcgaggaatctgcaactgcagtttctgccggcagcgagatggacggtgtgcgactggggtccttgtgtatttagccaaatatcatggctttgggaatgtgcatgcctacttgaaaagcctgaacaggaatttgaaatgcaagcataatatctggaaaatttgctgcctgccttctacttctcaaatctttcttgtaaaagtttccaattttttcactgaaacctgagttaaaaatcttgatgatcagcctgtttcataagaaactccaatcaagttaatcttagcagacatgtgtttctggagcatcacagaaggtatattgctagttacactttgccctcctgcagtttcttctctgctcccaacccccatctcatagcatccccctctatttccaatgctcctctccaaccgcttagtttctgaatttcttttaaattacagttttatgaaagcatattttatttacttggtgttgaaatagccctcataaaacctaagcacttggaaacacaataatagtattaactaactagatctattgaatttcagagaagagccttctaacttgtttacacaaaaacgagtatgatttagcactcatactagttgaaatttttaatagaatcaaggcacaaaagtcttaaaaccatgtggaaaaattaggtaattattgcagattgatgtctctcaatcccatgtattgcgcttatgttacaagttgttgtcacagttgagacttaattcctcctaatttcttctgcccgaagggtaagtggtgcgtccagcttacacgatcataattcaaaggttggtgggcaatgtaatacttaattaaaataatgatggaagagctatctggagattatgagtaagctgatttgaattttcagtataaaactttagtataattgtagtttgcaaagtttatttcagttcacatgtaaggtattgcaaataaattcttggacaattttgtatggaaacttgatattaaaaactagtctgtggttctttgcagtttcttgtaaatttataaaccaggcacaaggttcaagtttagattttaagcacttttataacaatgataagtgcctttttggagatgtaacttttagcagtttgttaacctgacatctctgccagtctagtttctgggcaggtttcctgtgtcagtattccccctcctctttgcattaatcaaggtatttggtagaggtggaatctaagtgtttgtatgtccaatttacttgcatatgtaaaccattgctgtgccattcaatgtttgatgcataattggaccttgaatcgataagtgtaaatacagcttttgatctgtaatgcttttatacaaaagtttattttaataataaaatgtttgttctaacttgtctgcttttttaaaaataatcttactgtacttaattctaattttttcctcatatttaaataaaaggccatttccaccttttctaaaaaaaaaaaaaaaaaa

SEQ ID NO: 140 - DNA, 893 bp, Homo sapiens
  misc_feature (10)..(10): n equals a,t,g, or c
  misc_feature (18)..(18): n equals a,t,g, or c
  misc_feature (28)..(28): n equals a,t,g, or c
ggcacgaggnaaaagaancccgcttcanggttgccagagtgtgataggtaccccagagttcatggcccctgagatgtatgaggagaaatatgatgaatccgttgacgtttatgcttttgggatgtgcatgcttgagatggctacatctgaatatccttactcggagtgccaaaatgctgcgcagatctaccgtcgcgtgaccagtggggtgaagccagccagttttgacaaagtagcaattcctgaagtgaaggaaattattgaaggatgcatacgacaaaacaaagatgaaagatattccatcaaagaccttttgaaccatgccttcttccaagaggaaacaggagtacgggtagaattagcagaagaagatgatggagaaaaaatagccataaaattatggctacgtattgaagatattaagaaattaaagggaaaatacaaagataatgaagctattgagttttcttttgatttagagagagatgtcccagaagatgttgcacaagaaatggtagagtctgggtatgtctgtgaaggtgatcacaagaccatggctaaagctatcaaagacagagtatcattaattaagaggaaacgagagcagcggcagttggtacgggaggagcaagaaaaaaaaaagcaggaagagagcagtctcaaacagcaggtagaacaatccagtgcttcccagacaggaatcaagcagctcccttctgctagcaccggcatacctactgcttctaccacttcagcttcagtttctacacaagtagaacctgaagaacctgaggcagatcaacatcaacaactacagtaccagcaacccagtatatctgtgttatctgatgggacggttgacagtggtcagggatcctctgtcttcacagaat

SEQ ID NO: 141 - DNA, 489 bp, Homo sapiens
  misc_feature (477)..(477): n equals a,t,g, or c
cggcacgagcttcctcaaaagtatataaaatttgaaaagacctagaagtgatctagtggaatgaagacgctgagataccattgaggttggggaaactactgggacgtgcttacaggataaactgcaaaacaaaagcacaagtttgtaatcatggaatgacatgccttattctgaaaacttaacgtttgtagcgtaccttataattcataagacatttaaaaatggtattgaatcccaataacctatgcgtagggttggatcttgttgttatccctgttttttaatggaaaatctgaggcctgaagatggtaggccatgtatatgcctgccccgccgttgagcctggctcctgctgttggagaaactttcccagtctgtagagagaggatgtggtcctggcaagcctggctcctgcctgattctgtatcttctggtaacacacagccgtcatttaaaaaaaaaaagacaaggtctttnccctcggacaga

SEQ ID NO: 142 - DNA, 2847 bp, Homo sapiens
  misc_feature (2734)..(2734): n equals a,t,g, or c
ggcacgagatgagctgcaaggtgcctttgacgagcacataggaccgctctgcactgactggcagaaggccgagcggggagacattctcctgagcagcctcatcagaaagaagctgcttcccgaggcctctctgctcatcaccacgagacctgtggccctggagaaactgcagcacttgctggaccatcctcggcatgtggagatcctgggtttctccgaggccaaaaggaaagagtacttcttcaagtacttctctgatgaggcccaagccagggcagccttcagtctgattcaggagaacgaggtcctcttcaccatgtgcttcatccccctggtctgctggatcgtgtgcactggactgaaacagcagatggagagtggcaagagccttgcccagacatccaagaccaccaccgcggtgtacgtcttcttcctttccagtttgctgcagccccggggagggagccaggagcacggcctctgcgcccacctctgggggctctgctctttggctgcagatggaatctggaaccagaaaatcctgtttgaggagtccgacctcaggaatcatggactgcagaaggcggatgtgtctgctttcctgaggatgaacctgttccaaaaggaagtggactgcgagaagttctacagcttcatccacatgactttccaggagttctttgccgccatgtactacctgctggaagaggaaaaggaaggaaggacgaacgttccagggagtcgtttgaagcttcccagccgagacgtgacagtccttctggaaaactatggcaaattcgaaaaggggtatttgatttttgttgtacgtttcctctttggcctggtaaaccaggagaggacctcctacttggagaagaaattaagttgcaagatctctcagcaaatcaggctggagctgctgaaatggattgaagtgaaagccaaagctaaaaagctgcagatccagcccagccagctggaattgttctactgtttgtacgagatgcaggaggaggacttcgtgcaaagggccatggactatttccccaagattgagatcaatctctccaccagaatggaccacatggtttcttccttttgcattgagaactgtcatcgggtggagtcactgtccctggggtttctccataacatgcccaaggaggaagaggaggaggaaaaggaaggccgacaccttgatatggtgcagtgtgtcctcccaagctcctctcatgctgcctgttctcatggattggtgaacagccacctcacttccagtttttgccggggcctcttttcagttctgagcaccagccagagtctaactgaattggacctcagtgacaattctctgggggacccagggatgagagtgttgtgtgaaacgctccagcatcctggctgtaacattcggagattgtggttggggcgctgtggcctctcgcatgagtgctgcttcgacatctccttggtcctcagcagcaaccagaagctggtggagctggacctgagtgacaacgccctcggtgacttcggaatcagacttctgtgtgtgggactgaagcacctgttgtgcaatctgaagaagctctggttggtcagctgctgcctcacatcagcatgttgtcaggatcttgcatcagtattgagcaccagccattccctgaccagactctatgtgggggagaatgccttgggagactcaggagtcgcaattttatgtgaaaaagccaagaatccacagtgtaacctgcagaaactggggttggtgaattctggccttacgtcagtctgttgttcagctttgtcctcggtactcagcactaatcagaatctcacgcacctttacctgcgaggcaacactctcggagacaaggggatcaaactactctgtgagggactcttgcaccccgactgcaagcttcaggtgttggaattagacaactgcaacctcacgtcacactgctgctgggatctttccacacttctgacctccagccagagcctgcgaaagctgagcctgggcaacaatgacctgggcgacctgggggtcatgatgttctgtgaagtgctgaaacagcagagctgcctcctgcagaacctggggttgtctgaaatgtatttcaattatgagacaaaaagtgcgttagaaacacttcaagaagaaaagcctgagctgaccgtcgtctttgagccttcttggtaggagtggaaacggggctgccagacgccagtgttctccggtccctccagctgggggccctcaggtggagagagctgcgatccatccaggccaagaccacagctctgtgatccttccggtggagtgtcggagaagagagcttgccgacgatgccttcctgtgcagagcttgggcatctcctttacgccagggtgaggaagacaccaggacaatgacagcatcgggtgttgttctcatcacagcgcctcagttagaggatgttcctcttggtgacctcatgtaattagctcattcaataaagcactttctttatttttctcttctctgtctaactttctttttcctatcttttttcttctttgttctgtttacttttgctcatatcatcattcccgctatctttctattaactgaccataacacagaactagttgactatatattatgttgaaattttatggcagctatttatttatttaaattttttgtaacagttttgttttctaataagaaaaatccatgctttttgtngctggttgaaaattcaggaatatgtaaaactttttggtatttaattaaattgattccttttcttaattttaaaaaaaaaaaaaaaaaaaaaaaaaaaaaaaaaaaaaaaaaaa

SEQ ID NO: 143 - DNA, 1436 bp, Homo sapiens
  misc_feature (640)..(640): n equals a,t,g, or c
gagcagaggtaattaataggcagttacaatgtggaagattctggaaagtagagttctgttgtctgaaatttagtctgacagaggaatattagcaagataaatgtatttggaccaagcactcccgagaggaagggcatgctcaaattgtttctgtaaaaagtctctggcggtgtttggctcccttctgcgtccttcatgaaacagttctccttgagtattacggttggcaagcatgtgggtgggggagatgtcacacgcacccgctccagctgtacaagcaagccactgcgaggattagacgcttgttagttatgaacttaggtgtctggtctgtttctttgcctttcaaaggcacttcctggcagagaggtacaatggtgctttgcaggaaaccctgtgcccacagcatctgttctgcagcttggcagaccgcagctggccctgagcatggcctactaattctctgggtcaggtgtggctgtggtgagatggatctcagccaggtaagaccctctaatctctgtwttctttctcctgccatagatacactgatgattggagggtatgacaggaattcttgcctgcctttgggtcgtgagggaaacagaaacagcgtaatggctttttggagtgccaggancaaaatccccagagttcattcttagaaaactatgaagctgttctttgaactccaactttttctcctatattcattcagggctctttcctctacaaccccctcattcttgctgttgatagatgcctctttcctactctctaaatgtccaattttatcttcctttggaatgccatcaaattcttcctccctttttctgtaccccacctccaaaaataatcccaacacccacctcgtcagaktgtccatttatttcctcagggctaatcccagaaggagcatacaagttggtgaactcatactaatatgtgaatgattgttgcccttggatggttagaaaatcaaggtagttgtccactgtagaagattgtttaaagccaagtggttaagaatattctatatccttccttttgcatatattatctcgttcatccttgtgaagcagataatctcaccatctcaatgtacagaaaaggaaactgaggctcagaacattttgagtagcctacttaaatagtctaggcagagattgaacccccacgtctctggccccaagaggtcttgataattccctcacaactgctgcctaacagcagataaaatatatttggattcttctcacctttaagaaaacctagtaagttaatctctaaaaatcagcaatctgctcaggggatacagggagaactaggactattgtcccaaatgtgtagtcatatttatctgcttaccaaatgaccatgtgttgaatccctgaaaaccatgggagaaataccaaaaaaaaaaaaaaaaaactcga

SEQ ID NO: 144 - DNA, 915 bp, Homo sapiens
ggcacgagtgtacacattttatttccttttcatgtcttgttgcactagctagaactttcagtattgaaagtagtaaaagaagccatgcttgccttggtcctttgtcttagtgggaaagcttccagtttctcaccaacatgatgttagctgtagtttctttgtagatgttctttaagcagttgaggaagttcctctttattttcagtctttggagagtttttatttttatcccatacttcatttcaaaatgctgagaggtttctttgttgttttgttttgtttgatcatgaatgggtgttggattttgtcacatgctcgttcagcatctattggtatgatcatgtgatatttctttagtctgttgatgcgatggattgcattaattgatttttcaaatattgagtctgccttggttgtggtatataattctttttattaaattgttgcattccgtttgctaatattttgaggatttttacatctttatttatgacagatactttaatatccataggatttgcagtgatgcctgctctttcatttcttactttttttttttgagatggaatctggagcccaggctggagtgctgtggcgaaatctcggctcactgcaacctccgccttccggttcaagtgattctcttgcctcagcttcccaagtagctggaactacaggtgtgtgccactacgcccagctattttttattcttttttgagacagagtctcgctctgtctcccaggctggagtgctgtggggcaatctcggctcactgcaacctccacctcccaggttccagcgattctcctgcctcagcctcccgagtagctgggactacaagcgcccaccaccacgcccggctaatttttgtattttcagtagagacggggtttcaccatattggcctggatggt

SEQ ID NO: 145 - DNA, 1156 bp, Homo sapiens
gaattcggcacgagtgcggtccaagcccatggggccacctcttaattccagcttccttgcctactatgacagggaaagaaacatggcaacatgcgcacagctcttaaggcttgtrctggaggcggaacacatcgcccctgcagcctggcactggccatgggacatgggaggtagggggaggcgtgttccagcctatgttggccggtgggcaggtgctcagactcagcaagctccttggggtcattcatcacccctccacccattcatcctcaaacacctgcagagggcttcctctgccaggctgtcaggcgccaagggcacagaaatgagaactgacagtccactgggggagacggtcttcgcatggtcttgccctcagtgtaaggcacaagagtggtgcaggggggcctaaccaggcccccakggtaaatacsggttggggggctgtctgggggaatggggaagaagagcattctgggctgggggctccacaggctcaacacagctggagtkarccacaacagtgaatcacgagaaatgaggctggaaaggccagtgggaaccatggtcctggaggtgggcattgggtggggakctktgcttcaagctgagggcaggattttcagcacagatgactgtgttctgaaagatccctgtgggaagaktgaggagaggggtgagcagcagccaagactggaggcaggaggaccaagcagcgggttgtggccacgtttcaggtctggagtcacccaggagagattctgatcatatgggtctatggtgtgacgtgggaggtggaaggttccaggacaactcccaggctcctcaaaataacaacttttttttttttttgagacagagtctcgctgtgtcacccagactggagtgtagtggcgcgatcttagctcactgcaagctccgcctcccaggttcacgccattctcctgcctcagcctctggagtagctgggactacaggtgcccgccaccacgcccagataattttttttttttttgtattttttagtagagatggggtttcaccgtgttagccaggatggtctcaatctcctgaccttgtgatccacccgcctcagcctcccaaagtgctgggattacaggcgagagccaccgcgcctggcccaaaatcggcacga

SEQ ID NO: 146 - DNA, 1425 bp, Homo sapiens
gaattcggcacgagctgtaccaaggcttcagagtgagcagggggacatctggataggttagccagggccacagagagaagagctgcttacacctgaattgtttcacccttttcaagaacagggttgtccttctccccatctggatccttgggctagatctctgccgaggggctccgtcaagtcccgcaaggctagagaagggagccccacatcatttccactttcaaagagggaagatgctcgtcattcaaattacttctgttgatttccatggtatccccctgtccgtcccacaatctcttaccaggcgtcaatgcacatgcaggggatggaaagaggatgagccgatgagcagactttgcattaatcaaggagaaagaaaaagcagatggaaggaggtaggtagatggagaaagcaacagctccttttagcccttgatgacggccctgaaggcctgtctcttttagtgactcctctttgggtcctcttcccctacctctcagtgactaggttcctcatattaattccctgctgtgagtttggctccttgtgctgggcaattcagtcatcctcagaaagagcaaagttggtcttggaattaaggtgcaggtggggaaaaagagggactcagctagacacgaagaaaggctctcttcccagtctaagcccttytaccgtaaggggcattttatcaagacagccacccaactccccatcccatctcccctcctttgtagaaacagcatttgactcaccaagcctttctctccctttccgtgtgtcttgcttagtttctggattgagagaatttctatccttgctccctcgaactctaaaagagcttcttttgaaaactggggagtatcaggcctacctctacatgtgcaacagtgccaggattcaaaggaaaagctcattccagcctctgcctcttgggagatggttcagagtgccacatagggactgaaagagggtgtctgaatccttcaggaatgctttaagtgacattgttgaaaagagataaagaaaaggaaaacaatggaattgggtttctaaggtccctggaaatatcctgggggtctaattgagaaagaaaataagaggaaatttgaagactcacttcttccttcatctgaatccactcagatggcaactgatctctgtcccaaggaccctctaccccacccaattcataatcatctcagattagaaaaggcagaattccttcccattctcaaatcagcatttgggttaggggcccctaagttacgtgagcatgttagaaatgtgaccccaggcctcaagagagaggctctgccacatgagaggagataggaatcatgactgaaaggggattagcacagaacagagaaaactgatttgatagacaaatcaaatagaaaaaaaaaaaaaaaaactcgtag

SEQ ID NO: 147 - DNA, 1029 bp, Homo sapiens
ctggagccaccatggagagtgtgtcatggggctctctcttaagtcaaattctgcacatggcatgtgaccatcctcgtgggctcactgttggtgcctgaggttccttgaaggtggtatcaggatctcaaggtcacctcctggacacagcatggatagaaaggggcagggttcatgccctggaggtggaaaggcaagcagctcatttctgagaagcagtgtggcctggggggctcataacaccaatggccccacatggtgtctccaattaacctactgtgagcaccattacctccccacactatccaggatgtcagaaacctaaggccacggagaaacttcccagcaatctttctttagaacagaaggtggcctgagttaaacatcggtgccagcacttcttgggtggagatgagaaggggctgcgaaatctcagcccagaagggacaagcatckgggccaagtttttacaatagccccytgggctcttgcatcaagagccttgacaattgccatggggcatccagcaagtctcctgatgtggatgagccctccttcccacaatggaacccagattggtgggggcagggacccaggagacagaaaagagtccatgtaactagaaccccctaaacaagatgccccacattgccaaggggggaacatgtgagcagagtggtagtgcctgggcaatctcttcccttgagcctcctctgtcatgcaggaaactcattgaaggcaaagagcagccaaggggattgtccccagaccaaagagaggacagatgagtgggggtaaccaggggtcttgagtccccagggcctgcgtggtcaggactcccagtctaccctccccctgtgtggacgcatcatcttgggtagtagtcatcggggacacccgttaggttccgccctttgagggctgcatccaccatcttgatgtaggcagagatggtcttctgcatgtccgcagtataggggtcatactcgagggggggcccggtacccaatcgccctgatagtgagtcgtatt

SEQ ID NO: 148 - DNA, 495 bp, Homo sapiens
ggcacgagcttgccttgtggcactggcagcagcagccaaccacagtggcagatgcagatgagaaatgtcaatggggctacagggatgtggagatgcaggggctattgggcccctgggcagaatgcaatctggtggctggctctcaaaatggtactgtgctgtagctgcttagggctcggggagttcatgagacccagcatgagctccctgtctggagcagtgccattatgaggtctctaggaagctcctcatgttagtctcagggcctgtgagggttgaggagcattcccattgataggattgcaggagtcttcaatggaaatatggaccactgggggtctctcatctttctccacattgagaaacctctctgcgctcccagctaatcctggctgaccacgatgcctggcttcctgtccttccttggccttggatgtttcctgtcacttctctgtttaatgcaaaaaaaaaaaaaaaaaaaaaaaaaaaaaaaaa

SEQ ID NO: 149 - DNA, 585 bp, Homo sapiens
ggcacgaggagagaggtaactcttacatgagcggacaggggaaggcagagagggcagaaaaggcctctgagctcacgattttgcttggcggtaggaaagttaaacttatctagcgaattctctcgtttttcaaactcagatttaagctttggtgagttagattctttgaaactgcccctgcaaatggctcccgctccctgctccgcctccccacgtcctgcggggggacgggacggtggcggtgctcctgagctgtccttcttgttatctgttcttgtctgacctgtggcatggtgccgcccagtgcccgctttcccaggcagcttcctggctttgggagcccatatggagtcaggcttctcacccagtccacctgcccaccttgttggcagctgtcccactgagcccatcctttcccagcccctccagcctctgagacttgagccctagttaagctctcagataatttctgccatcctttctgtatccgtgggtcacacacaaattccactacagctgtaaggaaaagtcagggctgatccaagaccttcgttcctcactcttcaaagaagcctccatggttat

SEQ ID NO: 150 - DNA, 1195 bp, Homo sapiens
ggcacgagcgcatgggcagggaaagtgttttattgttatggactaataatttagaggctagggaaggaacggccttgtgtgctggcctcgttgtaacaatttttctcatgtgtcttccagcctgttcatctgtcgcgtttatttctaaaaagtcctctcacctgccctctgctgtcctcagatcccatccacggccctcacctccctcatccttctctgtaacctctgacaattctggatgacctggtccccgccatgcactttgggcttgcccctgccctgtgagtagcctgacaaccctgcacacacccctggggtggtgccagtgcctgctcctcctcctggcctccctgccacccagcccaggcatgaagctgaacatcgagtgggccccaggagagaggctgagttggtatggccaggactctcccttggcccagtgggaaggtgcacctgcccacttgggagcaggcctcagcacccctcaccagtttcaggttgcccactctcaacagcagctaagtcagagctccgagggctgctccccacccaccttcagcctcccaggcctccccttgcccgcctgggccctggagacacatgcttcagccacaggcaagtctgtttcccttccatggggttttctccacaccacagcagtggtacctctgggcttctctccctggcccctgccccaaggagcccagatccagtgtggtgcttcttagactgtggtctgaggcctcctgcttatagaacaggcagattcccagacattgcctctcccctaaccaaagtttattgattctgagtctctagggctgtggcctatatttgcatttttaacaatctccctcgggactttttatgcactgagatttgaggccagggttgttctaggctgtaccggcaggtggactggaggccacagagaagaggcagagtgaaattgtgccgggcctggcttggagcacccaccagcccccggaagacaagtctcacccagagctctccggttaagcctgccgagagagaggcaccaggaggcaatctccacactctcagacaccagccgtacccaaagattgatgatttcagacaccggcctcccggccacatcctcactgcctcactcacgcgtcacaccatagctcttggtttgatgtgtttgtctcactggttacacgtgtgtccc

SEQ ID NO: 151 - DNA, 1048 bp, Homo sapiens
tgcaggaattcggcacgagccaccaccccagcccattatctctattgatcctcactccaaccttgcaaaataggtagcgtattccagtggagaaactgaggcacaaagaggtgaaagacctttcctgtcacagttaggaaagtggcagaagccgtatttgaaccccagcaggtctccctctgaagtccacacacgtcagcgcctctgtgttgtctctttgccagcacagggctccctggagcccagagatgggggtggtgacttgaaggggttggcaagcctgggctcctccagcgaaaattcccttggccctgggcattcctaagcgagaagaggctcaatcctattttcttctcctaattggatgccttttattcctccttcctaattgaagtctggtcattgctggttgccatggcagcagccaaagcgctcatctcactgtggcttgtctctgcctgcggccaatgggaaacctcctttcccatatacggtggggacatggagtgtcaggctgtcgtattctggtggctggaggaggagaggaagtgagatgggaggaaaaaggcctgtcctctcccacgcagagactccggacagcaggatgtgtggaatccccagtctgttttcagccaggcagcaacagcatctgtactgagttgagtctatgtgtctaccagtgggctaagaacttcatgtgcagtatctcatttaatcttcgtgatggccccaggaagataagggatcaaggcccagaaaggctaagtaagctgccaggtcatccaaggagaaaatggcaaagcctggatttgaacagagactccagcttccttatgtgtagccatctcaccatgctacttctcagggggttactatgagtgtctctcatgtccccagacccagattacaggtttggaggaatacacagcccaccttcccaatatcgcaggcaacagttccaccaaatgccctgcatggcatcacagggagcctagttgcccactgctctactgctgagctcaatgccacccagcccgggctctctcga

SEQ ID NO: 152 - DNA, 1530 bp, Homo sapiens
gaggggcactctcccagctgagcccggatatgaggtgtggggagcccagcatgggagcagggctgagcccagataccactgcctgcaagcctcagtggcttgcggccactgccctgtctgcgcctcagtgtccctatctttaaaattcagagattgaattgggggctctagcaaacacagtggacctggtgatggctgggctggcccgggccgaaggatgtttcccgcccggctgtgcctcctctgtccccatccctccctcggaagcccagagtgcagttttccaatataccccagcctcatgtgggggcactgggcacaacacacagggaggcaaggccctgtcccttccaccagtctctcccactgtggctgcccgagtctgtcctggaactggcagaggaagacattagggcagacgtcgagggcgggggggtcaccgtccactgtcatggcccctctccccacccccctcactgctctgggggcctcacaccttcccttccgctgcctctcctgcctggatgcctgcctcttcctgtggggttatctaaactctgcccaccctataggggccagctagacccctcctcctcagccccaaagaggagcttgggtccggctcacaggcgaggggagcctggaagccgtgagtcctgaggaactaactgctgggcagaagggaggcaaccggggctgagtaaccgagatcctgagactccagggtctcccaccacagaacagccccaggagtcctagccatgtgggtggggtagagctatgtggaccagcctccatggctcagtttccccactggctcctgtgcacccccatggcccggagcagggagcggaggagtggtcctctctgcctcagtttccccaccggctcctgggcacccctcatggcccagagcagggagcagaggagtggtcctctctgcctgactcagtttccccactggctcctgtgcacccctcgcggcccggagcagggagcagagcagtggtcctccgccgccccctctgaaggtccctcaagccctgctggaccccctcctgcctcagcctgggttccagctcttctccaagaccaagaccccagctgccccaggacagctctacaggtgtggaggcctggtccagccacagctccagcttacttgctgtgtgacctcgggcgatgctggacccttctggaaaatggaccggctggaccatcttcaggggctggaccggctgatctccgagggaaaggaggcacatttatttgtgagaccattgtctttccatctggggatgccagctccaaggcagccaggctcctctgggctttgtcccaggctccaggtagggcacacagttggcccttgtctgccatcagcgctcccagggtggtctctcacctcccgccctccctccccaggaggctggaagaggtgggacagaaccaggtctcaatccaccagccttgggaaagggacatccggggcagggcgcggggagggggggcacggtgctgcctcgaggg

SEQ ID NO: 153 - DNA, 825 bp, Homo sapiens
tgcaggaattcggcacgagccagagcagccctcaaagcctgggctgttgagagtgcacatcctggcctgcggtgacagccgtcagatggtgaggggccccaggcgactgccccagcagcagggcctgggagctgcacaggggagaactcgataaggagcatcatgagcatagtgggtccattgacaacatgcagtccccacggtggtgcctaatgacaaaatgacatcatgccacctgcaaaaaaagtaaaaatgatcagaggcgagcttgtcagagaagctttgaactaggtgactgcatgaaacatctcagaggcggaagagtgcctccccctccccgggactcccacctggtgccctgagctcatcatcccttctcttgtagcatatgctgtcaatacccagggccttttcgaaacggcaatgggtccgaaggcctcgggaccacctttcacacctcccctttatgcagtgtccatacctccttggtgctcagctgctggtcagctccatatgccctgtggtccctgccctcccaaggcctgtgaacaaatgcttagtcccagattagagtctacgtcaatctgggatgtgagctgagtggcacctgtcgtgaaccaggccagagtctacgcaatctggggtgtgagctgagtggcacctgtcgtgaacgtgcatgcacatgggcattttgtcagtctgcaccggtgaataaatgtcgctgcatttgccagctgagtgtcaccaggttccaggtcccattacacatcaggaattgtgtccgactcttctggatccgctgattggacctgagggatccctgac

SEQ ID NO: 154 - DNA, 853 bp, Homo sapiens
  misc_feature (20)..(20): n equals a,t,g, or c
  misc_feature (40)..(40): n equals a,t,g, or c
aattcctaacgcaaaagcanccctggggaagaacacaganacaggtgacacgtgtcagactgggcccatgtcaggtacatgtatttcccttcacctcaccctgaaatgtgccatttcagaaagtggtgcatttaccagacaatttgggttgatcatcatgttagccacttggcatctcagtcaccatcttggtcacctggtcaacatagcaaccacatctcttggtcagctagctttatttgcaccttgatcactaagatagatgtcatctgcaaagctgtttaataatcttaataatggtctttattatttccagatccctagagtaaccttagaacagcaagaactattcattcatccataaattccagcaaggtgctatagaaagcactatggaaaaaagaggaaaagagagggagaacatattgtaaaagtagacagggattctgctactgagaaattcaacacctggcaagggggatgaacaggaaagagaggtgctggcagaataaaatcactccccagctccccacacaatgagcaatgagtatgctatttctattttgtgtccatgtgtccttgctcatattcttaatctgcagcccaatgctctacctctgagctataccccctcctccttgctcatactcttacttgtgacttgaagtgacttcctgctcctgcctattgtcacctcccccatgaaggcttccccaattatcctgaagcagagacagtccatccctccctcccctgtgcaaccagggcccctgggctgacctcaagcttctcacacttggccataactagcttttaggtatttatctcccacactagactctgagctcctcga

SEQ ID NO: 155 - DNA, 903 bp, Homo sapiens
  misc_feature (18)..(18): n equals a,t,g, or c
  misc_feature (27)..(27): n equals a,t,g, or c
  misc_feature (56)..(56): n equals a,t,g, or c
  misc_feature (94)..(94): n equals a,t,g, or c
  misc_feature (889)..(889): n equals a,t,g, or c
  misc_feature (898)..(898): n equals a,t,g, or c
  misc_feature (900)..(900): n equals a,t,g, or c
tgttaccggttcgccggnagccggaancggaccgaaccgcaagcgaattcattgancgaggaaccggaaggagcgcccaaatacgcaaaccgcntcttccccgcgcgttgccgattcattaatgcagctggcacgacaggtttcccgactggaaagcgggcagtgagcgcaacgcaattaatgtgagttagctcactcattaggcaccccaggctttacactttatgcttccggctcgtatgttgtgtggaattgtgagcggataacaatttcacacaggaaacagctatgaccatgattacgccaagctcgaaattaaccctcactaaagggaacaaaagctggagctccaccgcggtggcggccgctctagaactagtggatcccccgggctgcaggaattcggcacgagacgacacgataaataaaagcagatgttcaaatgggagacacctgaagagacaagttagtccaatggataggagcgaaggaaactgcccctttgtaaagattgaggaaaagagtgtaaaattatgctctcattacactcatgctgttactaaggcctacagagagaaggtattgagaggtgacaacatgctggcagccctcgcttgctcttggcgcctcctcagcctcggtgcccactctggccgtgcttgaggagcccttcagcccgccgcttcactgtgggagtccctctctgggctggccgaggtcaaagccagctccctctgcttgcagggaggtgtggagggagaggtgcgggcaggaactggggctgcgcgcggcacttgtgggccagctcgarggggggcccggtacccaattcgccctatagtgagtagtattacaattcactggccgtcgttttacaacgtcgtgactnggaaaaccngnaaa

SEQ ID NO: 156 - DNA, 909 bp, Homo sapiens
ggcacgagccagaagagggattgctgggtcatatggtagtttaatttttttcagcaatctttgtattgttttccataatggctacaccaatttacattctcattaacagtgcaaaagggtttttgtttctctataccttgccaacttgttatctattgactttttgataataggctttgcatttgcctgatgattaatgatattgaacacattttcatatacctgttggccactttttatgtcttcttttgggaaatgtttgtttattctggtacttggcctattttttaattgggtttttgtttttttctttgctattgattttcttaaatttttggatagtaacctgttatcagatatgtggttcacaaatattttctcctactctgtagattgccttttcattttatcgattatttcctttgctctgtagaagcttttcagtgtgatgtagtcctacttgtttgttcttgctttcattgcctgtcctatcagaaaaatcattgccaaggccaatatgtatcagcttctttcctatgttttctcctaggtgttttacagattcaagtcttatgtttaggtctttaatctgttttgagttgacttttgctcttggtgtaagataagggtccaatttcatccttttgcatgtggatatccagttttcccaacactagatatgaaagagactaaactttacccattgtgtcttcttggtgcctttgtctaagacacttctatgacagttgtttctcagatgggtacttgtttacgtgattcacaacagtgaatggaaatgtttaccactcatcactccatctaacacaccttgttaagacacatgtaaaaactgttctaatagtaccagttgcaactataactgaaaatagtattattttaggaactagt

SEQ ID NO: 157 - DNA, 790 bp, Homo sapiens
  misc_feature (5)..(5): n equals a,t,g, or c
  misc_feature (9)..(9): n equals a,t,g, or c
  misc_feature (11)..(11): n equals a,t,g, or c
  misc_feature (18)..(18): n equals a,t,g, or c
  misc_feature (92)..(92): n equals a,t,g, or c
  misc_feature (756)..(756): n equals a,t,g, or c
  misc_feature (764)..(764): n equals a,t,g, or c
  misc_feature (771)..(771): n equals a,t,g, or c
ggggncggnanatggaanggaaccctcactattgggttcaaaagctggagctccaccgcggtggcggccgctctagaactagtggatccccngggctgcaggaattcggcacgagatttttttcttgaaacacaaaaatgcatgttatgccagggaaggaagaggagaaatttctcctcctcatcaccatcatgactacctcctctcttgcggttggctgcttcggatggttgaggctcctgctgcattttttagatccgggcaattatagccaccaagatgatatggaccaaagtacagtgttcaaacatgactgatagataaatgaccatttatcatcatcgttttgttaaaaaaccttttttcttataaagttaacaaaccaaggctgttgatccctgaattagaaagttgatttgcttgattattttccaaagtgtgaggcgggcaataagaagggaggagcctttagtgcttttgtgtaagttgctgatcctccagtttggcaacatcttgggagcatcttctggcctagtgatgtggcattttgtgaatctaagtatcagcccatggctctgatgctggctgcttatggctcaaaggggaagagggtcagccccctccccctggatgtttcagtctggcccagtggtggacacagagccctggacagcttccccaggagcaactgtctcttcctgtgaaggtgactcttcctcagcttgtcctcgagggggggamcgrtacccaattcgncctatagngagcgantacaattcacttggccgcg

SEQ ID NO: 158 - DNA, 1653 bp, Homo sapiens
  misc_feature (1111)..(1111): n equals a,t,g, or c
  misc_feature (1613)..(1613): n equals a,t,g, or c
  misc_feature (1625)..(1625): n equals a,t,g, or c
  misc_feature (1631)..(1631): n equals a,t,g, or c
  misc_feature (1637)..(1637): n equals a,t,g, or c
  misc_feature (1651)..(1651): n equals a,t,g, or c
gcaaccttgcagagtcagaatcctgatcagcagttttgaccagcacatcaagagtggctttacctcccaggcattgatccagcattagtcaagctacaagacactgatgtagaaaaccataatgtcagtttactaatgtagaataagaaataaaatctcagaagacctgagctctcctgtcagcatgacttgcacttgtacttttcctttttgtagagaagctaaattataatcagaaagttgttttggtgagcttggaatcagaaaataggagtttaagtcatctgttcaacatgcagctttcctcagctgtgatagctttttcctgctgtccagtcttcatgtggagcctggtcaatagcaccagaattctaagtctgctggccaaggtgctgcctyctgcagagagagaaagcccatcaaagttgacttcagtgactcccccttcactcacccctcatcttycacgggcaaccaactycctttttgattgacacatcatttctttacatacattaatgccttccatattaccacagagagtttggtagactggaaatcattttatttctttgatctacttcatctttctctgcattgagcctttgcgtactaatttatagctattttctcacaggatagtctatttccattatatctatattttctagtggtcctttgcgtttgcctcttttccagactgtatagggcatggtgccaggcacagtttatttgttttattctatatgctgatagtatcatcttttccatctttagatgttttatctcattcagagtgagaggggcacttggtcagtcctttttgcatctcaatagttgatcctcttttgattaaaaaatatttaatttctaataatgtgtgttagagtgaaaataacaggaattattaggcccagtcaagactaacagttcttgactcatagttccaaatcacagttccaagatttccttaacctttctgatcctcacttccctcccaaaaaagtaagaatggctataattacctacctcatggaaattataaggcttcagcaagattaaatgtactcatttatttaacatgcatagtaagaactataaatgttaattnattcttacttacattargatactgacttatgaaacagagattaaacacattctgcaaaaggactggtattgacaggctttgattctaatagctcaaaagataggccatggcttgctagagaaaatgaaaggatactcaaggctcattagattaaaaggctgctaatgttctctaagctgtaagtagatttttgcccacatttatgaaggttgatttctaatcagattagaaatggcataggctggtggcgtcatctcagagctgccacagcattctcaggagactcagccatatcatgttgggttgctctaagaacacacagagacctttatgctttttcacaaaagcatactctttccctggagtgtgtaactctatgtgttgacctttagtgggataagttcttacaatggagctattctgggtacaaaacatcactactctgtgagattttggaagataacactgtttgctgattttacaagcccgctcgggggggggnccggaacccggngcggtncccgtncctttccccccccncg

SEQ ID NO: 159 - DNA, 1298 bp, Homo sapiens
  misc_feature (237)..(237): n equals a,t,g, or c
  misc_feature (1291)..(1291): n equals a,t,g, or c
gagctcccttcctcgtgctcggcgttragctcctgcagccgccgccgctgcagtggtcgtccctgccctccccggccccggggtgcaccccgcaaggctcccgctggtgtccctggagcatgggaggctgctgagcgtgagtggcggtgtctggcaggagctgcgtggcagggagggcgtccatggctgcagccaacaagggcaacaagcccagagtccggagtatccgctttgcgncaggccacgatgcagaaggatcccacagccacgtccactttgatgagaagctgcatgactcggtggtcatggtcacccaggagagtgacagcagctttctggtcaaggttggcttcctgaagatcctgcacaggtatgagattaccttcactctgcccccagtgcacaggctgagcaaggatgtccgcgaggcacctgtccccagcctgcacctcaagctcctcagcgtggtgcccgtccctgaaggttatagtgtcaagtgtgagtactcggcgcacaaagagggcgtcctcaaagaggagatactgctagcctgcgaaggtggcactggcacctgtgtgcgcgtgacggtgcaggcccgcgtcatggaccggcaccacggcacgcccatgctgctggatggtgtcaagtgtgtgggcgccgagctggaatacgactcagagcacagcgactggcacggctttgactgaggcccgaggccccgcctgccccgggcccctcagccttaaaccccgccttgtccccccgacatgctgcgtgatggtgtggcttcctcgcccctctctggggtgggtgtgggggtggagtggccttgcccacgcctctcacctctgccttcatttgtgctgccaccctgcccctccctcgtcctcctctcccacttcctcctctctgtgtgcctcagtctcctgccggaagaaatgggttgagcccgaaaggaggctgtctgaggaagggagagggagggcctggggtgggtcccccactccccaccccaagccacagggrctcccaccagggtctgggagaggacggagctggctctgtggcgtcgtggccccattactgctgccttgcttcagccacctctcctgcccctccctagtccccactgctgtccaccatgagtaggagggaggtgcagtccccagcccccacccctcaggtctgtgttacttggtttttaagcgactggttgggatagaaccctaaagaaataaacttccagtggataccggaaaaaaaaaaaaaaaaaaaaaacttgggggggggnccccgta

SEQ ID NO: 160 - DNA, 604 bp, Homo sapiens
  misc_feature (152)..(152): n equals a,t,g, or c
ggctgcaggattcggcacgagaatcatcagagatgaaactgtttgagagactcatgtgaccttacgaaaattacaacagcagtcttaaagtatgaaaaagatgcatcacagcagagacattatggcccagttgatatcaaatgtaaaatgtnaatgcatgtaaatgcacacttcattttatgtattatttagtaatttgcagtggtatgtgtttaatatttttgctacctacacattaggcaaaaaaaagatgtaaataatttgggagaaaaagaggaagaacagtgtaaaataaaactttctataagtactccatttcaatgtgttcaacatcatcctaaaaggcaagattttcccacgcaggtgacaaggtggtttatgtactatttaagggcggaaggtgcgtgcccgttcaataagcatgttttttgccaggtaggaaatatgttccatatctttacttatcattgcatttcagatgggaactagaaaaactggagagaaaaatgtaatgaaactgctgctgtaaattattccttttagcatgtattcacttgctaaatacacatttcttcaaaataaaaaaaaaaaaaaaaaactcgta

SEQ ID NO: 161 - DNA, 2218 bp, Homo sapiens
aattcggcacgagctcagccacccgctgggaatcgtgcagggattcttcgcccaaaatggagttaatcctgactgggagaagaaagtaattgagtattttaaggaaaagtgaaggaaaataatgctcctaagtgggtaccatcactgaacgaattccccttcattatttgaaacctaatagttttgtgaaatttcgttgcatgattcargatatgtttgaccctgagttttacatgggagtttatgaaacggttaaccaaaacacaaaagcacatgttcttcattttggaaaatatagagatgtagcagagtgtgggcctcaacaagaacttratttaaactctccacgaaataccactttggaaagacagactttctattgtgttccggtgcctggggaatctacgtgggtaaaagaagcctatgttaatgcaaaccaagctcgagtcagtccctcaacatcctacactcctagtcgccacaagaggagttatgaagatgatgacgatatggacctacagcccaataagcagaaagaccaacatgcaggtgccagacaagcagggagtgttggtggtcttcaatggtgtggagagccaaaacgtttagaaactgaagcttctactgggcaacagctgaactctctgaacttgtcttctccttttgatttgaattttccattgccaggagagaagggccctgcatgccttgtgaaggtttatgaagattgggattgtttcaaagtaaatgacattcttgagctatatggcatactgtctgtggatcctgtgctgagtatactgaataatgatgaaagggatgcctctgcactgctggatccgatggagtgcacagacacagcagaggagcagagagtacacagtcctcctgcttcattagtgccgagaattcatgtgatcttagcccagaagttgcaacacatcaacccattattgcctgcctgccttaacaaagaggagagcaaaacctgtaagtttgtttcaagtttcatgtccgaattgtctccagtcagagcagaacttcttgggttccttactcatgcccttctgggggatagtttggctgctgaataccttatattacatctcatctccacagtatatacaagaagagatgtccttccactaggaaaatttacagttaacttgagtggttgcccacggaatagtaccttcacagaacacttgtatcgaattattcaacatcttgttccagcatcttttcgtctgcagatgactatagagaacatgaaccatttgaaattcattccccacaaagactacacagccaatcgcttggtcagtgggctcctccagctgcccagcaatacttcccttgtaatcgatgagactctcctggaacaggggcagctggataccccaggtgttcataatgtgacagccctgagcaacctcataacgtggcagaaggtggattatgacttcagctaccatcagatggaattcccctgcaatattaacgttttcattacttcggaggggaggtcactcctcccggcagactgccagattcacttacagccccagctaattccaccaaacatggaggagtacatgaacagccttctctcagcggtgctgccttccgtgctgaacaaattccgcatttatctaactcttttgagattcttggaatatagcatatctgatgaaataaccaaggcagttgaagatgactttgtggaaatgcggaagaacgaccctcagagcatcactgctgatgatcttcaccagctgctcgtggtggctcggtgtctgtctctcagtgctggtcagacaacgctgtcaagagaacgatggctgagagcaaagcagctagagtctttaagaagaacgaggcttcagcagcaaaaatgtgtgaatggaaatgaactttaaagatgtaatacctatgaagagtaatgggcaaactgtagccacataattgtaaaattcagatattcatttataccacattgttttataggtaatttctatcacaaaccagtgacatttcctgaaatcaagcctggtaacacctgatgtttatatgatattcagtaaggacttttaccttactgatttcatggagcttttgaagtttgttttataataattatataaattagtaatgatgtaaaaaaagtatttgatattaaaagtttaatattgaaaaaaaaaaaaaaaaaaaaattgcg

SEQ ID NO: 162 - DNA, 1036 bp, Homo sapiens
  misc_feature (869)..(869): n equals a,t,g, or c
  misc_feature (894)..(894): n equals a,t,g, or c
  misc_feature (915)..(915): n equals a,t,g, or c
tcgacccacgcgtccgtgaaattcagacacaacagcaagaggaatggagcactaccggaaagctggctctgtggaactcccagcaccttctccgatgccgcggctacctcctgataccctggagatgcgggtccgagatggcagcaaaatccgcaacctactggggctggcactgggtcgattggaggtggtggtgcacggcatgtggtgttctcaggttctggtcgggctgcagggaaggcagtcagctgtgctgagattgtcaagcggcgtgtaccgggcctgcaccagcttaccaagctgcgcttcctgcagaccgaggacagctgggtgccagtctcacctgacacaggcctggatcccctcacggtacgccgccatgtacctgcagtgtgggtactgctcagccgggaccccttggaccccaatgagtgtggctaccagcctccaggagcaccccctggcctgggccccacatcaagctccagctgtggtccacgaccccgaagaagggttcgagacacctggtcctaaagatgtgccaagcaagctgttttccacgcatgaatgtctaggatggctttgcctcctcaggaaagcctcttgtaactgttcaacatccccaacaagacttgaattcacagcctccctgtcctgcttccttctttctgcagtgtgaaaagggactgctatgaagagttaaaaggtgtgcggtctcagctggggtctggattgcttaagaagggtttacttggcattctacctactgtgcctctgtcctttcttctgacagagatccagggagtgggttaggaaataaacgttctgcccatttgttaaaaaaaaaaaaaaaaaaaaaaaaaattaanaaaaaaaaaaaaaaaaaaaaaaaanaaaaaaaaaaaaaaaaaaaanaaaaaaaaaaaaaaaaaaaaaaaaaaaaaaaaaaaaaaaaaaaaaaaaaaaaaaaaaaaaaaaaaaaaaaaaaaaaaaaaaaaaaaaaaaaaaaaaaaaaaaaaaaaaaaaaaaaaaaaaa

SEQ ID NO: 163 - DNA, 902 bp, Homo sapiens
ggcacgagctctgaaatatgaaatgcagctattggatgaactcccaatgatatacagctgttgcatatttgtgtactgcatgtttgaatgtttcaagatcaagaactcagtaaactaccatctgctttttaccttagttctattcagtttaatagtaaccacagtttaccttaaggtaaaagagccaatattccatcaggtaactgctacgtgagcttcaggtataaaattttaaacaccgtatcctccagaaagactttctactgtgtcatgtatggaatgttggtctttacattagtacttcgatctatttatattgttacatgggtttatccatggcttagaggactgggttatacatcattgggtatatttttattgggatttttattttggaatatagataacatattttgtgagtcactgaggaactttcgaaagaaggtaccacctatcataggtattaccacacaatttcatgcatggtggcatattttaactggccttggttcctatcttcacatccttttcagtttgtatacaagaacactttacctgagatataggccaaaagtgaagtttctctttggaatctggccagtgatcctgtttgagcctctcaggaagcattgatgaatcattccaccaagaaaacaaacaagcacctaccatagacctggcagaataaataaggaaatccttaaagatctacaagttcaaatatgtcatgaccatcacagcagaggagtgactttctgactaatgctgccacccacacagagaataaggagtagggcctgctgggtgtttagctcatggctttatcttatttgtccccctcctcctttcacgctccagtttataaagaaacagagatgaaaaaaaaaaaaaaaaaaaaaaaa

SEQ ID NO: 164 - DNA, 897 bp, Homo sapiens
ggcacgagggacaatgaagagtatgaaattgaagtttttctccattgaaaacattcagggaggactttgattaaaactttttgtaaaaagtttcagtagtgttgacttgaggatgatacaaagctgtatactatgttagttagatccttgcttctcaggtctgggaaacatcttcatacatcttccatgcacaggtgtactcatgtgcgtgtttgtatatgagcttatgcttctctctctggtgtttcttcctcattggtctttaccttctcttccttacttttcctttgcccttcatagcaatactgttaagccagatatttacttcttatgtggatcaaatagtcttatatttcctgtggacaagagatatgttttctactcatttatttctctaattgtgaataggaaacagctagaaaattggaataccttcagcttatgtggctgttgattgactttgtgattcagtgggccttgatatattagaaaaaagtcttttcttttctcttaaaattagtataaaggaacgcatgaactcagtatatgaccttagagacagaaagaaaaaaaaattatgtaacagccctttgagagtgaggaaacattggcactgaaggtaaaagcaacttgtctggagccatataacaagtggcagagccaatagtagaactccagccttctggagagttcttgctcccagatcttgctctctacatgagatgtggactatgtgtctcttcaggttgtcacctggttctttcaagttgctgagttcttccttggggaagtgcagaagggaattaatagagaggatccatttcgtagtctctgccactttttgtgcttatctccctctcatttcagtgtgtcttatttggcaaaaaaaaaaaaaaa

SEQ ID NO: 165 - DNA, 1284 bp, Homo sapiens
ggcacgagactcgtgccgaattcggcacgagcaacagcaaaagcctagtgcattgggagatgtgcaacctccctgaaaatcttttctgtttctggagtacttcaggggtggcctctggccccagagcctttgccacagtgctcccaccagcccccacctcatccgtctgtttgcagagcctcatctacaggtccccacgctgccttctttactcactctgcgcttggccgttttgttatttggcttagtctacattgggcggaagtctgtgtgcacagagtgggtgttccttcgagccccttccactcagagggccacacccagcgatgccagtgaaggtggcacagcctctcttcagtttctcctgactgtgatctcactggggtagaattcccctgagagaatccctcactcacggctccctttgccagagtcagttcaatcaggtctgatgtgagcaatttacacacttgtctcagaaagtccctcagggtttgtagaggactgcaggggggcatccgctgcagactcagcctttctctgcagccatcctgcagtgggggtgagcgggcacaggctgagaactgctcttgggtggtggaagcaggtgtcacggtgcaagtctccccctgcacccctcccccagcttgagccgtgtcacccccctctccctccagcatgggcctgtgtctcaggctctctggaaggtggccctgccccggaccctcttgcaggtgtcctggtttgacttggaactagatggccatctttccaggctttggtggcccaagagcagtctgggtggatggaagtggctgtcccctcctctccagcccctgcccacccactggtggaggtgctaactagcagggacgtggcataggatgggagctgggcgtgaggtgcttggggtccattctttgtccctcagcttctcagagtccggccagcccttgtgttcccgtgccccacactttcctcctccccactgcagtgagtcaatagtccagggtggggcctggcctccctgccctgattggggactcaggaggtgaggcctgcggggcttcctgccccctccttgcccacctgcctgcccccgggcagcacgggagggagagcagggtgagcacgcttgttggtttcagatgcactttctgcttgccattgmccgtatctgtgcgttccttcatcctggtcctggctttatggaacaccatgtttttagcatgtttttaaataaaaacggataaagtgtcaaaaaaaaaaaaaaaaaaaaaaaaa

SEQ ID NO: 166 - DNA, 1129 bp, Homo sapiens
  misc_feature (564)..(564): n equals a,t,g, or c
gggtcgacccacgcgtccgcaaaggttcatgctattcgatagatgctttcaaaatgatgagtgggaaatgtaactttgtcatcttgcagagcctacaatgcaaacattttttccgccccatgtacagtttcatttacatagtgttgtcaaggaataagtgatttgtttcacttaagtgatttttccaggtaattgaagcttacctctttgtgcacacattattctttgcttaaactttctttgatgaaaacatggcacakggttctttcctttttttttgcttggtacatataaatgtggctacatcttttcttgacttggggttatcatgataaagattgctttgttctgtgccgtaatcctgttattgacagctgaattgtgtgggattgagagcctgtatgtgaatagtcacagatccatattcttttagagttaccattattactaataatatagcycctctgagtcattagcaaatcccaggcaggatgctaagaattcatatacattataatcttggctaaaccatccaccccactccaagaaatgatcattattatncctcctactttacaggtaaaaattgaagtttaagggataagtagtaagtggtagagttgagatttgcatccatgtctctctaactgcaagatgcctgttgccagttatacttcttctatttctcctctctgcccctctttgggtatttctgtctgtccggttgctttaaaagcctttgcccaggtaagggcccgagattaggtctgtgcctattttgtggaaattattggtatgtttttcgttaagtggagttctgaaggcatttttgctgatttctgggttcccagacatctgcacggttgccgtttctagaagtctaacctgtgaattcatcactgtgtatgctaaggctttgggagggattataggattttctgcattatgattaagcagcataatcaagaaacttgcagtcagaggaaagcgtggcaattctgtaatgcagaagttggcagaycttttctgtggagggccagatactaaacgtcttagttcattttgtgttgctataaaggtatacctgaggctgggtaatttattaaaaaaaaaaaaaaagggcggccgc

SEQ ID NO: 167 - DNA, 2587 bp, Homo sapiens
  misc_feature (1765)..(1765): n equals a,t,g, or c
  misc_feature (1821)..(1821): n equals a,t,g, or c
ggtctttgccctctcaagttgctcttgaatgttgattcaactcattaggacatacttggatgatgaattagaaggagcatctttgccctctacttacagatcctaggaacaatttgtggaattatcagtaagcaatatctgtaacagataaaatgtctgctttccctttgcccctcttagcctatgacatgccacatccaatttgtcttcgttccaactgtgagaggtcttaatttcatcattctggccttttgcagttaaatattctccaagggatatgatctatggggagaggactgatagtggaactaatctttcaaggttctgcttaagcaattgtagataacataggagaagaaactctggaaacaattatgattatcctagttctgcccctgtggaaattcaatccgaaacccttcatgtttttgcttctctcttctctacatggatggaatatgttatacttttttgagctgaaaaatctaaataattagaaaaagacaaagttgtaatgagttttctgtttaaacttataggaccctttctaataaaagtgttattttaatcattgaatcgttagttaactgctttgtatggttatgtcttgtctctctttaatccagggactgcaagcaactaggcaaaaaactaacaaaaaaaccaatgttttataagagtggttctcaaactttaaagtgctgattaaagcacagattgcccaggcctcaccctcagtagatgggtatggggcccaagaactttcaacaggagatgctgctgstgcagcttgtctaagaactacacttggaaaattactaatttgtgtaataaatacctgaccatttggaatccttagaggatggaaatattttgtaatgctgtgtgcaagatttgatatagaaaaacttgggttcaagtggcaattcagcagattacaagaggtgaaacaactgagtttctgagactcagttttattatctgaaagtcaggaatgaaaataatgcctatgtggcagaactgctataaagatcagacaaggtcgtgtatgggaaaggccttggtaaatggaaaagcacaatctaagtgtaacttattctagatgtgctttcaataggcaagttttatatacctaagactaaaagcttgcattttaatccctgggattgaaatctttcaccatcatccccatgatggtaataacaacaataacaatactagtgcactatttattgtattttctgcaatgggcacttaatatgttttgattatatatttcaaaaacctcataaaatctattttatcatgtatattatttgcttacctaagagtgtactggacagaatttaaatttttcttgagggcttagggcagtgcagttcttagggtgtgtgatgtctctgtctatatagatgatttgatttaaaaatgtgttatatgtgatacatttataacggaatattttttgctaaaaagaaatgagctaccaagctataaaaagatatagaggaaccttggatgcmtttttcyaagttaaagaagccaatctgaaaaggctataaaactgtatgatttccaccatatgacactctggaaaaggcaaaactatggagatattaaaaagatcagtgkttktcaggggttaaaggggaggaagggataaatagscagagcacagatgtttaggscagtgaattattctgtatgattcatattggtggatccatggtcattatacatttgtcaaaactcatagagtgtgcancatcaagagtgaactctaatgtaaactatggactatgggtgataatgatgtgtcancataggtacattaattataacaaatataccactctggtgcccagtgttaatactgggggaactgatgtgtgtagaggacaatggtatatgggaactttctgtaattttgggaactgaaaactgctcttaaaagaataaagtgtattaaaaaggatcacaccaaaaaatgaattgcaaaattcatgacctcatgtgaaagatagtgactgtggtagatagaataatggcccctaaagatgaccacatcctagtccttggaacctgtgaatctgctactttacttggtaaaaggggctctacagatatgattaagttaaggattttgagatgggaaggtcatcctggattrtctragtgggtgcagtgtaatcacagggtcctttaaagatggaggcagactgtcagaggaattggcacaaaagcagaggtcacacacacacacggggggatagagagagagagagagagaggaagatgttacactgctggctttaaagatggaggaagtggctattaagtcaagcaaggcatgcaacctcaaaagctccaaaaaacaaggaaatgaccttcagaaggaattcaaccttatattccttgctgacccattttagacttttgactatctgaactttaagttaataaagtgctgttgttttaagccaataaattggtggttatttgttacatcagcaataggaaactgggataatgatttttcaatgaaaatttagacaagattagaaaaaaaaaaaaaaaaaaactcgag

SEQ ID NO: 168 - DNA, 582 bp, Homo sapiens
  misc_feature (575)..(575): n equals a,t,g, or c
attcggcacgagtcggtgctcgctccatcgggtctggcggggctggcagcggcgaggacccgggtctggcgctgtgggccgggagccgtggggcggcatggaggggctggttgtcgccgccggcggggacgtctccstgcacaacttcagcgcgaggctgtgggagcagctggtccacttccacgtcatgcggctgacggactcgctgttcctgtgggtgggggccacgccgcacctgcgcaacctcgccgtggccatgtgcagccgctacgactccatccccgtgtctacctccctccttggagacacttccgacacgacctctactggccttgcccagcgcctagccaggaagaccaacaaacaggtgtttgtcagctataaccttcagaacacagacagtaacttcgcattacttgtagaaaacaggatcaaggaagagatggaggctttccccgaaaagttctagctgagtggcagaagtgagaatttgtaaacttatgtacaatgtacgtgtaaataaatggattgaattcaaaaaaaaaaaaaaaaaaaaaaaaaaaaaaaaaaaaaanactcgag

SEQ ID NO: 169 - DNA, 879 bp, Homo sapiens
ggcacgagaaactacaaattttaaatagtatatttccagggataggttgtcctgttcctcgaattccagctgaggccaatcctttagcagatcatgtctctgctactcgaatcttgtgtggagcccttgtctttcctactattgctacaatagttggtaaattgatgttcagtagtgttaactctaatttacaaaggacaatcttgggtggaattgcgtttgttgccataaaaggagcatttaaagtttacttcaaacagcagcaatatttacgacaggcacaccgcaaaattctgaattatccagaacaagaagaagcataaaactgacttctggttgttctgcagttctctcatccttatgaatctgttgtgttgttttgattccatcattaatgcacttgtggagacttgtgataagctgctgctcctatattttttaagaaatataataaagcacttagggcaggggaaatcatctcggtaatcatggaacctaaggatgtgatttgttttcattgtttgtatgtactacttttatggcagtcatatgaaccattatcttagcatggtaaacctgggttttgttcatattttctccagacagaaatgcaaagatcaaactgtgcaaatattaaaaaaatgcacatgctgttttattcaaatgcctcttttgtacatgttcatgtttagtgttttctcagaatcagcaactcaaggtactatgaggatttttctcactgacataatttgattacatactaaataagaggatatgttaatatgaggaaatgtaaattaaattagttataaataaataaccaaaaatgtatgtaaacattcaaatgattatctgaaaaaaaaaaaaaaaaaaaaaaaa

SEQ ID NO: 170 - DNA, 352 bp, Homo sapiens
ggcacgagcaaggactggcagcagggaagccctgtgcatgtgtgccctgggaaagctctgcttgattctgcaaagctggcatcctctttaaggaagccctaggacaggccaaatggagctcttgtccaaggggtcatttctgtcttgacagatcgaaggtgccttggaatatggaatcacaagtgatgacatcttctggctgaaggaatcccctggaaaaacgtaaggcctgcgcgtgcttggtggggtcctctttttgttcaccagagtgagcactggacccttagagcctgtgctggtgctgggctcctggggctttctttccggtttacccaaaaaaaaaaaaaaaaaa

SEQ ID NO: 171 - DNA, 919 bp, Homo sapiens
ggcacagagaaaagctagccactggtattttgttttgtttaaaaaaaaaaagaaagaaagaaagaaagaaaaacggaaaggaacctagctgcctgtatctttcatttttaaaatagcacttgagttattttctgagtaatccaataaagaacttttgatgacagccagaatgtgttagaactctggctgaacatttcatctcctgtgagtcagaagggctttatttctccctttgatggggccccttcttctttctggtgctctggaarttgtttagrggaaagaattctaattttaattaattgcgcrtgagttaatctcactcgcttttctgcttccaggcatcttaggaaaaacmaatggttttagtaggcatcccttatctactaatgcttttttaaaacaaacagggacatttttattatagatttgatttttttaatgaatgtttttaaaaatatataaataggacaccaaagcggcagggttttttttggggggagggggtttgtttyccaactcaagatggcacattagtggccagcaatattttttaactcattccaaccaggaagcttttttatacattgcctaaatctacgccaaccagaaaatagtctcatctctttttttctcaaatgagatccgtgttttattttagcattaaattagttacactgtgatgactggcctattacctgactcagctccctctaccttgaaattgacatttttaaaaaatgcaactaagtggttaatagtgtgtgacgctcaaagttaatgtaaactggaaaggttgtgtgtcgttgctttttgtgttttggttaggcttggttttgttttttaatttttatactttctaataaatttgcagtttcattctttcaaaaaaaaaaaaaaaaaaaaaaaaaaactcgag

SEQ ID NO: 172 - DNA, 1165 bp, Homo sapiens
ggcacgagattttttcctttatttttgtcaaatgagtttatttgaagaaccagcctttgagctctgagattatgtcctcagtttggtctgttctgctgttaatgctaccaactgaattatgaagttcttatagtgaactttccaattccagaagttcagtttgattttttcttaaaatggctatttcttatgtcagctcttggatcattttactggattacttgggttccaaggatgggtttcaactttttcctgaatcttgatgaacttctttgtcattcagactctgaattccatttctgtcgttttaatcatttcagtctagttaagaattattgctggggagctactgggctcatttggaggtaaggggtactctggcttttagaattgccagaattcttgagctgattctttctcatctgtgtggattgatattccattaacttttgaaattgatattcttcagatggagcttttagctgttatgtttttttaatgctgttaagagtttgactgtggtataccttgggcttagttgattgtctttgtttctgacactgatgctttcagaggaacaaagctcagttcagcctccctaggcagaattctttaactctggggtactgggactgggaacacagctttattctctgtccccttaagatcaagcatttgctgcactgggggtgtgggaggatatggtgctcccagcctgctggcaacagtgctctgttggaggtttccagcagaagcactgttggggctgttgagtggccttgaacaaaacctctctgatgggtgtctgccagcaaaagcactccagtgggatggcaggggtggccaatgagagagctatggtggtggctctggtaaaagcactaacagcaggttgggtttgggttgctgcaagcaagtgtgcttcagtcaggcagcgggcaggcacaggcaaaagtgctctggcatggtggctgaggattcatggacgaaaggactccagcaggttggcagggtggccatgggtgaaagatctccattgcagcagcagggacactgcagatactctggtgtgagtaagcactctggcagggcagtggataggttccaggcaaaagcactctgatatgggtcccctatttctttgcagtaaacatttaaaaaaaaa

SEQ ID NO: 173 - DNA, 1891 bp, Homo sapiens
ggcacgagtgcacctgcaagcatgggggtggcaggagccacagagctggctgctgagaggagctgcagatctggagaagacagcctaggtaaaggtggacagtgtgagagctgctgatgagatagctgctgaataaaactacattttacctgcctatggcccgccaggttttctttcagctatcgcccatccacccagtcccctcgaacctcagcatgggctggaacctgaccctgggcatgacatttggcatagttgtggacctgacacctgtgtttgtcctagtcctgtttctccctgccttcctgttcctctcgctgccctcatggtcactcccaagggatccaacccatgttaagtatgggctggaggactgcatgaatgcctcatgatcttcccagaggcaaaggcacctactgccttccaaggtcagtgggaggttgggatcaacactgtttattatgcttaggacaaaaaagatagggagaaagatgtgcaccttacagtcatctttctgggatagaacacaatgggtcttctcctgcctcctggatatgttagtcaaggccagtccatgctacacatctagtctgacttctaaaatagaagcaccagatgaattcagccctgagagaattttcagcagctgtgggggcgctggaggaaacactattaaatagttttgcacctgagacagatagcctcactcgcctcaccctagtcctggtggcatttgtctcaggtgcaaaatttaagaaagaaaccttggagtgctcaccctgtggctgggtagatggtcctaaagtggtggttttcaagcctgagtgtgtatcaggatcatcaggggagcttgctaaagagcagttcctgcggtcagaccctcatgcattttgagcaggtgtggggactgggaaactgcatctgtaacctgctgtaatctaacgcttatctaaatactactgtgctcacacagagaacaccgcaaaagtagaggtgttcctccagagggcaggtgagcagatggcacagtctgcttggaattcagtcaggtgatgagagatgagatgaggcactcctagctttgggaagagggagctgaaagatgaacctttgcaggtgcccacggtcaaagtggtggtttaatgccatgccatgcccattttctgttggccttggcagggagttacagccctaccttaggacctggctccttatttctgctgtaggctctttcctgccctggccgagatggagtggaatgagacctagaaacatcaagctaaatacatgtcctcagaaagataaaggtttacattttcacccccatcaaatctgaaagctctctgcctgtgtttttctaagggatagggacatcattactcagtccacaacctggactcatgtagggtcccctgtcagtaaaggagtcagtcaagcccaccaggtataccaaggactcttaccctcagcccctactccttggaaagctgccccttggcctaatattggtgtttagcttgagcctgactccttctcaacactaagagctgatgaagtcctgaagcagaaagagctctgacctgagagtcaaacatccttattctgatctcagctcagcccctgatttgttgtgtgaccctggatatgtcacttcctgtctttttgactttttaaaatgaagggtagactagaggagagcttctaaaactttaatgtggtcaacgaaatggaataggaaattccacaagtctgtccttccacaaaagcagcaaataaggtggcaaaaactcaaatttatgggaactctggaaacgaattgaaagtttacagcaatcaggtgaatacctaagaataaaagctggatttagtaagaaaaaaaaaaaaaaaaaaa

SEQ ID NO: 174 - DNA, 2267 bp, Homo sapiens
aaccaatcacaaagtgtgggcattatttaaatcttgattcaaataaacaaactgaaatatataaatgacacttatgaaacaaaaatgtggccactgattgggtatttgactaaatcactgctcaattttattttgtgcgtgataatagcaatgtgcttatgtgttttatcttctagtgatacatactgaaatatttacagatggaaataatataatgccaattattttcttggaaattaatgtgggatgtgggaaagtagacagagatagagatttaacaagatggattatgagctgataattgttgaagttgagtgacaggcacataggggtttattataatatcccgtcttcttttgcatatgtttaattttccataataattttttaatgttctaaaaatttaaactttattttccaatcaaatggaagtctttagagattttattttgcaagtggcaatatgattaaaagggaaataggaaagataaattaagcaatgatttgcacattaattggcagttggggaagactaaagaccaggagattagttaagagtctcttacagcatccctatctacattggaaaaagtctgactgaggtaacattaatagaaatgaaaaggaaaaagtgacaggaatgattttgaggagcatcaaagttcgctgctacttgaatatgaaacactaagcagagaaagattaaaagaggacacaaaaatctcaaacctggcatattttaaaaatagttatgtcatgaataaatataggccagtcaagatgacaaattgttgggtgatgaggtaacaaatttacttctagacatcaagtttgagaggatgaagtgaccacttgctattaaagtaaattattgtttacctacacatgcattaaaaaaaatcctttgtgctgtctcctgaaatgtgattatgtgtttaaaaatacagtgtcataaattaaacttagcataataaaataattgaataaaataaaactataagtcaaatttccttgttactaatattaaaatagcccaaacccttctttgataaaattctacttttttgtcatgttttaccatttgtttacattatttccctgcaaaaaatgttccttgatatcataagtagatctgtatatgtacttattttatatcactttccctgtctctatacatctaaacatataaagcaatgaacacatcataggtgcccaataaataccaagttttctggccaatatgctcacttattgcaagcagtactgagaagaataagattgtaacgctgccagataatttggaaagtcttctgaagcttccttaagtaagataacatcattattttattaagtagtatcattaattatcttaagtaacatcatcaatactgaaataatttcttctagtgacaaactacggaaatacatatagtagaaactgtgtctaagtcagacttttgaatttcatttaagacaaacttagttgtacactattaaaagtctataataaccacaatactgatcagtgcttagcatgtccatacccaaaagtttggaatttgtcatttttaatccctagcatcatacattcccatatcctttaccttagtaagtgattccttgtgaccaagtgaaccactctaattacctccataaaaagaaattgagaagatgtctcaaaaacaataaaaagcagaaatatattgttctctaaaccctctgattcttgacagtttttgcttcctagatccaccagttcagcatgctacccaatactgacaactaatcccagactttctttgctacttgaagccaaggcaacatccaactacatcatctctcgctgtttgcttgaaaacaaatgtgaaactatttcattcgtttgcttgaacttaccaataaatacatggctagaggtcatttagtttggcagtattctgattcagcaaagcaataaaaccaacccaaactatttgaaatcccaatgtccaggaccctggagcaccatgtctcttgctgtcatagcacctgactgtgagtgtgtttcctcactcgcctctgaaagctggcggcaagacccttgaccatcaaacaggagaaaaatcctcatcatctatcaagggggccatagttggaatctttctctgttatgcacatagaatgttcctgcagaaacaaagatctttccatgaacagtaataagttccctcttgtttcaacaatgattggttgaattcgatatcaagcttatcgataccgtcgacctc

SEQ ID NO: 175 - DNA, 1673 bp, Homo sapiens
  misc_feature (515)..(515): n equals a,t,g, or c
tctccggataactgtgctcctgacatccttccttatggttttgggaactggtctaagatgcatacctatatcagacttaatccttaaaagaagattaattcatggaggacagatgttaaatggattggcaggtccaactgtaatgaatgcagcaccatttctctctacgacgtggttttctgcagatgaaagggccacagccacagctattgcatcaatgctcagttatcttgggggagcatgtgcatttttagttggaccacttgttgttccagctcccaatggacatcacctcttcttgctgcagagagcagcagggcgcatattaaagatcgcatagaggctgtgttatatgcagaatttggagttgtctgcttaatattttctgcaacactagcttatttcccaccccgacctcctcttcctcccagtgttgctgcagctagccagcgtgagttatcggagaagcgtttgtagattattaagcaattttcgatttttgatgattgctttanatatgccataccacttgggtatttgctggctggtctggagttctggacttaattttaacaccagcgcatgtcagccaagtagatgctggctggattggattttggtccatagttggaggctgtgttgttggaatagctatggcaaggtttgcagattttatcaggggtatgctgaaactaattcttctcctcctgttttcgggagctacactgtcatccacgtggttcaccctgaactgtttgaacagcatcacacacctacctttaaccacagtgacattgtatgcctcctgtattctcctgggagtgttcttgaatagcagcgtgcctatattttttgagctttttgtggaaactgtctacccagttccagaaggaattacttgtggagttgtcacttttttaagtaatatgtttatgggagtacttttattttttctcacattttatcatacagagttgtcttggttcaactggtgccttcccgggtcgtgtttgctcagtctcctcctcattctgtgcttcagggaatcctatgacagactctatcttgatgtggttgtctccgtttaatagcacagacttgaaggagtttaaaaggaggctggaaatcaatactgcacactgcacatttgctcagaattgcacatctaacaggaaaagagggagaagaaagaaacttcattcagaggttttgttaggttacagattatcacattaatttaattactactaggtaataataatgggagacttgagtgataataggggattttaaaactctacagatggcatacctgtgcctgcttctggggttggaagtgtgacttcttacacataaagcactacctaagtaattctctctctgttttgtgccagtgctaaactactgattacttgtaattatgaaaagaaataaagggtgtctatcatatgaagataacgccttccctaagtcacatatcagaataggaagatatgccactaacttctaaagaagttcaaaccctgtatccaattttaatgataaaatagccaagaggtatatcgatgatggaaattagccacatgtacactacattttttctaataaagccatttcttatatgaaaaaaaaaaaaaaaaaaaaaaaaaaaaaaaaaaaaaaaaaaaaaaaaa

SEQ ID NO: 176 - DNA, 709 bp, Homo sapiens
caagatccgactccctgcacagccgtcctggtatgtacagtccttcctgtttagtttatgccaggaaattaatcgggttggaggccatgccttgccaaaggtgacattacaggagatgctgaaaagctgtatggttcaagtagtagctgcctatgagaaactctccgaagaaaaacagattaagaaagaaggtgcatttccagtcacccagaaccgggcgctgcagctgctttatgatctgcgttacctcaaacagcaaccttcatcgcctgggtgcagcgaacttcttgttcctgttttgggattggtgactggtacagagaatcagctcgccccccggagcagtacgttcaactcccaagaaccccataacatcctgccactggcatccagtcagatcaggtttggacttctcccactgagcatgacaagcactcgaaaggctaaatcaaccagaaacatcgaaacaaaagctcaggttgtccccccggcacgctccacagctggtgacccgacagttcctggctccttgttcagacagcttgtcagtgaagaagacaacacgtctgcaccttcattattcaaacttggctggctctctagtatgactaagtaacatggcaacacatctgtctctccctaaataaatactaccacattatttcttctaaaaaaaaaaaaaaaaaaaaaaaaaaaaaaaaaaaaaaaa

SEQ ID NO: 177 - DNA, 1760 bp, Homo sapiens
ggaggagctcaacagcgggaaggtgatgtacgccttctgcagagtgaaggaccccaactctggactgcccaaatttgtcctcatcaactggacaggcgaggacgtgggaccccaggccccagtgggctctgtgtaccagaagaccaatgccgtgtctgagattaaaagggttggtaaagacagcttctgggccaaagcagagaaggaggaggagaaccgtcggctggaggaaaagcggcgggccgaggaggcacagcggcagctggagcaggagcgccgggagcgtgagctgcgtgaggctgcacgccgggagcagcgctatcaggagcagggtggcgaggccagcccccagaggacgtgggagcagcagcaagaagtggtttcaaggaaccgaaatgagcaggagtctgccgtgcacccgagggagattttcaagcagaaggagagggccatgtccaccacctccatctccagtcctcagcctggcaagctgaggagccccttcctgcagaagcagctcacccaaccagagacccactttggcagagagccagctgctgccatctcaaggcccagggcagatctccctgctgaggagccggcgcccagcactcctccatgtctggtgcaggcagaagaggaggctgtgtatgaggaacctccagagcaggagaccttctacgagcagcccccactggtgcagcagcaaggtgctggctctgagcacattgaccaccacattcagggccaggggctcagtgggcaagggctctgtgcccgtgccctgtacgactaccaggcagccgacgacacagagatctcctttgaccccgagaacctcatcacgggcatcgaggtgatcgacgaaggctggtggcgtggctatgggccggatggccattttggcatgttccctgccaactacgtggagctcattgagtgaggctgagggcacatcttgcccttcccctctcagacatggcttccttattgctggaagaggaggcctgggagttgacattcagcactcttccaggaataggacccccagtgaggatgaggcctcagggctccctccggcttggcagactcagcctgtcaccccaaatgcagcaatggcctggtgattcccacacatccttcctgcatcccccgaccctcccagacagcttggctcttgcccctgacaggatactgagccaagccctgcctgtggccaagccctgagtggccactgccaagctgcggggaagggtcctgagcaggggcatctgggaggctctggctgccttctgcatttatttgccttttttctttttctcttgcttctaaggggtggtggccaccactgtttagaatgacccttgggaacagtgaacgtagagaattgtttttagcagagtttgtgaccaaagtcagagtggatcatggtggtttggcagcagggaatttgtcttgttggagcctgctctgtgctccccactccatttctctgtccctctgcctgggctatgggaagtggggatgcagatggccaagctcccaccctgggtattcaaaaacggcagacacaacatgttcctccacgcggctcactcgatgcctgcaggccccagtgtgtgcctcaactgattctgacttcaggaaaagtaacacagagtggccttggcctgttgtcttcccctattttctgtcccagctcatccgtgtctctgaagaacaaatatgcttttggaccacgaaaaaaaaaaaaaaaaaaa

SEQ ID NO: 178 - DNA, 1135 bp, Homo sapiens
ccacgcgtccgcttttgtatctcaagaattgagggttttgttttctgatctcaggttttattattggtgggagcctgtgtttcttcctgggtagaattgaataagattttccaggaaaggcatttgtgtagctaattacagattatggtgcaaagtatgtctcatattcctccccctaaccccagctaattgctgtatacttgacagtttatttcaatattgtattaagacattggttttgtgctggacagagtaaaagggagatggtatttttttttaaaagaacaatttatttcataattaagtatctaaatacttggttgggaataaatgactaattagaacagtacctttaggtattctgatacctctacttagaaatgccttttcttttcttgcaaaaattacttggcagatttgatgaaaaagaaaatgtgtccaactgcatccagttgaaaacttcagttattaagggtattaagaatcaattgatagagcaatttccaggtattgaaccatggcttaatcaaatcatgcctaagaaagatcctgtcaaaatagtccgatgccatgaacatatagaaatccttacagtaaatggagaatactctttttagacaaagagaagggctttttatccaaccctaagattacttcacaaatatcctttatcctgccacaccagcaggttgataaaggagccatcaaatttgtactcagtggagcaaatatcatgtgtccaggcttaacttctcctggagctaagctttaccctgctgcagtagataccattgttgctatcatggcagaaggaaaacagcatgctctatgtgttggagtcatgaagatgtctgcagaagacattgagaaagtcaacaaaggaattggcattgaaaatatccattatttaaatgatgggctgtggcatatgaagacatataaatgagcctcagaaggaatgcacttgggctaaatatggatattggctgtatctgtgtttgtgtctgtgtgtgacagcatgaagataatgcctgtggtatgctgaataaattcaccagatgctaaaattcaaaaaaaaaaaaaaaaaaaaaaaaaaaaaaaaaaaaaaaaaaaaaaaaaaaaaaaaaaaaaaaaa

SEQ ID NO: 179 - DNA, 2704 bp, Homo sapiens
ccacgcgtccgcttcttcagctatgctgaggtgctgaagcgggagccgggggccctgggagcacgctgctggtcactctatggccgctgctacctccgccacttcaacgagctggagcacgagctgcagtcccgcctcaaccgtggctacaagcccgcctccaagtacatgaattgcttcttgtcacctcttttgacactgctggccaagaatggagccttcttcgctggctccatcctggctgtgcttattgccctcaccatttatgacgaagatgtgttggctgtggaacatgtgctgaccaccgtcacactcctgggggtcaccgtgaccgtgtgcaggtcctttatcccggaccagcacatggtgttctgccctgagcagctgctccgcgtgatcctcgctcacatccactacatgcctgaccactggcagggtaatgcccaccgctcgcagacccgggacgagtttgcccagctcttccagtacaaggcagtgttcattttggaagagttgctgagccccattgtcacacccctcatcctcatcttctgcctgcgcccacgggccctggagattatagacttcttccgaaacttcaccgtggaggtcgttggtgtgggagatacctgctcctttgctcagatggatgttcgccagcatggtcatccccagaggctatctgctgggcagacagaggcctcagtgtaccagcaagctgaggatggaaagacagagttgtcactcatgcactttgccatcaccaaccctggctggcagccaccacgtgagagcacagccttcctaggcttctcaaggagcaggttcagcgggatggagcagctgctagcctcgcccaagggggtctgctccctgaaaatgccctctttacgtctatccagtccttacaatctgagtctgagcccctgagccttatcgcaaatgtgggagctggctcatcctgccggggccctccactgcccagagacctgcagggctccaggcacagggctgaagtcgcctctgccctgcgctccttctccccgctgcaacccgggcaggcgcccacaggccgggctcacagcaccatgacaggctctggggtggatgccaggacagccagctccgggagcagcgtgtgggaaggacagctgcagagcctggtgctgtcagaatatgcatccacagagatgagcctgcatgccctctatatgcaccagctccacaagcagcaggcccaggctgaacctgagcggcatgtatggcaccgccgggagagtgatgagagtggagaaagcgcccctgatgaagggggagagggcgcccgggccccccagtctatccctcgctctgctagctatccctgtgcagcaccccggctctggagctcctgagaccaccgccctgcatgggggcttccataggctctacggtggcatcacagatcctggcacagtgcccagggttccctctcatttctctcggctgcctcttggagggtgggcagaagatgggcagtcggcatcaaggcaccctgagcccgtgcccgaagagggctcggaggatgagctaccccctcaggtgcacaaggtatagacaaggctgagcagggttcctgtggcccaggatggaggccaccgctgccctgccatcccgtctgcctgccatgggacggctcctctgagtgttccctggccccacgtgtgtggtgtttgtgtgtctgtgcctggccaagggaggtgccaacactgggcttgccacagccccaggagaggaatttggggcctaggaaccgagggcacacgggactctagcctcatccccaggacccccttggctcagagtgtggtgctagaaactggtccccagcccagccccagtactgccacctttacacctacccctgcaagtccccagagggctgcccacgatagaagctgccaagcagggagaacctgtgccaactgtggagtggggaggttgggcctggaccctcaacccctgcaaccttccctagccccctcaatagatgagcaggtcaggctgtggcccttacctcacccgcagttctcgcccagtgctgcagccggctcacctctctccgcttcttgcacatcactggcctgtgtgtgctgcttgctcctgttctgttcgcttgctcccgttccgttcggcttttgctttgcgttagggtgaagaccctagcgtccagctcccctcaacgctatattttgacactaaaaaagaaggtttctaaattgtaggagcaggatggaaatactttgctgcccttgccatcttttaggatgggcccccaggagactgaggtcttcctgggccctcattgctgcttatcgtaccccccatcacctgcacatgggacagaccgggctggagggtgaccttggctgtgtacgtcccagcaaaagagctctggcccgcatctcgctgtgccctgaagggggatgaagggcgatgcctcgcccgaggctttgggctgctgcactgcatgctgggactgctcctactctctgtcccacccctcacccagctgtggtccggctttgggagagtggtgaattgcgctgcccgaactcggagcggagcagggtagggaccgtgtacagcttgataacccttaataaaaagggagtttgaccagaaaaaaaaaaaaaaaaaaaaaaaaaaaaaaaaaaaaaaaaaa

SEQ ID NO: 180 - DNA, 1225 bp, Homo sapiens
  misc_feature (1214)..(1214): n equals a,t,g, or c
ggcacgagccgggtcggcgctcctgcctccctgcagggagctgcttatgggacaccgcttcctgcgcggcctcttaacgctgctgctgccgccgccacccctgtatacccggcaccgcatgctcggtccagagtccgtcccgcccccaaaacgatcccgcagcaaactcatggcaccgccccgaatcgggacgcacaatggcaccttccactgcgacgaggcactggcatgcgcactgcttcgcctcctgccggagtaccgggatgcagagattgtgcggacccgggatcccgaaaaactcgcttcctgtgacatcgtggtggacgtggggggcgagtacgaccctcggagacaccgatatgaccatcaccagaggtctttcacagagaccatgagctccctgtcccctgggaagccgtggcagaccaagctgagcagtgcgggactcatctatctgcacttcgggcacaagctgctggcccagttgctgggcactagtgaagaggacagcatggtgggcaccctctatgacaagatgtatgagaactttgtggaggaggtggatgctgtggacaatgggatctcccagtgggcagagggggagcctcgatatgcactgaccactaccctgagtgcacgagttgctcgacttaatcctacctggaaccaccccgaccaagacactgaggcagggttcaagcgtgcaatggatctggttcaagaggagtttctgcagagattagatttctaccaacacagctggctgccagcccgggccttggtggaagaggcccttgcccagcgattccaggtggacccaagtggagagattgtggaactggcgaaaggtgcatgtccctggaaggagcatctctaccacctggaatctgggctgtcccctccagtggccatcttctttgttatctacactgaccaggctggacagtggcgaatacagtgtgtgcccaaggagccccactcattccaaagccggctgcccctgccagagccatggcggggtcttcgggacgaggccctggaccaggtcagtgggatccctggctgcatcttcgtccatgcaagcggcttcattggcggtcamcgcacccgagagggtgccttgagcatggcccgtgccaccttggcccagcgctcatacctcccacaaatctcctagtctaataaaaccttccatctcataaaaaaaaaaaaanaaaaaacttga

SEQ ID NO: 181 - DNA, 776 bp, Homo sapiens
ggcacgagtgaagtagaacatgcatgagaaagaatgcagaaatcatgaataaacagctccagaaagggatcacgcccaactaaccagcacccgaattcagagcccaccagcccccgggatcccggccacgtccactctgaccccatgcctgcaaggatagggtctctatcgtgacttctaaccccaccaggtacttttgcctctttttagaaatggaatcatacagtctgtactcttttgtgcctggtttgttttggttaacattgcgtctgggagttttatctctgtccagggttggcgaaccccagcttacaagccaaatctggtcctttgcctgttttcatatggcctgtgagctaaggatggattttatgtttttaaatagttgcgggggggggcgggggggggaggaaagaatgatattttgtgacgcgtgaaaattatatgaaattcaaatttgtgtccacaaattgactgggcatggtggctcatgcctgtaatcccagcactttgtggggccgaggtgggtgggtcacttggggccagaagtttgctaccagcctgaccaacatggttgaaaccccatctctactaaaaggtacaaaaaaatagctgggtgtggtggttgatgcctgtaatcccagctactcaggtggctgaggcaggagaatcacttgaacccgggaggcagagattgcactgagccaagattgtgccactgtacttcagcctggatgacagagtaacactgtatctcaaaaaaaaaaaaaaaaaaa

SEQ ID NO: 182 - DNA, 543 bp, Homo sapiens
ggcacgagctaagccctgcatccatgatgaggccggggcaggtctccctcctgggtcctgatgctgtttctgtgctcggctctggcttgggcctcagccctggcaccagctctggccgcaaccctgaccctggctctgggccgggcactctgccggatcccagctccaaacccctccccggctccagatccacccccagccctactcctgtggaatcttctgacccaaaggctgggcacgacgctggtcccgaccttgtgcccagcccagaccttgatcctgtgcccagcccagaccctgatcctgtgcccagccctgatcccaaccctgtgtcctgccctgacccctgttctcccactcgtggcactgtcagcccagccctccctaccggcgagagtccagagtgggtacaggagcaaggggcactgctggggcctgatggctgaaggagacgccggcatcctcgggggcctggggaagttgtgtgttgtgcagtcagtaaaatcctcccactgccaaaaaaaaaaaaaaaaaaaaaaaaaa

SEQ ID NO: 183 - DNA, 1681 bp, Homo sapiens
gtcagaatcaccatggccagctatccttaccggcagggctgcccaggagctgcaggacaagcaccaggagcccctccgggtagctactaccctggaccccccaatagtggagggcagtatggtagtgggctaccccctggtggtggttatgggggtcctgcccctggagggccttatggaccaccagctggtggagggccctatggacaccccaatcctgggatgttcccctctggaactccaggaggaccatatggcggtgcagctcccgggggcccctatggtcagccacctccaagttcctacggtgcccagcagcctgggctttatggacagggtggcgcccctcccaatgtggatcctgaggcctactcctggttccagtcggtggactcagatcacagtggctatatctccatgaaggagctaaagcaggccctggtcaactgcaattggtcttcattcaatgatgagacctgcctcatgatgataaacatgtttgacaagaccaagtcaggccgcatcgatgtctacggcttctcagccctgtggaaattcatccagcagtggaagaacctcttccagcagtatgaccgggaccgctcgggctccattagctacacagagctgcagcaagctctgtcccaaatgggctacaacctgagcccccagttcacccagcttctggtctcccgctactgcccacgctctgccaatcctgccatgcagcttgaccgcttcatccaggtgtgcacccagctgcaggtgctgacagaggccttccgggagaaggacacagctgtacaaggcaacatycggctcagcttcgaggacttcgtcaccatgacagcttctcggatgctatgacccaaccatctgtggagagtggagtgcaccagggacctttcctggcttcttagagtgagagaagtatgtggacatctcttcttttcctgtccctctagaagaacattctcccttgcttgatgcaacactgttccaaaagagggtggagagtcctgcatcatagccaccaaatagtgaggaccggggctgaggccacacagataggggcctgatggaggagaggatagaagttgaatgtcctgatggccatgagcagttgagtggcacagcctggcaccaggagcaggtccttgtaatggagttagtgtccagtcagctgagctccaccctgatgccagtggtgagtgttcatcggcctgttaccgttagtacctgtgttccctcaccaggccatcctgtcaaacgagcccattttctccaaagtggaatctgaccaagcatgagagagatctgtctatgggaccagtggcttggattctgccacacccataaatccttgtgtgttaacttctagctgcctggggctggccctgctcagacaaatctgctccctgggcatctttggccaggcttctgccctctgcagctgggacccctcacttgcctgccatgctctgctcggcttcagtctccaggagacagtggtcacctctccctgccaatactttttttaatttgcattttttttcatttggggccaaaagtccagtgaaattgtaagcttcaataaaaggatgaaactctggaaaaaaaaaaaaaaaaaaaaaaaaaaaaaaaaaactcgtagggggggcccgtacccaatcgcctcatc

SEQ ID NO: 184 - DNA, 728 bp, Homo sapiens
ggcacgagaataaaaaaaaattagtcgtggtgccacttgcctgtggtccccactgcttgggaggctgaggtgggagaattgcttaagcctgagagttggaggctcagtgagccatgatcatgccactgcactccagcctgggtggccattgaattctgcgtggattgcctcagtttgccttgtcagccaacttccactggctgccttggcactgccatgacagcacagctccacaccagagctggggtttctcttcagtcctgggtaccccttggcagagggatttgctgaggaaaattaggtatccttcctagccctccacacacttccaaaccagggctgcggatctgatggatgccaggaagacagccttgggctgagagtgacatcactgcaagagttgagagccagcgtctaaagtgtccacggcatcctgggaggttttatccttggtgactctaatggtagatttttgtccaccttgttctatttgcttttgtttgtttttgatttttctgttttaaaattttaaggagagatggggtttcaccgtgttgcccaggctggtctcaaactcctgagctcaagcgatctgcccaccttggcctcccaaagtgctgggattataggtgtgagccaccgcatccagcccacattgttctatttgtatttcatgaaagcagttctgaatgagagtaaatcaaaaaaaaaaaaaaaaaaaaaaaaaa

SEQ ID NO: 185 - DNA, 2576 bp, Homo sapiens
agctttcctgtaccttctctgcaggtagatgggacaaatgagtgtccggatcagcgggagtgggaaattgaaatactacaaagatctgtttaatcctgataccaactaatctccctttcaagggagagtctgggaagctgtacagctcatttatttttaaactttttctgtttacagagatctgttggtaatctgaggatttttattctacgtcgtcttgacagatggaaaacctgaagtaacttcgggctaaccttgtgtttttggaaaattagtagacttggtggtgaagaaactgggaggagtaggatattagctaactttgcatagccacatatagagcgtcgcagctgcattccaccaaagaggaaccaaaaggcctgtggtgttcccagggtacatattcatgccagaagtgaagtgcttggtgaattcgtttcctgaaagtttatcgcatacttgtactgggttaggtttttagaacttcagccataaaaatgggcagaattttccttgatcatatcggtggtacccgtctgttttcttgtgcaaactgtgatacgatcctgaccaaccgctcagaactcatctccactcgtttcacaggcgccactggcagagcatttctttttaacaaggtagttaacctgcagtacagygaagttcaagatcgggtcatgctcactggccgccacatggttcgagatgtgagctgcaaaaactgcaatagcaaactgggatggatctatgagtttgccactgaagacagccagcgatataaggaaggccgcgtgatcctggaacgtgctctagttcgagagagtgagggctttgaggagcatgtaccatctgataactcttgaagatacagagagaaatccatcttttcccaggtctccttcactgaaaacaaaaatctacttacatacactgtcaccttagcatcagagtcggattaatgaactgcggaacaagaggttgtgagaatctaagatggaacctttctttctttctttctttttttttaaattttgtattttccatccaacagcagtgtgtagagagaatattatgcagatgccgttaattttttaccctatgtttacatcttgaggcagcagagtctgtctgcagctatgtggtgagctatgtaaggaaaaaaatctgggctgttagagtgaaaaagtgtgttttatgtcaattgtgaaaggaaaatgttaggagtatggtttttaaacttgggcttcattttaaacttttttttttaaacccagttatttcacttgatttgctagcttcagagaagagatccgaatctgtgcccagcgctaaaggctcagtgttagcatggcttgtgctggccggtgtgccatattcttgttggagatgaaccgtagcaccagagcccattcttccttgtcagtcttggcccaaagatgtcaccattcctagttatttgtcaccacataattggtgttgattggaaactttttctgagatgggacagaactgctgggttgtctttttccatgtaacttaagcatagtaatataaataaagtaatagttggatgcttttggtcctgtgttgcttttaaaaacaccttataaaagaggagagtatttgataagcaattttcatagtagtaaagttttttttcatctcttaaactaaattgaccatgcatataatattctttgtttaaatgaaagcatactgttgaaacccgcagtgttgcatttagaaaacagttgaacagaatgtcaatgtgcattcatgcaaaaaaacatttaatctgcatctgttttagaaaagggggaaatgaagcaacttgtctaaaaatactgctttacaaagcatttcagcctttccccctcagttttgcattgattttttgacaagtctgtagagcctaatagtttccatcaaaggcctagatctcttatttagcatttttttcagctcttctctcagaagttcagctgttgaaacgaaaactgtactttgtaccctcacatacaaagggatcaaatttgacctggtgttattttagccccaaatttatgacattacacaatattaaaatgtaaatgtttctttacccaaactacttctagatattctagtatttgcttctggtggaattaaatgacggtaaaattggctaattatttgaatgaatgaatggatggatgttttgcatgctcaatttctaggtcctttgtctagaaaggaaatttgcctcagttgaattagtgaaatatttctgtcgttgatattaaaagtgacttctgagtacagttaagttcctcctatttgccactgggctgttggttagaagcataggtaactgattaagtaggtatgatactgcatttgaaataagtggacacaaactatcctttctccaccatggactcaatctgagaacaacagcattcatttccattcatttccatactggcttttgattatatgcagattcctagtagcatgccttacctacarcactatgtgcatttgctgtcacaataaagtatattttgtcttgcaaaaaaaaaaaaaaaaaactcgag

SEQ ID NO: 186 - DNA, 1061 bp, Homo sapiens
ggcacgagggacattgcccccccgcctgctgaggctgttccttcctgctgcacttgagcagcctcatcttccttcatctcctctcatgttcacttctctttgcctggaccaatggggaaaaaagtgcacagaatgagattatgtgactacagcaattctgagttagctttgattgctctgcagtaaaattaagggaccatatctttctcatgcacatgatatatagtttcaaatatagatctgtacatacgtgatgatgaaaagttcttcaggatgaggatgtatcagagagtgtgaattgaggccagtcttctgtttcctcccaaactcttaacagattgcatatcttcatgcaaatcttttcatgtattccttgtatactacctatagaaaggtgggacttgggagggtcacttacaactcctgtgatcttattttctcctccaggggctccttgaatagagttttcccccattttactggccaaggctgcagttagagctgtggtttgtcctgcaggggatatttgtcagtgtctggagaaatttaggttaacgcgactggagaagtgctattggcatctagtgagtggaggccagggatgctgctaaacaccccgcggtacacagcagaccaaagaatgatctagccccagatgccagtagtgctgargttggaaaactcttaagttagtaaatatacaactgataggaaaaacatgaagtttcaataattaaaaagctttgcacgaaagtttattacagggctgggcatggtggcttaggcctgtaaatcccarcactttggggggccgaggtgagaggatcacttgagcttaggaatttgagacctgtgttggcaacatagtgagaccccatctctaatatatatatatctgggcatggtggctcctgcctgtagtcccagctacttgggagggttgaagtgggagaatggcttgagtccaggaggttgaggctgcagtgagccatgattgcatcactgtactccagcctgggcgacagagcaagaccctgtctccaaaaaaaaaaaaaaaaaaa

SEQ ID NO: 187 - DNA, 595 bp, Homo sapiens
cacgagcggcacgagagcaagcaagacacaactgagacagatgtaccaggtgaaaaaaatcttcagtatggatacacatgggtattctgaaggctacaatgaatggtttagtctttgacataaggaggatgaacatattatttatactgtgtaatctaatctggcttctatggggaaagcaacatgtacataagtgaattttctacatgaagtgggctacttctgattttaatcaaagctataaaatagattgtatatttcactagcttcttaaagtaactcttccattttcatttatctctaaaaacagttaacttcctgtgctctaggaaatgcaccaataccaaaggtcaatgtggaaatatgggcatgtttgcccctatgctgtgtggtctctagatttctatatttgctttgcttttgtctgctctagtaatctccctccttttgatctgtggcctgggaaaatgtggtttctttgtatttcaaataaaagtaaaatagttttttgagtggttcactcaagagtaaaaaaaaaaaaaaaaaaaaaaaaaaaaaaaaaaaaaaaaaaaaaaaaaaaaaaaaaaaaaaaaaa

SEQ ID NO: 188 - DNA, 214 bp, Homo sapiens
ggcacgagctcgtgccgaattcggcacgagaggacggaggcttttggaccctcggaccccatcccactcagccaagtgtctttctgtgtctggggggaggaggggatgatatccgtgtggttcgatgtattatttttaagctccgtgagtgcgtgggtcagtgtctgcatgaagtggaataaactgcccaccgccaaaaaaaaaaaaaaaaaaa

SEQ ID NO: 189 - DNA, 554 bp, Homo sapiens
  misc_feature (16)..(16): n equals a,t,g, or c
  misc_feature (26)..(26): n equals a,t,g, or c
  misc_feature (94)..(94): n equals a,t,g, or c
aggtcactcattaggnacccccaggntttacattttatgcttccggctggaatggtgtgggaattgtgagcggataacaatttcacacaggaancagctatgaccatgattacgccaaagctcgaaattaaccctcactaaagggaacaaaagctggagctccaccgcggtggcggccagctctagaactagtggatcccccgggctgcaggaattcggcacgagctactaataattattacattttgactaccacaactcaacggctacatagaaaaatccaccccttacgagtgcggcttcgaccctatatcccccgcccgcgtccctttctccataaaattcttcttagtagctattaccttcttattatttgatctagaaattgccctccttttacccctaccatgagccctacaaacaactaacctgccactaatagttatgtcatccctcttattaatcatcatcctagccctaagtctggcctataaaaaaaaaaaaaaaaaactcgagggggggcccggkacccattsgccaaakgggggggttta

SEQ ID NO: 190 - DNA, 1273 bp, Homo sapiens
  misc_feature (37)..(37): n equals a,t,g, or c
  misc_feature (45)..(45): n equals a,t,g, or c
  misc_feature (338)..(338): n equals a,t,g, or c
  misc_feature (820)..(820): n equals a,t,g, or c
ctcgagttttttttttttttttttgttattgcaggtnagcatgtnacattatttgtgtgttgccttccctactagaacatcagctccacaagggcaggaatttttgcctgttgtcaccacgatgtccctggcacccagtatgttcttggtgtctccattgatgatgcagggatgtgtggatatggggcagtggactgtgagcatgtgatgagcatgtgacccagcccctagtgaccgcaccacatggcacaggttgcttataaaaaccattttaaattaaaaaagggaggaagcatcagtgcacacagatggggacacaggggcagagggccagcccnaagtacagtgtggtcaccccacagcccagtggrcccagggcagactcccctcgcagcacagacagctgaggcccgggtgctggttcctctaggtacagctttggtccttgtgggctcagaggtctgcctttcggaaacttgctctgttcaaggagttcctgaggccgggtggggtgggtgccatcagctggggcaggcgctgggtaagcaggggctgcagagcctcccgcaggcggcagtagttgcgctccagctcacggtggtactccttctggtccggcccaatcagggcyttatttttccgcagcgcatcctcacatttcttgcagaagtccttgaagcagagccgcaatttgttgtgatgccggaagarcttggggtcttccgggatctctgctaaaaacacctgggccacctccactggcgtyagcaccgtctcctcccggtggcacacacggatgcgagtcttgatgtaggggaangcktggtcggtgctgaagcagcgtcttacgcttgtgttgctcgggcagctccccgtgtgcgcgcccatccggcgtgaacggcgtgcagaacaggaatgtgcgaagcccatagttgcggtcaaagtaggtcacccggtccttgagctcgtaggtatcaaagtacggttccacatacgtgatctggatgtaggccttttgtgagtcaagcttggacttgtccacagggttagagtctttgataatctcaacgacgtcgtcgccaaatctctccgtgtagaactcctccagccggtgtgagatctctgccagcttcgtgatcgatggctccttgtacacaaactcctgctcatccaggtcaccgaagtgggcgccgtagaagcccacgcggaaatacgtcccgaacacgcgctcccagccggaactctggtgcatgatcttggtgaaggctgtgcc

SEQ ID NO: 191 - DNA, 882 bp, Homo sapiens
  misc_feature (17)..(17): n equals a,t,g, or c
  misc_feature (24)..(24): n equals a,t,g, or c
  misc_feature (36)..(36): n equals a,t,g, or c
  misc_feature (40)..(40): n equals a,t,g, or c
  misc_feature (880)..(880): n equals a,t,g, or c
tggtaaatattgcaaantactccnttactaattggnaacnaaagctggagctccaccgcggtggcggccgctctagaactagtggatcccccgggctgcaggaattcggcacgagcccccttcctgcctcgggctgtgcatctctctctggaacgttctttgcggtctcctcaccgccacttttcttcacacctcaacataaatgccacccccttggaggggccttcctggtttggctgagcctggtcccatgtgggctctgcatgggcccctggatgttaccttggttgtagctgagtgcggatgtggcttgtccacaggaggctgatgtccctgragctgtgacttggtctacctgggcctggacccacgtggccggcccggggcctgtgcgtggccagctcttgcacactgccttagagctggtgtggcttgttgaaccccgttgcagacgcacacgcacgtgggtccccatggctcctcgggacatggaggctgcccrsgctcagggaagagtccttgttgggacctccaggactcttcccagcccccgcctccctcctggggcctccagggcagaaagcccctttcccgggcaggaggacagggtgtggatatacaggctgggagggtctgtgggcagcagccgaggcccaggttgggggagcctcacctaggatgaggctagggctggcagaagatccccacagaggagccaggaggaccccacagtcactctagctcccagggcctggaggtgcaggcgagccccgtggtctccgggcagccggccctgccccactcacctctcctgcccttcccgctgcaaaaaaaaaaaaaaaaaactcgagggggggcccggtacccaattcgargttcnct

SEQ ID NO: 192 - DNA, 1648 bp, Homo sapiens
ggcacgaggtgacgggagcaattagagagcagtagcttctgatgacccacgtgtaggaatgaaggatggggagaactcggcccttacctccttcctgcttccatccatggggcttggagggtctggagagcttcatggtgggcttatttccatttgtgcagaggtggctgggaagctcaggaaccacaggcttttgttttgagtcaattggctttctctctctcttgcagggaagtactacatggccactatgaccatggtcacattctcaacagcactcaccatccttatcatgaacctgcattactgtggtcccagtgtccgcccagtgccagcctgggctagggccctcctgctgggacacctggcacggggcctgtgcgtgcgggaaagaggggagccctgtgggcagtccaggccacctgagttatctcctagcccccagtcgcctgaaggaggggctggccccccagcgggcccttgccacgagccacgatgtctgtgccgccagaagccctactgcaccacgtagccaccattgccaataccttccgcagccaccgagctgcccagcgctgccatgaggactggaagcgcctggcccgtgtgatggaccgcttcttcctggccatcttcttctccatggccctggtcatgagcctcctggtgctggtgcaggccctgtgagggctgggactaagtcacagggatctgctgcagccacagctcctccagaaagggacagccacggccaagtggttgctggtctttgggccagccagtctctccccactgctcctaagatcctgagacacttgacttcacaatccacaagggagcactcattgtctacacaccctaactaaaggaagtccagagcctgccactcccctaattccaaaaaaaagaggaactctacaaaggccaagatcacagagtacagtcttggagggacagaattgtttgtgctgggtattggagctctcagtggggagcacatgggttataatgagaaactgaactgtactgctgcatttcctgtcttccttcctaggtggctgctttgcagggctttggctgttacctttccctgctgaggggctcagggaaaagggtcggggattctcagtcgagtttccagagcaggaggccctacagacatttggccccaaatccctgactcaataaagtaagcgtgtacctagcacctcctcgatgccctgtgttacccatgaggtctgtggtagtggaagctgggggtccaggtctgtctacttcaggtctcatggccgctggcgcaagtccaagttcaaagcctgagaacctgaagttctaatgtccaatggtaagagaaggatgtcccagctccaggaaagagtgtgaatttgcctttcccttatttttttgtcctctccatgccctcccacattgagagtggaacttgccactgagtccaccaactcacacgccaatctcctgctgcaaaccctcacagacacatccagaaataatgctttcccagctgtctgggtattgctggtgtccatggtggtgggttatcagaacttattaatgtcactgtcactaaagttggtatataaccccccactgctaaatttgactagcttaaaaaaaaaaaaaaaaaaaa

SEQ ID NO: 193 - DNA, 762 bp, Homo sapiens
ggcacgaggtgacttcgctcatcacggtcagtcattccttctcctttccagggtgctgggggctggggttccctggcccaagggtccagcctcctctcaccccattccaggtggcatactgcagtctggctctttctcccctccctccccacccaagcctcacctccccaccccttgaacccccatgcaatgagcttctaactcagagctgatgaacaaaagcccccccacccccaatgcctgcctcctcactcctccgtcgctgcccttcacaccttttggtgctacccctccccagagttaagcatggatgtctcctgatcccaggctgggacccctacccccaccccctttgatcctttctacttccacggtgaaaggactgaggtcggactacagagggaagagggacttcccttgactgggttgtgtttcttttcctgcctcagcccagctctgcaaatcccctccccctgcccctcacctccccaggctcaccttgccatgccaggtggtttggggaccaagatgttgggggggtgaatcaggatcctaatggtgctgccctatttatacctgggtctgtattaaaagggaaagtcccccctgttgtagatttcatctgcttcctccttagggaaggctgggatatgatgagagattccagcccaagcccggccccccaccgccaggccatagggcataatttgcatctcaaatctgagaataaactgatgaactgtgaaaaaaaaaaaaaaaaaa

SEQ ID NO: 194 - DNA, 1286 bp, Homo sapiens
  misc_feature (1232)..(1232): n equals a,t,g, or c
  misc_feature (1241)..(1241): n equals a,t,g, or c
  misc_feature (1263)..(1263): n equals a,t,g, or c
tatagtggaggggaggaaaggggggtgataccttgcagtaagtaagtcgaaatagcatgcctgaaaatttgaaacagaccattctaacacccaaggcttgtttataaaatacttgagaattacattaatgtggaatcaacagatgcagaagaatataacataacttttaaaagctttcataaataccagcagcaattgtaagcaaatctacaaaggttcttgaacctttctattatatacaaaactgaaaagtcattaaggagttcaactaatcaggaattaaatggtcatttatttcatgcagtatgatttaaggtatttcttgagattctggtcaaatgtcataatcagcaaacgggattaaaaaaaaaactccaaaatcactaaataattatctaaataatggtattggagaacttgtttcctgctatttggaagagattgttgcttcattgctagtttgtatttctaacttctacagttatagactccactgtgctttgtgtctgaatttctcagtatagacattttgtttactgtatgcttgcatatttattttcaactttgyytgtctttaaaattgcttgaggaaaaatggttgtaattaatttctgctacagaaaagccacctggtacgttttgtctcatcaggattgttttaaattctaaactataagtttgttcagaggggcttttgcaatgatagcagaaaactgtacaaatgtacagttagttatagaggttcttgttgaaatgaacttaccatctgatgatatgtatgtacagctgtgtacttgagtcttttttagtttacttagaaagactagcagtttgacctgttaaacaggactagttcaagtcaagaaactaaggttgttgtatacacctggaggcatctgttattcagcttatcctttgagtgggtatttggcacaatgaggataaacttatgtgacccacttgaatggctgatctaataatgttgacattatgcattctgtacttagtgaaatgtcagatgaaaataactgatgaataatttttttgtattaaagggatgggaaaagaacacatgaatttgttaataaagcactatgatctgcaaacgatggaatgtttcataaagatctaaagaaataaaggaaactttaaaacaaaaaaaaaaaaaaaaacycgagggggggcccggtacccaattcgccctatagtgagtcgtattacaattcactggncgtcgtttnacaacgtcgtgactgggaaaancctggcgttacccaacttaatcg

SEQ ID NO: 195 - DNA, 2186 bp, Homo sapiens
  misc_feature (174)..(174): n equals a,t,g, or c
cgcccggtgcactgtggacgatgagtcagggttaggggcgccaggacgcgggcgtgcaggacgccagagctgggtcagagctcgagccagcggcgcccggagagattcggagatgcaggcggctcggatggccgcgagcttggggcggcagctgctgaggctcgggggcggaanctcgcggctcacggcgctcctggggcagccccggcccggccctgcccggcggccctatgccgggggtgccgctcagctggctctggacaagtcagattcccacccctctgacgctctgaccaggaaaaaaccggccaaggcggaatctaagtcctttgctgtgggaatgttcaaaggccagctcaccacagatcaggtgttcccatacccgtccgtgctcaacgaagagcagacacagtttcttaaagagctggtggagcctgtgtcccgtttcttcgaggaagtgaacgatcccgccaagaatgacgctctggagatggtggaggagaccacttggcagggcctcaaggagctgggggcctttggtctgcaagtgcccagtgagctgggtggtgtgggcctttgcaacacccagtacgcccgtttggtggagatcgtgggcatgcatgaccttggcgtgggcattaccctgggggcccatcagagcatcggtttcaaaggcatcctgctctttggcacaaaggcccagaaagaaaaatacctccccaagctggcatctggggagactgtggccgctttctgtctaaccgagccctcaagcgggtcagatgcagcctccatccgaacctctgctgtgcccagcccctgtggaaaatactataccctcaatggaagcaagctttggatcagtaatgggggcctagcagacatcttcacggtctttgccaagacaccagttacagatccagccacaggagccgtgaaggagaagatcacagcttttgtggtggagaggggcttcgggggcattacccatgggccccctgagaagaagatgggcatcaaggcttcaaacacagcagaggtgttctttgatggagtacgggtgccatcggagaacgtgctgggtgaggttgggagtggcttcaaggttgccatgcacatcctcaacaatggaaggtttggcatggctgcggccctggcaggtaccatgagaggcatcattgctaaggcggtagatcatgccactaatcgtacccagtttggggagaaaattcacaactttgggctgatccaggagaagctggcacggatggttatgctgcagtatgtaactgagtccatggcttacatggtgagtgctaacatggaccagggagccacggacttccagatagaggccgccatcagcaaaatctttggctcggaggcagcctggaaggtgacagatgaatgcatccaaatcatggggggtatgggcttcatgaaggaacctggagtagagcgtgtgctccgagatcttcgcatcttccggatctttgaggggacaaatgacattcttcggctgtttgtggctctgcagggctgtatggcgggcagggctgggcagcggcctgagtctcagcggacttgtccacccggagttgagtcggagtggcgagctggcagtacgggctctggagcagtttgccactgtggtggaggccaagctgataaaacacaagaaggggattgtcaatgaacagtttctgctgcagcggctggcagacggggccatcgacctctatgccatggtggtggttctctcgagggcctcaagatccctgagtgagggccaccccacggcccagcatgagaaaatgctctgtgacacctggtgtatcgaggctgcagctcggatccgagagggcatggccgccctgcagtctgacccctggcagcaagagctctaccgcaacttcaaaagcatctccaaggccttggtggagcggggtggtgtggtcaccagcaacccacttggcttctgaatactcccggccagggcctgtcccagttatgtgccttccctcaagccaaagccgaagcccctttccttaaggccctggtttgtcccgaaggggcctagtgttcccagcactgtgcctgctctcaagagcacttactgcctcgcaaataataaaaatttctagccagtcaaaaaaaaaaaaaaaaaaaaaaaaaaaaaaaaaaag

SEQ ID NO: 196 - DNA, 1210 bp, Homo sapiens
  misc_feature (1204)..(1205): n equals a,t,g, or c
  misc_feature (1209)..(1209): n equals a,t,g, or c
ggcacgagcgacaaagcctttgaccgcatcaccacgaggagtgagaagccactgcggacatcaagcgcatcttccacactgtcaccaccacagacgaccctgtcatccgcaagctggcaaaaactcaggggaatgtgtttgccactgatgccatcctggccacgctgatgagctgtacccgctcagtgtattcctgggatattgtcgtccagagagttgggtccaaactcttctttgacaagagagacaactctgactttgacctcctgacagtgagtgagactgccaatgagccccctcaagatgaaggtaattccttcaattcaccccgcaacctggccatggaggcaacctacatcaaccacaatttctcccagcagtgcttgagaatggggaaggaaagatacaacttccccaacccaaacccgtttgtggaggacgacatggataagaatgaaatcgcctctgttgcgtaccgttaccgcagtggaagcttggagatgatattgaccttattgtccgttgtgagcacgatggcgtcatgactggagccaacggggaagtgtccttcatcaacatcaagacactcaatgagtgggattccaggcactgtaatggcgttgactggcgtcagaagctggactctcagcgaggggctgtcattgccacggagctgaagaacaacagctacaagttggcccggtggacctgctgtgctttgctggctggatctgagtacctcaagcttggttatgtgtctcggtaccacgtgaaagactcctcacgccacgtcatcctaggcacccagcagttcaagcctaatgagtttgccagccagatcaacctgagcgtggagaatgcctggggcattttacgctgcgtcattgacatctgcatgaagctggaggagggcaaatacctcatcctcaaggaccccaacaagcaggtcatccgtgtctacagcctccctgatggcaccttcagctctgatgaagatgaggaggaagaggaggaggaagaagaggaagaagaagaggaagaaacttaaaccagtgatgtggagctggagtttgtccttccaccgagactacgagggcctttgatgcttagtggaatgtgtgtctaacttgctctctgacatttagcagatgaaataaaatatatatctgtttagtctttcaaaaaaaaaaaaaaaaaaaaaaannaaana

SEQ ID NO: 197 - DNA, 1633 bp, Homo sapiens
  misc_feature (1599)..(1599): n equals a,t,g, or c
aattcggcagagcatagtctttcaaatttggacatttaaaaaagaaacttttactgtagtcatgaagtagtatcaaagtttaccacaagtttgtattgagagaagaacaaacaatatatgctaatatgaaaaacagctctacttagaaagctactgcttgggttttcttattaggcatagttctccagactgagttggttttactcatctacatgatttttccttgccttatggaacagaaattcaggcccactcgaattcagttattttagggctctttaaaatccagtatttgtgatttaaatgatgcggagggactttcattacctgtgtctttgcttatttctctctggccctcagaacaccccaccctgacctttaggggaaattgacagaggcagagggtttcacctgcctcaattgtcaccagccctgttacattcttccttccaagccttagcctcacagggaccttctcattattgaacaawtgccttcaaagcagtagaatagcccaattgttatggagattaaagataccgattgcaaaactcctgtaaataaaatcttcactgacaaacccagtttcttttcataggcttttcttctgtaatctctttctggcagaacatctcatgttttgatgttagagattcagttaccaaccacagtaaataaagcaaaataataatagaaaaatagtatagaactcaccctaaaaacaaacattggccaaccatgtttattttttgtctctctttgcactcctgagaattgataggggaagaatgtaccacctctaattcaggtgatttctgattagcaagctatggaaagtcttcaggttgagttttagccagttcacgctcccctaaatggcatggaatagactattttctgttttaagaaaaaatagaacaatggcactaaatgcttgactgaatgtttgactaaatgttgactgaatcatggataggaaagattgggcagaaaagacagccactgcctccagacacaggatgccacaatcctgggcaccatcattattccatacaaccttagggtcatttttagggtttagaactttctcaatagggtttcaagattttgaaaagtgtcttccaattctgatctccgtagatcctgttatgggaattaacctttttggaaggggattcttgttcttaaagatgaaattccctactttctttcctggagggaatcagtatgggcagagggaagaggagatggcgattctgacctgtgtgtctcatgtcacctaacacctatggggtggcatgaaacttgagctttaaaacacaccaggggccaggcacagtggctcatgctggtaatcccagcactttgggagaccgaggtgggtggatcacctgaggtcaggagttcgagaccagcctgccaacatggcaaaaccccgtctctactaaaaatacaaaaatcagctgggtgtggtggcgggcacctgtaatcccagctacttgggaggctgaggcaggagaatcgcttgaacctgggaggcagaggttgcagtgagccgagatcaggccattgtactctagcctgggtgacaagagtganactccatctgaaaaaaaaaaaaaaaaaactcgag

SEQ ID NO: 198 - DNA, 1406 bp, Homo sapiens
  misc_feature (294)..(294): n equals a,t,g, or c
  misc_feature (1336)..(1336): n equals a,t,g, or c
gaagaaatgtagattgaaagtagaggttgactccagccaggaccaaaataatatagttattttttaggggaactataaaaagaacaacagtttttcctagcatttggcataagacctaggattttaatgaaagttgaaattcaaatgcctgagactgccccatactgtgagggtcttattagccttgtytttggaaggagacttactgtctctcttcctaaatttaaatggcttgttttccctacctatattatggcaggcagagtgggatatttaaggtattgtctattccanatctctgcccttctcattttctagggrttgccctgcattccatttacactgttacacttagacgtgtgaatttgacctgtctcccgggcatttggaaacggggtatgattctactcctagtctgtctctgaagcaggggaggtgtaaatcctggtgacgtatgaactagaggggttggcctgcagtgagggaagcatgatggagttgggtgcgtggagaagggaaaaaaatcaagagatatgctcaagttcctctgtgtagccctccagttcccagagaccccggtgtacttacaacaaatgaaaagggggtgtgttcatattttccttaaattttctcaaggggttttgggaacgttcaaccaaaggtaccctaatatagtggtaaaaaagaagcctgagatttctagagctgctgtgaagamctattagaaggsggartataagattctaagtacgggactaagttactgaaaatgtggccccatagagaaagctgctctacccttcccttagtgcagacattgaggttggggttcattctgtgacgtcatagccttgctttgaactagaaggagaagcatttgttagataccaggttgggttgggataaaacaaacagaatgttgcttctcagtacagctgcctgtttgcagggctaattctctaagggtctcaggatactcagaggcatagcagacttgggcccagagcacagggataggcaaaacttttctgttaagggctacttagtaaatattttaagctttgcaggtcctatggtctctgacattactactcaactgtcccatggtaagataaaagtcacagacaatatgtaaacaaaatggacatagctgtgttccagtgcaacttttttttttgagacagtcttgctctgcctccaggctagagagcagtggcgtgatcttggctcactgcaacttccgcctcccaagttaagcgattctcctgtagtcccagctactcaggaggctgaggcaggaaaacagcttgaaccagggggtcagaggttgcagtgnactacggtgcactccagcctggcaacagagtgagactccatctcaagaaaaaaaaaaaaaaaaactcgta

SEQ ID NO: 199 - DNA, 1282 bp, Homo sapiens
ggcacgagatttttaatttttgttaatatcaacagcaaaagcctagtgcattgggagatgtgcaacctccctgaaaatcttttctgtttctggagtacttcaggggtggcctctggccccagagcctttgccacagtgctcccaccagcccccacctcatccgtctgtttgcagagcctcatctacaggtccccacgctgccttctttactcactctgcgcttggccgttttgttatttggcttagtctacattgggcggaagtctgtgtgcacagagtgggtgttccttcgagccccttccactcagagggccacacccagcgatgccagtgaaggtggcacagcctctcttcagtttctcctgactgtgatctcactggggtagaattcccctgagagaattccctcactcacggctccctttgccagagtcagttcaatcaggtctgatgtgagcaatttacacacttgtctcagaaagtccctcagggtttgtagaggactgcaggggggcatccgctgcagactcagcctttctctgcagccatcctgcagtgggggtgagcgggcacaggctgagaactgctcttgggtggtggaagcaggtgtcacggtgcaagtctccccctgcacccctcccccagcttgagccgtgtcacccccctctccctccagcatgggcctgtgtctcaggctctctggaaggtggccctgccccggaccctcttgcaggtgtcctggtttgacttggaactagatggccatctttccaggctttggtggcccaagagcagtctgggtggatggaagtggctgtcccctcctctccagcccctgcccacccactggtggaggtgctaactagcagggacgtggcataggatgggagctgggcgtgaggtgcttggggtccattctttgtccctcagcttctcagagtccggccagcccttgtgttcccgtgccccacactttcctcctccccactgcagtgagtcaatagtccagggtggggcctggcctccctgccctgattggggactcaggaggtgaggcctggggggcttcctgccccctccttgcccacctgcctgcccccgggcagcacgggagggagagcagggtgagcacgcttgttggtttcagatgcactttctgcttgcattgccgtatctgtgcgttccttcatcctggtcctggctttatggaacaccatgtttttagcatgtttttaaataaaaacggataaagtgtcaaaagcaaaaaaaaaaaaaaaaaaaa

SEQ ID NO: 200 - DNA, 1053 bp, Homo sapiens
ggcacgagcccggatggaagctccggccgcggagtgatggtggcctcagcgaagatgggccgggcagggaccatggcggtggcagcagagcttcgagagctgtgcccaggagtgaacaaccagccctacctctgtgagagtggtcactgctgcggggagactggctgctgcacctactactatgagctctggtggttctggctgctctggactgtcctcatcctctttagctgctgttgcgccttccgccaccgacgagctaaactcaggctgcaacaacagcagcggcagcgtcgaaatcaacttgttggcctatcatggggcatgccatggggctggtcctttccctaccggttcactgcttgaccttcgcttcctcagcaccttcaagcccccagcctacgaggatgtggttcaccgcccaggcacaccaccccccccttatactgtggccccaggccgccccttgactgcttccagtgaacaaacctgctgttcctcctcatccagctgccctgcccactttgaaggaacaaatgtggaaggtgtttcctcccaccagagtgcccccccccatcaggagggtgagcccggggcaggggtgacccctgcctccacacccccctcctgccgctatcgccgtttaactggcgactccggtattgagctctgcccttgtcctgcctccggtgagggtgagccagtcaaggaggtgagggttagtgccaccctgccagatctggaggactactccccgtgtgcactacccccagagtctgtaccgcagatctttcccatggggctgtcttccagtgaaggggacatcccataagtagttttgagagggtggatgggttacttgcccaccagaaacagccctagtcccaactccttgcgttcctttggcccctccctgcctacctagaatctgcctgaaagggctggagaggggcagtattgggggactgtgctagctttacccccgcaggacatacacaggagcctttgatctcattaaagagatgtgaaccagctaaaaaaaaaaaaaaaaaa

SEQ ID NO: 201 - DNA, 1238 bp, Homo sapiens
  misc_feature (19)..(19): n equals a,t,g, or c
gctgcagaagacgacagangggtacggctgcgagaagacgacagaaggggggattggccggaagcaggcgccgcttcgaggcccgcggaaaacgcgcgccgagacccgctcctgcagtattagttcttgcagctggtggtggcggctgaggcggcatggatctcagcgagctggagagagacaatacaggccgctgtcgcctgagttcgcctgtgcccgcggtgtgccgcaaggagccttgcgtcctgggcgtcgatgaggcgggcaggggccccgtgctgggccccatggtctacgccatctgttattgtcccctgcctcgcctggcagatctggaggcgctgaaagtggcagactcaaagaccctattggagagcgagcgggaaaggctgtttgcgaaaatggaggacacggactttgtcggctgggcgctggatgtgctgtctccaaacctcatctctaccagcatgcttgggcgggtcaaatacaacctgaactccctgtcacatgatacagccactgggcttatacagtatgcattggaccagggcgtgaacgtcacccaggtattcgtggacaccgtaggatgccagagacataccaggcgcggctgcagcaaagttttcccgggattgaggtgacggtcaaggccaaagcagatgccctctacccggtggttagtgctgccagcatctgtgccaaggtggcccgggaccaggccgtgaagaaatggcagttcgtggagaaactgcaggacttggatactgattatggctcaggctaccccaatgatcccaagacaaaagcgtggttgaaggagcacgtggagcctgtgttcggcttcccccagtttgtccggttcagctggcgcacggcccagaccatcctggagaaagaggcggaagatgttatatgggaggactcagcatccgagaatcaggagggactcaggaagatcacatcctacttcctcaatgaagggtcccaagcccgtccccgttcttcccaccgatatttcctggaacgcggcctggagtcagcaaccagcctctagcagctgcctctacgcgctctacctgcttccccaacccagacattaaaattgtttaaggagaaccacacgtaggggatgtacttttgggacagaagcaaggtgggagtgtstctgcagccgggtccagctacttccttttggaaccttaaatagaatgggtgttggttgattaattttaaaaaaa

SEQ ID NO: 202 - DNA, 2206 bp, Homo sapiens
ggcacgagctggactccctgagtttgttaaaatagtagaagttgggcctagggatggattgcagaatgaaaaggttatagttcctacagatataaaaattgaatttatcaatcgactttcccaaactggcttgtctgtaatagaagtgactagctttgtgtcttccagatgggtaccacagatggctgatcacactgaagtaatgaaaggcattcatcaatatccaggagttcgctatcctgtccttactcctaatcttcagggttttcaccatgctgttgctgctggagctactgagatatcagtttttggagctgcatctgaatcctttagcaagaagaatattaactgttccattgaagaaagtatgggaaaatttgaggaggttgttaagtctgcaagacacatgaatattccagcacgagggtatgtgtcttgtgctctgggctgtccatatgaaggaagtattacaccgcaaaaagtgacagaagtgtctaagaaattgtacggcatgggttgttatgagatctctctaggagacacaattggagtgggaactccaggaagtatgaaaagaatgttggaaagtgtgatgaaagaaatcccaccaggtgctcttgctgttcactgtcatgacacatacggacaagccttagcaaatatccttacggcccttcagatgggaattaatgtggtggactccgcagtatccggattaggtggctgcccttatgcaaaaggtgcttctgggaatgtagccactgaggatttgatatatatgcttaatggcctggggctcaatacaggtgtgaatctatacaaagtgatggaagctggtgactttatttgcaaagctgtgaataaaaccacaaactctaaagtagcacaagcctccttcaatgcttgacttgaatggatttatgacgtaccgttgagaagatcaatttcagctacaatactcatctgaaaatcattaatgccaacttgctctgatatgtgaagtaatggacaagaatgggaaaaaagagatccttttcaaaaagattataactggatagattaagtcaacaaaatgcaatatcagtcatcaggtaaattgcaagctgaggataaataataaaacttgtcataattttgaacttggaaaaaagtttcttttgctctcatagaaataactttttaatttagtagatgggaaaattgacttcgtatttccccaagtatcaaatactgtgttaatacttaatcaagcaggcttaacactgtgtacatattgtcagtagtttatgagctcctgcatagtatgcagagtgtgtggcctcaatattatacattatgcctctggatctcaactactcatttgccaagtcagttatgttatggaccaaaagccaaatctccatctgaccctacataattttagcaatagaacttttatatttcaagtatggctaacatctgttaactatttcagtgactttatctggttccaagaggctgtggccaatggcaagatgccatatcctggaaacatattacgacctcccatgtttgttacatgcatccagtttaccacactttacctgtcatcagttatagtaaaaaccagcatggtgttactcaactattgagaaattgtaagctattttttttgtcctgatgtctaaattgcagtgataagaataggttgatacatgtatcataatctacctttataattttcagatcactttcaaattgcccaaggaaatattgtgatcctaagaatattaagataattttaggttaatgaaatacccattttccttttattcatggtgctttgcttacccacattattttttggtgtattttttagtggttattttagaagttgaagtggctgaaattttgtctattgtcttagaattgattgccagaaattgcaagatgtaatatatcaaagtcagggatgaggagcaggaggactattcaagataaacttctgtaacctatgcatattttatgggggcagtattattacaaatggatctgaaatgtcagttctagtatttagagagacttctctaataataccgggtgatattatctttgagtaaatttgaatataaattgaaacataaaaatgagtattgtgaactttctcggaaatattcattaaaaccattgaaataaaaataaattcaagaaaaaaaaaaaaaaaaaa

SEQ ID NO: 203 - DNA, 1198 bp, Homo sapiens
  misc_feature (362)..(362): n equals a,t,g, or c
  misc_feature (1081)..(1081): n equals a,t,g, or c
aattccccgggtctagttcatttccactcatatctatttctgctaatagattgacagcaacctttggtttaatgctgtgttctctagctacaccaacaagttatatattcctttccaatattaaccaagtatttattttatgttagcctatgactgagttttatctatgcttgcacatatatagaatgtaaaaatataattctccatgtttaatgtatccatataaaaatgaaaatacccattttctgcattcttaaagggttaagaaaagtaacatgtaataagcacatggaggactttagaccatttcttgtgttagaggagactttatacatttgtgaggttttctgtcttttggtccntttatgktcttagtccattycattattgttttaatatttctaccaggratgaccargaaargrgaaaggaggaaaaaaatgtgttaatcattttcttttaatggtatgtcagcagaaggggttctgactgtaagctaatgtgcacttgtgcctgtcccctttgtcttaaactaaagttggtggtatgaatcgaaaaatgtgtattggkttaaaaagcmgtttatgatwtgaaacagtcttccagtttttatatcaactcctttgctttcaacagtcagttcaaagcaccatttattgatggtttactgtatgccagacactgtatttttyctttasgtattaccctacttaatcctcaacacaatttwatgaagtagtwattgttagcctgaaactggcatttctccayccttttatggtgctgtctttgaaaagtctcagatgtgtaacatgtcctagaagtagataattatcaaaggaagactgcaactgcaactcacttccctctgagaaaaaatatccctgactagattacatatctagttccagaccagaacctggtggtattaaaagtgttttggttgactattgtataccataatgagtacctacattcccaaattgcctgcctggttgttgtacagacttaaaaatctagcctgccttgatttttacttttcagatacacatgtttaaagagatctttgctggtcacagtngctcacacctgtattcccagaactttgggaggccaaggtgggaggattgcttgagcccaggagtttgttcaagatcagcctgggtctctacttaaaaaaaaaaaaaaaaaactcgag

SEQ ID NO: 204 - DNA, 1764 bp, Homo sapiens
cccgggtttttctgttgctctccgagactggggggggattgtttcttcttttccttgtctttgaacttccttggaggagagcttgggagacgtcccggggccaggctacggacttgcggacgagccccccagtcctgggagccggccgccctcggtctggtgtaagcacacatgcacgattaaagaggagacgccgggaccccctgcccgatcgcgcgcggcctccgccaccgctcctgccgcaaggggcctggactgcaggcctgacctgctccctgctccgtgtctgtcctaggacgtcccctcccgctccccgatggtggcgtggacatggttatttatctctgctccttcttgcctggaggagggcagtgccagccctggggttctgggattccagccctcctggagccttttgttccccatgtggtctcagtgacccgtccccctgacagtgggctcggggagctgcatcacccagccttccccttctccgactgcagggtctgatgtcatcattgacagcctttgcttcgtgggggcctggcagggcccctgcctccccgacccccgacccactgcaaatccccgttcccctgcactcctcttctcccagcccatccctccggcccctgtgcctctgcggccccagcccagctcccagggccgtcacctgcttggccctggcccagctccctgccctgagtcctgagccagtgcctggtgtttcctgggctcggtactgggcccccaggccatccaggctttgccacggccagttggtcctccctggggaactgggtgcgggtggagtactgggaggcaggaggtggcccggggaggccttgtggctcctcccctcgctcctcgccctgggcctcagcttcctcatcaatagaaaggatgtgttcggggtgggggcgtcaggtgagaacgtttgctgggaaggagaggacttggggcatggcctctggggccacccttcctggaactcagagaggaaggtccgggccctcgggaagccttggacagaaccctccaccccgcagaccaggcgtcgtgtgtgtgtgggagagaaggaggcccgtgttgagctcagggagaccccggtgtgtccgttctttagcaatataacctacccagtgcgtgccgagcaggcttggtggggaagggacttgagctgggcaagtcctggcctggcacccgcagccgtctcccttccgtggcccagggaggtgtttgctgtccgaaggacctgggccggcccatgggagcctggggttctgtccagataggaccagggggtctcactttggccaccagttcttcggccagcacctctgccctccagaacctgcagcctggaggggtgaggggacaaccacccctctttcctccaggttggcaggggaccctcttctcccgtctgcctgcgggttgcccgcctcctccagagacttgcccaagggcccatcaccactggcctctgggcacttgtgctgagactctgggacccaggcagctgccaccttgtcaccatgagagaatttggggagtgcttgcatgctagccagcaggctcctgtctgggtgccacggggccagcattttggagggagcttccttccttccttcctggacaggtcgtcatgatggatgcactgactgaccgtctggggctcaggctggtgtgggatgcagccggccgatgagaaaataaagccatattgaatgatcaaaaaaaaaaaaaaaaaaaaaaaaaaaa

SEQ ID NO: 205 - DNA, 1743 bp, Homo sapiens
ggagaagagagaggcaagggcaggagtgaaggagagagctgaagcctggggctccgagatggtcagaggatgggagacggggcagtgaaacaaggcttcttgtatcttcagcagcagcagacgtttggaaagaaatggcgccgcttcggcgcctcactgtatggagggtcggactgcgccttggcccggctggagctgcaggagggcccggagaagcctcgtcggtgtgaggctgcccggaaggtcatccgcctcagtgactgcctgcgggtggccgaggccggcggagaggccagcagcccccgggacaccagtgccttcttcctggagaccaaggagcgcctgtacctcctggcggcccctgcagcggagcgcggcgactgggtgcaggccatctgcctcctggccttccccgggcagaggaaggagctctcggggccagagggaaagcagagccggcccttcatggggaaatctaattgtacagcttgcgcagtcacagtcggcccccacaaggaatttgctgtgaccatgagacctacagaagccagtgaaaggtgccacctgcgggggtcctataccctccgggctggggaaagtgccctggagctgtggggtgggcccaagccagggacccagctgtacgactggccctacaggtttctgcggcgctttgggcgggacaaggccgtcgctgcgtctctggagagggcaactttgagttcgaaacccggcaaggcaatgagatcttcttggccctggaagaggccatctctgcccagaagaatgctgcacccgctacaccccaaccgcagccagccacaatccccgcctcgctgccccggcctgatagcccctactctcggccgcatgactcactgccgccgccttcacccaccacaccggtgcctgctccacggcctcggggccaggagggggagtatgccgtgcccttcgatgcggtggcccgttccttggggaagaacttcaggggcatcttggcagtccctcctcagctcctggccgacccttctgtacgacagcattgaggagaccctgccccctcgacctgaccacatatacgatgagcccgagggagtggctgccctgtccctctatgacagcccgcaggagccccggggtgaggcatggaggaggcaggcgacagctgacagggaccctgctggcctccagcatgtccagccagctgggcaggatttctctgcttctggctggcagccaggaactgagtatgacaatgttgtactaaagaaaggcccaaagtgacagaggcagcagagggatggtccaccgccccttggcttctgctggtgactcctcctggccactgcatcagaagaacctcctctgccccttctggagcccgaggcctggcctgtcttcgttggggctgataaattgcctctcccagggcctgctgggtgagtcaccatcccaaagcaggaagggtgccctggagagaaccaccctcctcctactctttttccacttcctcctctttctttccccagctgaggaggaacctggggcatttagggcagaggacaaaaggatgtcagcaattgcttgggctgcttggctatgcaagcctcctgcctgctgatggccacttcagggacagcctgggcccaggcacccagggggatggcggcagcttcctgcacctttcagatttcttggtggcaattaaagcattttcagaacaaaaaaaaaaaaaaaaaa

SEQ ID NO: 206 - DNA, 2221 bp, Homo sapiens
ccttgtcctcggcttggaacatagcttctcttttatatggttaacaaatgcctatttgtttggtggcctggcaaacgaaagcgaagattcaaacaataatgttcccagatatttaaatgatttttatgagttggagctacagcatggctctggtgttgtgggttggagcattccagtgactaaaggggttgtgccttctccaagagaatcccacacagctgttatatattgcaaaaaagattctggaagtcctaaaatgtatgtttttggtggaatgtgtggtgctcgcctggatgacctatggcagcttgacttagaaactatgtcatggtcaaaaccagaaactaaagggacagtgccacttccacgaagccttcatacagmcagtgttataggaaacaagatgtacatttttggtggatgggtcccacataagggggaaaatactgagacttcacctcatgattgtgaatggagatgtaccagttcattttcttacctaaatctggatacaacagagtggaccaccctagtatcagattctcaggaagataaaaaaaattcaagaccaagaccaagagctggccactgtgctgttgcaatcggcactcgattgtatttttggagtggaagagatggctacaaaaaagcactgaatagtcaagtttgctgcaaggatctttggtatcttgatactgagaaaccaccggcaccatctcaagtacagctgatcaaagccactaccaactcctttcatgtcaagtgggatgaagtgtctacagttgagggctatcttttgcagttgagtacagacttgccataccaagctgcatcatcagattcttcagcagcaccaaatatgcaaggagtcaggatggaccctcacagacaaggcagtaataacatcgttcctaacagtatcaatgatacaataaacagcacaaaaactgaacagccagccacaaaagaaacttcaatgaaaaacaaaccagactttaaagcactgacggattctaatgccattttatatccatctttggcatcaaatgcttctaatcataatagtcatgtggtggatatgctaaggaaaaatgaaggtcctcacacttcagcaaatgtaggtgttctaagtagttgcctggatgtaagaacagtaattcctgaaacatctgtatccagtactgtttccagcacacaaactatggtaacccagcagaccattaaaactgaatcatccagtacaaatggggcagttgttaaagatgaaacttcactaacaacattcagtaccaaatctgaagttgatgaaacatatgcactgcctgcaacgaagatcagccgtgtagagacacatgctacagcaacgccgttttctaaagagactccttcaaatccagtggccacagtgaaagcgggagaacgacaatggtgtgatgtgggaatttttaaaaataatacagctttggtgagccagttttatttgctgccaaaagggaagcaaagcatctcaaaggtaggaaatgcagatgtacctgactacagcttgcttaagaaacaagatcttgktccaggcacaggatacagattcagggttgctgcaatcaatggttgtgggataggtcctttcagcaaaatcagtgaatttaaaacttgtattcctggttttcctggagctccttctgcagtcagaatttcaaagaatgttgaaggtatccacctttcctgggaacctccaacctcaccttctggaaatattttggaatattcagcctacttggctatccgcacagcacagatacaagataatccaagtcaacttgtgttcatgaggatttattgtggtcttaagacatcatgtatagtaactgctgggcaacttgcaaatgcacatattgattatacatccaggcctgccattgtgttcaggatatcagcaaagaatgaaaagggatatggaccagctacacaagttcggtggcttcaaggtaacaataagaaagcacctttaaattgaattggtttttttactgaagctattgtgatgatgattatttattagtaactggttatgaagatttgtcatttaaaagagtattctctggctgtatttccagcagttatgaacttgagtttgtaaattgttcttaaaatgtatttgctgaattatagatccaaataaaagaaaagaagcaaagacaaaaaaaaaaaaaaaaaactcgag

SEQ ID NO: 207 - DNA, 1282 bp, Homo sapiens
  misc_feature (907)..(907): n equals a,t,g, or c
ggcacgagccttacccctctgctggcaagaggggacctgattcatcctcacgctaaacactcattctacccaactgattgagacagaacagaagataaactgaaacttctctgccttcccgctgcaagagtgaatgagcgatccctctcaactgactcaaaatgtttgcctcacccaggagatggagctctcgaaggccttctctggccagcggacactcctatctgccatcctcagcatgctatcactcagcttctccacaacatccctgctcagcaactactggtttgtgggcacacagaaggtgcccaagcccctgtgcgagaaaggtctggcagccaagtgctttgacatgccagtgtccctggatggagataccaacacatccacccaggaggtggtacaatacaactgggagactggggatgaccggttctccttccggagcttccggagtggcatgtggctatcctgtgaggaaactgtggaagaaccaggggagaggtgccgaagtttcattgaacttacaccaccagccaagagagaaaatcctatggttatccctgggaacgcagatcacctacatcggacttcaattcatcagcttcctcctgctactaacagacttgctactcactgggaaccctgcctgtgggctcaaactgagcgcctttgctgctgtttcctctgtcctgtcaggtctcctggggatgtggcccacatgatgtattcacaagtcttccaagcgactgtcaayttgggtccagaagactggagaccacatgtttggaattatggctgggccttctacatggcytgctctccttcamctgctgcatggcgtcggctgtcaccamcttcaacamgtacaccaggatggtgctggagttcaagtgcaagcatagtnaagagcttcaaggaaaacccgaactgcctaccacatcaccatcagtgtttccctcggcggctgtcaagtgcagcccccaccgtgggtcctttgaccagctaccaccagtatcataatcagcccatccactctgtctctgagggagtcgacttctactccgagctgcggaacaagggatttcaaagaggggccagccaggagctgaaagaagcagttaggtcatctgtagaggaagagcagtgttaggagttaagcgggtttggggagtaggcttgagccctaccttacacgtctgctgattatcaacatgtgcttaagccaaaaaaaaaaaaaaaaaaaaaaaaaaaaaactcgagggggggcccggtacccaat

SEQ ID NO: 208 - DNA, 806 bp, Homo sapiens
  misc_feature (25)..(25): n equals a,t,g, or c
  misc_feature (29)..(29): n equals a,t,g, or c
  misc_feature (37)..(37): n equals a,t,g, or c
  misc_feature (44)..(44): n equals a,t,g, or c
  misc_feature (143)..(143): n equals a,t,g, or c
ttttgacccggattaacaaattttnaccnccaggaancaggctnttgaccaatgatttaccgccaagctcgaaatttaccccttcactaaggggaacaaaagctggagttccaccgcgttggcggccgctctagaactagtgnatcccccgggctgcaggaattcggcacgagcggcacgagcgcaaagccatcgtggacaagtttggcggggcagcttccggccccacggccttgttccgcaacactaaggcagccggggcagccattggtggtgtcaagaacatgctcttggagtggtgccgagccatgacaaaaaaatacgagcatgtggacatccagaacttctcctccagctggagcagtggtatggccttctgtgccctcatccacaagttcttccctgacgcctttgactacgcagagctggatcccgcaaagcgccggcacaacttcaccctggccttctccacagcagagaaactggctgactgtgctcagctgctggacgtggatgacatggtgcggttggctgtgcccgactccaagtgcgtctacacatacatccaggaactgtaccgcagccttgtgcagaaaggactggtgaagaccaagaagaagtgaggaggtgactggctctgtgggcagagatgggcagggtgcccagctcagcagccacggcccgggggttcccttctgctccatggaggcaccagagccaggggcttaggcaagggtgtgtggcgttggttttaactgcattaaaagtacttttgtaaaaaaaaaaaaaaaaaaaaaaaactcgag

SEQ ID NO: 209 - DNA, 981 bp, Homo sapiens
ggcacgagctcgtgccggtgctctccagacctcctctctaaactgcttcattgacctaagtcactctcttcaatcccacctttgttacgttgaaatccctcatttattttcttctcaaaatgcccattatccaaatgcagaacctctgcatctccaagccagttatgctgaatttgtcaaacttagacacccttgacaactgcactcctactgtaggctcctgtgcatactgtcgtcttctgtgggggatggagaggttagtgtgatgaggtggtgtctgcccaggaggtttctttcaaacatcatggcctcccatccaatcaacatcatcaaattacatgtgtaatcaaggctctgtgccatgggggaaatgaatcatttagctaggccaggatctagtgaaagccacagagtttaaaaccatgaaagaagttgaaggcagcattcctcagctctgtgacttgtgaccctatttgaagtttcaggatttgggtgtcacaaaggattgtccctaatccttggccctggggtcttccgagtgagctggtttaatactctgagaatgagcagggagatccagagaatgaatccctgaccgcatcacctaaactgtcttccaaacatgagacaaagctgactgttcacactgattgcccagcacataccgtcttgccagtttcttcttttctcccagtctcctgttcatccattctgttctcccttggggtgggaatctatgatggaggttactggggaaacagctcagcagatttttggagaccaaaccaaaggtctcactaggaaatttatctgttttaaaacattgcttccttcctggctctgctaaattgaatgctcattgtttgttgttgttgttttttaattctaatgttcaaaatcctgcgtgctgtatgaatctagaaagccttaatttactaccaagaaataaagcaatatgttcgtaaaaaaaaaaaaaaaaaa

SEQ ID NO: 210 - DNA, 1523 bp, Homo sapiens
ggcacgaggttgtcttccatggcctgtttctcctgctgtctgggtgagtgagcctgcaacgcaatgcccatgagagtaaatgcctcctgacctaccctgctcagcactgttctagtgtcttggccttgaaagaaaagcctgacttcctgctgacacatgtggtaggggcatggcagctatgaggcacctcctacgtctgttttctggctgtggtgacttgggatttttaaccttatatatctttttcctttactcaaaacaaaacaatttttagcacactgaaaaaaaaaaaaagccaaatgttttgtgcctttctaaggcagcactgtatcccaggctgcattttaggacttaatatggaaataccagagtctgagctcctctaccttgagtttcattagtccttagtgtctaggagacaggaaagaatgctctctgtgactggagaggtgacatgcaggtgcagtgtgtctggagtccctttcccctgctgtgagacttcagtggaggagagaagcattgtaccctgggatcatttggttggttccaatcacaagcttagttatcaggttgcatgccttgtctcctgcaaaagacagaatgtttcacaattcccaggtaaactctggaccattccaagtgtcctagccttctgatgacattaattacctagttgtgtcgaggagtataggatggactctcctgagaaggggaggttggtggctttgtcttttctttttgctggatcctgaactggtctagacctcctgcccccaccccccagcccccatcagatgtggctggcctttcatttgaaggcttcagacttaaagcattaagcagctagtgccctctgcagggcctggtttccccagggaagggcagcaaggaacatgggaccagaagcctgtcctcagtaatgtgactatagtgagctttagcaaaagtttttctatataatgacatcttacttatcttttaccctttcctcagttttcccctgcctttaactaataaagaattgggagacagaaattttaaagtcctccttattcaagattttgaaattcttagcctgggagtgctggagagaacctgatgctttctccagaatgaagagtcccaatttgtatatcagtgttaagaagaaaacaaaacaaacacataggtgagattttcgtggactattttaaaaatgtgtcattaatataaaaaatttatattagcagtatttaatcattctcacctgtaaagaataagaaaaacagaaggtaaatattcttacagagaatagcagagctttaagattcattttcattttaagtccattttattttgccagtgtattaatgtttagaagtctgttttactaatgttatttattaattttttttcatttccatacacagttagttaactaaagagctttttcaagcacccatgtctgtaaaaaaatatttttaaataaagtttcttttgttgtagcagaaaaaaaaaaaaaaaaaaaaaaaaaaaaaaaaaaa

SEQ ID NO: 211 - DNA, 1324 bp, Homo sapiens
ggcagagtgcagctggaggccaattatcgtaaacgaattagtgcaggaaccagaataccaaataccatgtgttctcacttaccttacccctaaaagttagatgcccttcctccatactcccacagtaccctctatatttttacgagtcattatattcctctttactttgtgagccccttaaaagcagagaccgggtctgttttactcactggtatgtcactacagtgccaggctcattgtttgcattcaggtggttgttgaatgaacaaactcaaatgtaactgcctatttacttgtctgtctttcctcaacaggctgtatgttccttggtggatggatctgtggtttattaagctttgtttcttttagcatttagcactcagcatgaagacctagcacacagaagtttattgaataaataaatttgtcaggattaataattaatctttaaaatacagtatatagcattgaagaatatatagaaagtattctcaagatacagagagacatgggttgytcaggwttattcctykgygkttcacttataggaaagatctcatactacagactacaaatgccaaatgacctactgtgctcataccacccttaacctagaaataaaatagaaacaattcctaaagaaacagtcttaaaaataaccagctaaaattttatcaacaacaacaaaaaagtagttggggtttctgctcattaaattagtttgtatrggtaagcaccacctaagtttcttgattcatggcatgtgttcttaaaccaatttactatccactaaaaataaatggtgatcattatataaaaagcagttgtatttsttgacactagcaatgaaccatctgaaaatgaaattaagaacacaattscacttacagtagcatcaaaaagaataaaatatttagaaataaattaaaccaaagaagtgtaagacatgtcactgaaaactaaaaaacacagttaaaagaatggaaagatagcctatgttcatggattggaagactgaatattgctcagatggcagtactccccaaattgatctacagattcaatgcaattcctatcaaaattccatcttcctctttgkagaaatggacaactggtcctaaaattcatatggaaacttaagggaccccaaataatgaacaaatgttggaaaagaagaacaaagttcatgggttcacactttgacttcaaaatttactacataatcaagacagtgtggtatggtctgtcataggacagacatatagaccagtggaataaaattgagtccagaaataaaaaaaaaaaaaaaaaaactcgagggggg

SEQ ID NO: 212 - DNA, 2116 bp, Homo sapiens
ggcacgagcctgattctacactgggaagttaggggtagaagcacacaggagcccagcacttacagccagtggccctgggggtctcctccagctccacctcatgacaccccgtgctgctgcgtgactgctcctggtgccaaggccaccgctgccatgagtctgaatggctaatgctgagattagcagggcctcccttctactggcctgtcctcctggctctcctcccttttgcctcttctggatttcaggtcagtttgaaagtgggtggctgtctcagctccctgtgagcttccatttccagtctacgctacggaagtcagagagctcagacacaaatccctcccaatggcaaaggtgctatagctgcaacttcctctgcagtgacccggtgggcagtaatctgtattagcagaattcctctcatgccagcaccagctgggggaggagagggtagtgcctgggcattctgctttgggaagaaaaaggacaatcaaaaccaagtgaaatccaaccaccatggtgtacccaacaggtggagtgggctgcaaagtccttaaacatctcaacaggagaagtagctccattttgcgggcaattattttctgcttgaaattagctgttctcaccaagaatggactgcatactaaatcaattgctccactgaggctgccataagcttcatgaagcaaagaatgattcattcttctaaagctgtgatttcctatttgctcacaagccattgcaggggaaatcctcatctttcccactcactgctacactcactgtgatgtgtttatagaccttcggggaccacacctcctccagctgtctgccttactcgaaaattagacccagcttgtccctgacttctagtagccagaaagtcttccacaagatccagccgcatgatacggagtacacacataaatgtgaaaacaaacccctccatcctttcccactgtaaatcaacagcacatgccctctgtgtctgacaattcctctcaaagacagtggctccagcagaggaaattaaggctggtgcaggtgccccagaagctgagtcatccgggatgactggtggccctgaagtcccgcccacagaaggacggccatgggagcctggcacactgccccttggtggcacaaatcctgagcaagccatgccctaaccttaaacaaggacctaggactgttttctctcccacagcctctgagaacttgccctttctctcccaatgtgatttgtaaacaattctcctacccagcctcaagtaaatatcagagttaagctggtttcatacaccatgttgacagtaaacatcttagaggacactttcaatccacccacactgcagctcagtccatctgcacaaagagaagaccccccccccacccccatcgcggtccaacttgggggtacatagatggaaaggcagcagtagtcagcaggtcaactctgtctgaaagaggtccatggcaatgtaaataccaatctactggcaaccacaaagcacccacatagacaggcactgcaaggaatggagggtttgaagaagcaggtcttgatggagttttaaagacacaaaacctccttcctttcagggtcaagggtttgttgattccgctactctgatgtggaattcaaagagatggataattatcatcctttctaagtgctgttttccataatcaggtccccgtgcttatccacatccacactccccttctctcacaaagtcctacttgtctcctgggagcccctgcacgcctcccctctctgaatctctgcgaattttcacttataaaacagtaacaactctctcaaggtcatcaaaaatggcagaacagtgttcccccatctctgaaaaatatgaatgtgagaaacggtttcatactgctgagagaatttataagacttaagcagaagaatcttcagatcccccatcccccagagatttttgcaaatgagccagcccagccacaaaaatgtatgcaaacttgaagataaaatggaattaaaatatgttttaaagagaagcaggctttggaaaaatgaggattttaataaaaacagaaattacgacaatatttctaccacaaaaaaaaaaaaaaaaaa

SEQ ID NO: 213 - DNA, 1591 bp, Homo sapiens
ggcacgaggcggaacggcgtttgcaatggctgctactgtgaacttggaacttgatcccatttttttgaaagcactaggtttcttgcattcaaagagtaaagattctgctgaaaagctaaaagcactgcttgatgaatctttggctcggggcattgattccagttaccgtccatctcaaaaggatgtggagccacccaaaatttcaagcacaaaaaacatttccattaagcaagagcccaaaatatcatccagtcttccttctggtaataataatggcaaggtcctcacaactgaaaaggtaaagaaggaagctgaaaagagacctgctgataaaatgaaatcagacatcactgaaggagttgatattccaaagaaacctagattggagaaaccagaaacacagtcatctcccattactgtccaaagtagcaaggatttacctatggctgacctttccagttttgaggagaccagtgctgatgattttgccatggagatgggattggcctgcgttgtttgtaggcaaatgatggtggcatctggcaatcaattagtagaatgtcaggagtgccataatctctaccaccgagattgtcataaaccccaggtgacagacaaggaagcgaatgaccctcgcctggtgtggtattgtgcccgatgtaccagacaaatgaaaagaatggctcaaaaaactcagaaaccaccgcagaaaccagcccctgcagttgtttctgtaactccagctgtcaaagatccattggttaagaaaccagaaactaaactgaaacaagagacaacttttctagcgtttaagagaacagaagtcaagacatccacagttatttcaggaaattcttctagtgccagcgtttcctcgtcagtaactagtggcttaactggatgggcagcttttgcagccaaaacttcctctgctggtccttcaacagcaaaattgagttcaacaacacaaaacaatactgggaaacctgctacttcgtcagctaaccagaaacctgtgggtttgactggtctggcaacatcatccaaaggtggaataggttccaaaataggttccaataacagcactacgcccactgtacctttaaaaccacctccacctctaaccttgggtaaaactggccttagtcgctcagttagttgtgacaatgtcagcaaagtaggtcttcctagtccaagtagtttagttccaggaagcagcagccaactaagtgggaatggaaatagtggaacatcaggacctagtggaagtactaccagcaaaactacttcagaatccagcagctctccctcagcatcccttaaaggcccaacttcacaagaatcacagctcaatgctatgaagcgattacagatggtcaagaagaaagctgcccaaaagaaactcaagaagtaatgtggccaagtaggtttttgtatcatattagcctaaagatgaaaggcttattattatgatataatctgtaatacactgtaatttaataaaagtcttcataatcaaaaaaaaaaaaaaaaaaaaaaaaaaaaaaaaaaaaaaaaaaaaaaaaaaaaaaaaaaaaaaaaaaaaaaaaaa

SEQ ID NO: 214 - DNA, 3016 bp, Homo sapiens
gacagattaatgtccctgtaaatctgataatgataaatatagcataaaggtgttatattcaaatggattttaatttttctccaaactaatatttacataaatgtatgtaaactatttgagttatgtggagttccagttagttttcttttgtgtatgtctcaacaaatgtttagtgttaatgcttgtcagctcacattttcttttcctttgttttgtaagattactttcttcccttcctctcttccttacctccattaccttcctttactccccttcctccccttctcttttcctctctctctattccttctcttacccttccttctcccctttgtccttccttcccctgyctctgatctcattccctcctcccatgccctcctcactattccccttcccctgcttctttcctcagcctctctttcttttttaatattgcctccctccctcccttcccttccttccttccttcctttttcctcttctctttccacccacctttttattttttcagactggcttaatgaacagtctagtgatagaaagtggtaaaaataagttatagtagatctatatagctatataatccagtatatccaatataatagaatattatgcaataattacaaactatgctttttgtgcttcttcatatctacctcatgcccctcatatttttcatcttcatattctgtcatttaccaaatcctatgaaaataatctctcaaattcatcctttcctatctccttcatcttcacatcctgcatttgctaaatcctagaatttttcaaattcattcttttcatttctcctaccatcccccmatttccccttamcagamctattaaaatagctgccctgagttggtcttgactattcttctatttagccmataggctatggscatattttaatcgtcctaaagcccagktctcatcagattacyacctgcttaaacctttctgttactggctgcccatttcctaccaacttaatataataccgtagtcttcagtgacttgcagattatggctctaacctgcttttttagttctctcaagctccattttacccttaacttccagtggaacttgctttctgcttccatgtcttttttcccactatttgctttgcctggagtacttaacttcttagtctgccctttagaacctacctccttcgaggcccaattcagatgccacctttccattttctctattattatctaagtgtctcttctcccccttatctatgttataaattccttaagttcagagactgtgtcttgaaattctctgaatttttaacacagtgccttgctattataaatatttggtagttttaattgtgcagtaaacacttccatttatgaaaatttctgttttcttgtctctagttaaagaagagtgtaagagtcctaaagctgagtgttggtcccaaaaaatgtccaataagcagcctaactctggaattgagaactttttagcatctttgaatatctccaaagaaaatgaagtacagtcatctcatcatggggagcctccaagtgaagagcatttgtcaccacagtcatttgccatgaagggaacacggatgcttaaagaaattctaaaaattgatggctctaacactgtggaccataagaatgaaatcaaacagattgctaatgaaatccctgtttcctctaacagaagagatgaatatggattaccctctcagcctaaacaaaataagaaattagcatcttatatgaacaagcctcacagtgctaatgagtaccataatgttcagtctatggacaatatgtgttggcctgcccccagccagatccctcctgtatccacaccagtaactgaactttctcgaatttgttcccttgttggaatgccacaacctgatttctcctttcttaggatgccacagggctccttaggcatgaatttccctttgccttcacaagtatttgcaaattatccttcagctgtaccacctggaaccattcctccagcctttcccccacctactgctaatataatgccttcgtcgtctcatctctttggctcaatgccatggggaccatcggtgccagttcctgggaagcccttccatcatactttatattctgggaccatgcccatggctgggggaataccagggggtgtgcacaatcagtttatacctctgcaggttactaaaaaaagggttgcaaacaaaaagaactttgagaataaggaagcccagagttctcaagccactccagttcagactagccagccagattcttccaacattgtcaaagtaagtccacgggagagctcatcagcttctttgaagtcctctccgattgctcaacctgcatcttcttttcaagttgaaactgcctctcaaggccatagtatatctcaccataagtcaacaccaatctcttcttcaagaagaaaatcaagaaaactggctgttaattttggtgtttctaaaccttctgagtaaatttggctcttagaattaagttaatttcttctctttccatctacctttttataaatacatatctatgtctcataaaaattagaatgtactattttaaaataatatgtgtaaattgaaatttttttcatttttaagttatcaggcacttttcatgctgtttaaaagactgtgtatcaaattgtgcactttaagtatgtgcagtttgttgtatgtcaattatacctcaataaatctgtaataaaaaactaaattaaaccttgcattaaaataatatcacagtatcagtggactaaacattaaaatgtaccactctaatcattggcctcatgattgaagcatcctgaactatgaattagacatcagttagcaataataagcattttttacactatcattgaggrataattacatggagcatgaaatttgggcctccagtgataacttactgaatgtggattttatttctctttttaatgatgtagaaaatgcaggagaatggctcttattttatgtgtggtttttaac

SEQ ID NO: 215 - DNA, 623 bp, Homo sapiens
tcgacccacgcgtccgttttttttttttttttttttaggcccatttragtagttaggaactgcccaggttttttttgttttttaagcattgatttaaaagatgcacggaaagttatcttacagcaaactgtagtttgcctccaagacaccattgtctccctttaatcttctcttttgtatacatttgttacccatggtgttctttgttccttttcataagctaataccactgtagggattttgttttgaacgcatattgacagcacgctttacttagtagccggttcccatttgccatacaatgtaggttctgcttaatgtaacttcttttttgcttaagcatttgcatgactattagtgcttcaaagtcaatttttaaaaatgcacaagttataaatacagaagaaagagcaacccaccaaacctaacaaggacccccgaacactttcatactaagactgtaagtagatctcagttctgcgtttattgtaagttgataaaaacatctggaagaaaatgactaaaactgtttgcatctttgtatgtatttattacttgatgtaataaagcttattttcattaacaatttgtattaaaaaaaaaaaaaaaaaaaaaaaaaaaaa

SEQ ID NO: 216 - DNA, 1092 bp, Homo sapiens
ggcacgaggccgctttccccaccattgtctctttagggcctggtgtctgcccccgccctgggtgcacccatttactagcacggggccacctggttggtggggggcagaaacaaggcatggaaaaacatgacacaaatcacgtctggtaccatgctgaacctgtccatccaaaatgcctcaggcttctactcacattaaagctccccctcctcccagcccagagcctggcaattaaagtgaacatcacgtacgaagaaacatgcacgtgcgggcagctgataaatcaggaccggctctgccaattaactggtcttacatcttctgctgagagttcagaatatgtccgtgtcagccaagccccagcccaggccacagcatgtggctcgggttcacgagaaggaggggatactgctccttggggacctaagcaaatacaagaagccatcttaacttgctaatgattactaagtgctccaaagctaagaggcagaaagagcagaccagaggagagggaagagaagagggaggaggagtgaggatggcacccgaatctggaaccctttagtgagtaaaatcagtcaggtacacttggctcttgcagaccctttgtgtgtaaataaatctggatgtgggcaggcgccaagtatgatctgaaacaggcccaatcccaccctgcgagggaggtgtatgcaccctgatccctggccgcagagcgcaggggctggcggggagagtggcactgcgtgcgccgtagccggcctgcaggaggattgccttacacagctctgaactttgcgtcttttaaaataccaaggggcagtcgtttacacgtgaggctgactgcccagaatgggagattcaccttgactatatggaggtgattctgctagttttccgaggcaaggggaacccaaaatgacagtttaaagcacaaacatggccatttgtcacagcttcgggaagaaatggggaaaggtgctgagagaaaatccgtttcttacaggagacaaacaccgtttggggatgccaagcatggtttcccaggggcttcccctttctagaagagttcaccttgtacctaaaaaaaaaaaa

SEQ ID NO: 217 - DNA, 2101 bp, Homo sapiens
agccggcctcgcacttccggtggggagattccggcctggagctcccagggccgagcagaccttgggacctgtgagcgctgcatccaattaaccatgggaagggtcagcaccagccaccagccccttaggtgaggactctgcctggggctctgctgatggttccgaatcatggagctgcagagagctcctccagcctggagacgttcttggtgaaagctgtggtctaactccaccggctcttcctgcacattgtattcaagaggggtgcctgcccccgctgactcaggagctccggtgctgcagccgccacgaatggggaggtgggccctcgatgtggcctttttgtggaaggcggtgttgaccctggggctggtgcttctctactactgcttctccatcggcatcaccttctacaacaagtggctgacaaagagcttccatttccccctcttcatgacgatgctgcacctggccgtgatcttcctcttctccgccctgtccagggcgctggttcagtgctccagccacagggcccgtgtggtgctgagctgggccgactacctcagaagagtggctcccacagctctggcgacggcgcttgacgtgggcttgtccaactggagcttcctgtatgtcaccgtctcgctgtacacaatgaccaaatcctcagctgtcctcttcatcttgatcttctctctgatcttcaagctggaggagctgcgcgcggcactggtcctggtggtcctcctcatcgccgggggtctcttcatgttcacctacaagtccacacagttcaacgtggagggcttcgcttggtgctgggggcctcgttcatcggtggcattcgctggaccctcacccagatgctcctgcagaaggctgaactcggcctccagaatcccatcgacaccatgttccacctgcagccactcatgttcctggggctcttccctctctttgctgtatttgaaggtctccatttgtccacatctgagaaaatcttccgtttccaggacacagggctgctcctgcgggtacttgggagcctcttccttggcgggattctcgcctttggtttgggcttctctgagttcctcctggtctccagaacctccagcctcactctctccattgccggcatttttaaggaagtctgcactttgctgttggcagctcatctgctgggcgatcagatcagcctcctgaactggctgggcttcgcctctgcctctcgggaatatccctccacgttgccctcaaagccctgcattccagargtgatggtggccccaaggccttgaaggggctgggctccagccccgacctggagctgctgctccggagcagccagcgggaggaaggtgacaatgaggaggaggagtactttgtggcccaggggcagcagtgaccagccagggcaaatggcttagaagcaggccactccccagcctgctgccagcactcactgtgctcaagccgccagggctcatcatggtagctgggagctgtggacgggagtcaccaggtggtggggccaagccagggactcatgacttttgcccctcccttcagagcctggtcacacaaggggcgagcaccaggccagcctgggactggccagagctgggcccaagctgcgctggaatcgcagcaggagaggggagtgggctggttcttcccaccacttcccaggctctgacagccgagactcatttccaaggcacagcagctttctaaagggactgagtttggactgggttttggacctccaggggctggagcttcatcacctgggcagtgtcttttctcagagagcaggtttctttatagtttggaaataaatggttcacggtccactggccgccttgtgttgctggagacgtgggggcagggaggggacagtgtgggcctggcctctcctttcctttccctgcctggagccttcttcaaatgtctggtcttaagccaggcctccttcattttctcgctcctgttagaacaccagtcccctycccagtggggccccactgcacctgctggcaggaaataaatgaatgtttactgagwaaaaaaaaaaaaaaaaaaaaaaaaaaaaaaaaaa

SEQ ID NO: 218 - DNA, 1318 bp, Homo sapiens
  misc_feature (557)..(557): n equals a,t,g, or c
ggcacgagaattaattgccagccttggttcacactgatgagtgtgctcattggagagactcagcatgcaaaagaaaagactcatcaatttgcagttatttaatttcacgaactgccggatggtggagtcagtagcagcggctgggccgcaacatggcgcctcccacctagacttccggtcaggaaacttccaccttcctccgatttacgtgggcctgcatgagcctacttctcttcttattctagtgccagtggcctctgggagtcttggtccttcttactggaatagccctcctctcctgttacagaggcaataattctccagccttccggtcgccgccaaagcctcctgcctaatcacttcctgtattgtctccctgcggctctttgcacagaccttgggctccgtcgtctctggattcttactgatctcttcctcttctcccaaccgccttgtcatgtctctttgagctatgtcaggaggaacggaagggcactttcttactacttttgttagccaaacggacaaactgtcccctcccctttgttgtaaccacncattcaaggcttccttcagtccagccccatctcccttttcgttgcctccctttcactactccaaatgagcttgccatactttaaacgggtcttgtactttcttatcccttctctggaatgtcatttctactgaagaaaatcctactcttccctcaagacccttctttaatcccctcttgccatggaaacttgagattttcattgaggagctaagttggaaaatataaactagagctgagtctctaccctggcactattgacatttggggccagattattcttggttggggagactgttctgtgcactgtaggatgtggaacagcctcccaggcctctacctgccaaaagcacactcccctttccccaagtggtgacaaccaactgtttccagacattgccagatgtcctgaggtgggagtgagggtgaacagaattgcctcccagctgggggctgctggactaatcaacaagaagtggcaaggactgcaggcaaattgcctcagcacttagatttagcactgcaaggccacttcgacaggtggtagtgatttgtgcgtctcatttcctattcttgattgtgacaaggttctggaggatggagacagctacccctgccacagttcccacaggctatgttgtacatagggcttcatatttaacatgtgagtgaatgaaacacatgagcccgagtgctcttcaggacggcaaggcctacatcaagatggtaaaccttcagttcttaaaaaaaaaaaaaaaaaaa

SEQ ID NO: 219 - DNA, 1915 bp, Homo sapiens
  misc_feature (490)..(490): n equals a,t,g, or c
  misc_feature (1899)..(1899): n equals a,t,g, or c
ggcgaagaggggcgsaackcrttgcgttttgagtctcgggacccctgttggagagactatggcgctcaacaagaatcactcggagggcggcggagtgatcgtcaataacaccgagagcatcctaatgtcctatgatcacgtggaactcacattcaatgacatgaagaacgtgccagaagccttcaaagggaccaagaaaggcactgtctaccttaccccttaccgggtcatctttctgtccaagggcaaggatgccatgcagtccttcatgatgccattttatctcatgaaagactgtgagatcaagcagcccgtatttggtgcaaactacatcaagggaacagtgaaggcggaagcgggaggtggctgggaaggctctgcttcctacaagttgactttcacggcagggggcgccattgagttcggacagcggatgctccaggtggcatctcaagcctccagaggtgaagtccccagtggagcctatggntactcttacatgcccagcgggscytatgtctatcccccgccagtcgccaatggaatgtacccctgccctcctggctacccctatccaccgcccccacctgagttctatccaggaccccccatgatggacggggccatgggatacgtgcagcccccaccaccgccctaccctgggcccatggaacctccggtcagcggccccgatgtcccctccactcctgcagccgaagccaaggccgcagaagcagccgccagcgcctattacaacccaggcaatcctcacaacgtctacatgcccacgagccagccgccgccacctccctactacccaccggaagataagaagacccagtaggccctcctgcctccctgcctcccaccctcatctctctaccctacccctcccatcggggctgtgctggggcttggggaggggagggggcgccttgttctccctccaggtctgatcataaacaattaccaggaactagcattgtgggacattagggcccccggcctcgggagaggtgccgcccagcttcccatgccagcccggagcccacagtgctgcccagcgtacctccctcaccgtctggggctcttctgggagcacggagcatcccctgttcctgtttcactctcagcttctcccctcgaagggactctctggccacctcctccaccgcagtccagctccctcagtctggcacccactgctacactcagcctcatgagccacttcagaccagccaggtgtcttcccgggccctgccagaccctgctcacattccctctgctggtctgtgctggtctcagaaggccaccgcgcccgcattccactcagccagggtccagctgcagcccccgccacccttccttcccttccctgtcctgggtcatgttgttgccaccctgtgtgacttttgaagctgtaaaatgagcttccagggcttgggtggcgtcggggcagggccgccgaggctgggaggaagcccttctgccttttgctggtgtttctggaatttgctttccctcacctctcacttccttctagaaggagcttcctgactggaaccagagaatgcatgtctgtccacttggtggctgctgggtggggccgggaacaagggcccctgaccctgtgtgctggccgggacctgccaccagccccccagcctgcttcttccccttaagctttgtgcccctggatgcgctaacattcactcttgtttgtccctggactggccatgaagtgaggagatggttatttaaagagaattccctatttatttgacaaaaaatccagttaatatattaatgtgaaataaaccctgtttgcacctcgatttgtttgctgaaaatgtgaaatagtaaaaatgaaataactggaaaaaaaaaaaaaaaaaaacncaagggggggcccggt

SEQ ID NO: 220 - DNA, 1160 bp, Homo sapiens
aattcggcacgaggatttttgtcttcagccgtgcaactatgttggggtcatcttattcctccttttcggcggtggacacagtcaaaaacattttaatacaatggaagtgcatcccctggcagccctgcggcagtcacagcctccttattggcaaggctgaagtcaaagccttgggctgcccagcctgaatgacactggcttcctgggatggttgttgctgtgtcagggacatttctgggtctctgccactgctactggtgctcttggtggagaaggccacagggtgttgctggggaggtggtgagccagaggtttctgggtctgcaccactgctgctgttgctctgggtataggggtaggccacagggtcatgctgggcggcttgttgagcctgggatgtttctgggtctccaccactgctgctggtgctctgggtggagaagaaggccacaggctgatactggaaggcttgttgagccagggacgtttctgggactccaccactgctacaggtgctctgggtggaggggaagccatggggtcatgctgggggccttgttgagccagggaggtttctgggtctgcactactgttgctggtgctctgcgtggagggggaagacacaggtcatgctggaagcttgttgagccaaggacatttctgggtgtatccagttgtgcaggtctcctcctcttgcatactctgttactaaataaataacagggtgatgctcaggggcttgttgagccagggatgtttctgggtcttcaccactgctgctgttgctctgggtggagggggaggccacagggtctttatgtatttaagcataaaggcaaggcttggcgcggtggctcatgcctgtcatcctagcactttgggaggctgaggcgggtggattgcttgatcccaggagttcaagaccagcctgggtaacatggcaaaacctcatctctatagaaaatacagaaattagccagctgcagtgcatgcctgtggtcccatctactcggagggctgaggtgggaggatcgcctgaacctggaaggtcaaggctgcagtgagccaagattgtgtcactgtactctagcctgggttagagagccagacactatctcaaaataaaataaaaaaaaaaaaaaaaaaaaaaaaaaaaaaaa

SEQ ID NO: 221 - DNA, 2377 bp, Homo sapiens
agctgtcgcgrgcggcgcccggccttgctcaacgcccagcagtccccaccgtcgctgccgccgccaccgccctcggccgctgccgaggcctcctgcagccatcatgtccgccagcgccgtctacgtgctggacctgaagggcaaggtgctcatctgccggaactaccgtggcgacgtggacatgtcagaggtggagcacttcatgcccatcctgatggagaaggaggaggaggggatgctgtcgcccatcctggcccacgggggggtccgtttcatgtggatcaaacacaacaacctgtatctggttgccacatccaagaagaacgcgtgcgtgtcgctggtcttttctttcctctataaggtggtgcaggtgttttccgagtacttcaaggagctggaggaggagagcatccgggacaactttgttatcatctacgagctgctggacgagctcatggacttcggctacccccagaccaccgacagcaagatcctgcaggagtacatcactcaggaaggccacaagctggaaacaggggccccgcggccaccagccaccgtcaccaacgcggtgtcctggcggtccgaaggcatcaagtatcggaagaatgaggtgttcttggacgtcatcgagtctgtcaacctcttggtcagcgccaacggcaatgtcctgcgcagagatcgtgggctccatcaagatgcgagtyttcctctcgggcatgcccgagctgcgcctgggcctcaacgacaaggtcctctttgacaacacgggccgcggcaaaagcaaatccgtggagctggaggatgtgaagttccaccagtgtgtgcggctatcacgcttcgagaatgaccgcaccatctccttcatcccacccgacggcgagttcgagctcatgtcctaccgtctcaacacccacgtcaagcctttgatatggatcgagtcggtgatcgagaagcactcccacagccgcatcgagtacatgatcaaggccaaaagccagttcaagcggcggtcaacagccaacaacgtggagatccacattcccgtgcccaatgatgccgactcacccaagttcaagacgacggtggggagcgttaagtgggtccccgagaacagcgagatygtgtggtccatcaagtccttcccgggcggcaaggagtacctgatgcgggcccacttcggcctgcctagtgtggaggccgaagacaaggagggcaagcccccgatcagtgtcaagttcgagatcccttacttcactacctccggcatccaggtgcgctacctgaagatcattgagaagagtgggtaccaggccctgccctgggtgcgttatatcacgcagaatggagattaccagctccggacccagtgaggggctgtcgcagccaacaccccggcctcggggctcctggtggcagcaccaggggacacacctgccaaacccaccagatggaggggccctccctggtctctggccaccctcccagcctctgcccagggacccctgccttccccaggccatctgctctgccgtcgacactcgtctcagaagcccctttcccagaagaggctggtcttcaagaagtctcgtttctttgcccctgaagtcagtttcaggggaaggatgtgaaatttttccgtgtagaggttacagccttttatgctgttgagctcccaggtaccaaaaagcttggccaacgcttgccagccagccagctgcaggtggcatctgccacgaaggaagcgccagcytcgccaggccagcaggggcgtcgttttgttgccattttgttgaacgttatgggtttatgggtgttcctggaacttgtctttgtgcattcgttgctgtttgtgttaccctcactgtccccatgtcccacccacgtcctacggcactcaggaagcacttggtgaggacgagccctcacccttcttgtcttccttcccagcagcgcccgcagcgggccatttacacgtcgaggctggcacctggcgcgctcgggggccactgtagcgtctgcctgctccctggactcgcaggcctgcctgtggcgccttcccagggccagcctgggtcacgagatgctgtcactcagccagatcagtattgacccaccaggggaggtggggtttggtgagagacgccagcctcagactttttcccactgagggtccagagagcggggccacgtgtcacccacgtctgcgcttggtcacccgtcctccccaccctgtgtgtgtttatgtcatagttacattaaattccattcattgaataaaaaaaaaaaaaaaaaaaaaaaaaaaaaaaaaaaaaaaaaaaaaaaaaaaaaaaaaaaaaaaaagaaaaaaaataaaaaaaaaaaaaaaaaaactcga

SEQ ID NO: 222 - DNA, 1968 bp, Homo sapiens
  misc_feature (19)..(19): n equals a,t,g, or c
  misc_feature (291)..(291): n equals a,t,g, or c
  misc_feature (303)..(303): n equals a,t,g, or c
  misc_feature (308)..(308): n equals a,t,g, or c
gccgtgtaaatgacgtttnaaggcgagtgcggaaagtggcctggggagcctcggggagcggacgccctccgccctggtgctgacctgcctccctgccccttstgcctcctgtmagcagaggcctcggctccgcaactgccactcctcctcggggtgttgcacaagtttcgaggtcaccggcgaccccccctagcagcgcgcctggctctggcccccgcgaaggaggacggagtttgtgtgttgcatactttctaaggcggcggctgcagcagcggctccatccagcccgtnagctcctcctgnaaggnatggctggctacctgagtgaatcggactttgtgatggtggaggagggttmagtacccgagacctgctgaaggaactcactctgggggcctcacaggccaccacggacgaggtagctgccttcttcgtggctgacctgggtgccatagtgaggaagcacttttgctttctgaagtgcctgccacgagtccggcccttttatgctgtcaagtgcaacagcagcccaggtgtgctgaaggttctggcccagctggggctgggctttagctgtgccaacaaggcagagatggagttggtccagcatattggaatccctgccagtaagatcatctgcgccaacccctgtaagcaaattgcacagatcaaatatgctgccaagcatgggatccagctgctgagctttgacaatgagatggagctggcaaaggtggtaaagagccaccccagtgccaagatggttctgtgcattgctaccgatgactcccactccctgagctgcctgagcctaaagtttggagtgtcactgaaatcctgcagacacctgcttgaaaatgcgaagaagcaccatgtggaggtggtgggtgtgagttttcacattggcagtggctgtcctgaccctcaggcctatgctcagtccatcgcagacgcccggctcgtgtttgaaatgggcaccgagctgggtcacaagatgcacgttctggaccttggtggtggcttccctggcacagaaggggccaaagtgagatttgaagagattgcttccgtgatcaactcagccttggacctgtacttcccagagggctgtggcgtggacatctttgctgagctggggcgctactacgtgacctcggccttcactgtggcagtcagcatcattgccaagaaggaggttctgctagaccagcctggcagggaggaggaaaatggttccacctccaagaccatcgtgtaccaccttgatgagggcgtgtatgggatcttcaactcagtcctgtttgacaacatctgccctacccccatcctgcagaagaaaccatycacggagcagcccctgtacagcagcagcctgtggggcccggcggttgatggctgtgattgcgtggctgagggcctgtggctgccgcaactacacgtaggggactggctggtctttgacaacatgggcgcctacactgtgggcatgggttcccccttttgggggacccaggcctgccacatcacctatgccatgtcccgggtggcctgggaagcgctgcgaaggcagctgatggctgcagaacaggaggatgacgtggagggtgtgtgcaagcctctgtcctgcggctgggagatcacagacaccctgtgcgtgggccctgtcttcaccccagcgagcatcatgtgagtgggcctcgttccccccggagaatcccagcggggcctcagagatgcatctgggagaggtggggaagatggcaggcaagggtacccttggccaggactctggtgcccaccctgccacccccgcgctccacctgcagtgtttctgccctgtaaataggaccagtcttacactcgctgtagttcaagtatgcaacataaatcctgttccttccaaaaaaaaaaaaaaaaaaaaaaaaaaaaaaaaaaaaaaaaaaaaaaaaaaaaaaaaaaaaactcgag

SEQ ID NO: 223 - DNA, 1160 bp, Homo sapiens
ggttgggtcaaggtaactctgggctacagagtccttgctgggggttcggggagcgcttggaccccggcttctgggacgcgtcaggagaagggagcactggctttgctttcatcaggccaaagatgcctttytttgggaatacgttcagtccgaagaagacacctcctcggaagtcggcatctctctccaacctgcattctttggatcgatcaacccgggaggtggagctgggcttggaatacggatccccgactatgaacctggcagggcaaagcctgaagtttgaaaatggccagtggatagcagagacaggggttagtggcggtgtggaccggagggaggttcagcgccttcgcaggcggaaccagcagttggaggaagagaacaatctcttgcggctgaaagtggacatcttattagacatgctttcagagtccactgctgaatcccacttaatggagaaggaactggatgaactgaggatcagccggaagagaaaatgaagaccccagagacatttattggggagtaggatgtggctgagtgctttttttttggccagactagcggattcagtcctggaagagagtatcatataatgagacccacaggcactggcacccttgggttggcaatagaaggtgacatggaatggagaaaaccaagattccagatggggatagtaactagaaggtgcttcagatgcactgcctgcgggtgccagtctgaaaaccagaccgcacagaggcctggggctgctgatgagctttttggtgctctccacacacaagctcgcaaacacacatgtcccagaatagctctgttgggttgtgttgggagaagcggctggagttcattctctcacccccttatgttggtgtttggcgtgtgacagcagttctacagagctctgtgttggggtcatggatgagcggctctcttggctcttaaaggcaggcctctctcttcttgcctttaaagaatcctccttcctcacacctggcctcctctggcttcagcttctcagcagcaagcaccagccttccacaacaacactatatttttatgctactttcctgtttgcactactacttttttattaaacgatgttaaataaaaaaaaaaaaaaaaaaaaaaaaaaaaaaaaaaaaaaaaaaaaa

SEQ ID NO: 224 - DNA, 1200 bp, Homo sapiens
ggcacgagaaaaaatgtaagctgaaatgatgacgtgttcttttagaaggtttatcatagcaactactataggcagtgattctaagaagatgctattctttttttccattgctttgtctagttttttttttttaaatctgtttttgtgcctttgtaattctagggttattggtatagttctcaccatatcttgaatacagatgctttttcctttggaaataatttctcataaagcacattgcttatagctgcttcccttttcccagagtagtaaaagttgtgatacaagacagtgatatcagctgggcgtggtggcacacgcctgtaatcccagcacgttgggaggccaaggcaggcagatcacttgaggccaggagttcgagaccagcctggccaacatggtgaatccccgtctctactaaaaatacacacaaaaaattagctgggtgtggtggtttgtgcctgtagtcccagctactcgggaggctgaggcacgagaattgcttgaaccagggaggtggaggttgcagtaagctgagattgcaccactacactccagcctgggtgacagaacgagactctgtctcagaaaaaaaaaaaaagagacaatgatatgaaaaggtcttacatgaatgagttttacgcatgattcaatctgtaagtcctataaattatttttgatggatggtatctattttcttcctattagtagttttgggcaaaaataaatttaactgaatgtaaaaatattcagctctatggggagctgagaagaactaaatattttcagacacttgttatgtgcaggttgtttggcatatatttttaaaaatctttataataccattttgaattaaattctatccccatttaacaaatgaggaggtggtttctattcttaagtaactttcccaaaatcactcaattaagtggcaagggtgggatttaaatcgaagcctatactctttcacttgtttccaaagatgccaaactcaaaatgtggctaaacagtaaatcttgagcaaagaaatgatttactaggaagcagcacaatagaacatactggatgtaggaaatgttatatatcttgatctcattggtggtaacacaagtatatacatatgaaaaagttagttttatccttactgttagtactcagtgctcttattattcctcaaaaatgaaaaaaaaaaaaaaaaaa

SEQ ID NO: 225 - DNA, 1981 bp, Homo sapiens
ggcacgagtcacccaacaatgtttttttcatgttgatcactttactaaagcgaacaattggggttttaccaaaattgtgaaggattttattcttccatacttatgtctgtgttcagggtcatacagattctactttttccttttagtttaaggtattctcttggagatttaatgtacttaaatttgaccacaatttattgagagcatattctgtgtcagacattgcactctgcactagatattcaggaatttctaaaaagaatgttaacattgctgttacatagtcagttactgatcacattcttttcctctcaacttttttcaaaataggaatctgcggtatgttttcacgtatggagttcaggtcaggcttaggggtccctgacaatgtgaatagttttaagctgggcctcaattcgtggtacccttatactaatttaacaagccgtggactctaggttccaccaaaaatattttgttccatcctctctggtttcagtccatggtggtacagaaagaaaactaaggaacttcagccccaaattgtcaaattttgctacttaagaaacagaagatttaaatctatcattttgtcttatattccagagttgactggttcctcctgtctttaacttcttgtccttgaagggtattctaattttcattcagaaatatgacttctcatagggtttgtgttagatattttcagggccagatggatatgatgttcccatttctgttttattgttaaactactattccttttgagctgtaatgaacaattcattctgagaggcaatatatgttttccagtaattgacttgaataaaagtaaatgttaaacatggagttactaaagttaatacagtgggtattagtactaatttgttcaaattaagatagaattcttaatttgataaatagaattcttatattacagcatcagtccaattggattgatagtttgtaaaaggtaatttcttacatgaagaaagacaggttttctttctcttagcaaggtattaatgcaaaaatgaactcttcatttcctaccagcttccgaaggaaatgctggttaggagtaaattcaatttactctaccaaccaacttcacatctgttatgctgaagtcagagtttatctttcttgttatgtggaacctagaaatataccatgaggaatactgaaaataaactagcagaaattttgcgtgatgctgaggatttttagatggctgcaaaatgggtgaaagtaatataaacttaacaaagaatgttgtcacaactctctggaacttagtactgtttttcaactacaaatggaagatttgtgagactaggtcgacttaatgtgatttcaatgcagtaattactgtgtggcatgggcatggtaagagataggccttttctagaaatattctcatctctgttttttttagttgctcttacttagatttatattaactcagcttcacattttcatttctttttattttattttaaacaatgagaaaaatactccacgatgtcactgatttagttatcagatttgctttatttctgtatataataggtaatgtgagtacaggaaatatatctgaaaaggttacttgtacctaaattttaagttagatcatttaaaaattacttataagtctcttgagtgttttatatagtagggcagatggaaaaacttatttgatattcatttttggtacctcttaggaaaataattgggaatgtattcagttggaaaaaatgttgagaagagtgttttatataatgattatttagtaaaacattaaaaataatttcttattctggaggtttatagacatcaaaattgacaaagattacatggattatacatttgcattcaaggtacctttaagcgattttttaaaaaaaattctgactctaacaatgcatgctcattgtagagcgttaaaaatacaaaaacatgcaaaaaaaaaaaaaaaaaa

SEQ ID NO: 226 - DNA, 1467 bp, Homo sapiens
ggcacgagcccaggtgggttgtcttcacttccttggtagtgtcttttaatacacaaagttttaaatttttatgaagtcaaatgtatctacatttttctttggttgctcatgcttttggtgttgcatctaagaatccactgccaaatccaaggtcatgaagatttactcctatgttttcttctaagaattttatagtttttgctattacataaggtctttgagccattaagatctttgacttaacttttgtatatgatgtaaagtcactgtcaaacatcattcttttgcatttggctgtccaggtatcccagcattatttgttgaaatgcctacacttctttatattcccttgactcctctaaccaaggcagttggacctttgctactaccactgccctgaaactgctgtcactgggttactgaggactgggtagcttagttgagtagataatcttttgttgtttcctccttgtaatatacaagccttggcttctgtgacatcatactctcctagatttccccctgtcactgtggcttcttctcagtctctgtccatccctggtgctcctgaaggttctgttctcagccttacacacattacctgggtgatctcattctctgccatgacttcacttgccatatatgtgctgattttccccaaattcctatttctcccgacctttacatctattttatttgcaggtcatatatctaataaggaattgatatccagtgtacatgtagaactcctgtaattcaatacagaaaccaaacagtccaattaataaatggagaagagatttgaatgaacatttttctaaagaacatctcaagctcaagatttcccagataacttttctttcttcaaaatctgcttctgtgtttcctcatctgtaggtggcacagcatacatctgatttcccaagccagaaacctcatagttattcttgactccaggaagaaatattattgagtttttaaaaactcagcttattgactcattgttttatataataaaatgcaacagttttaagtgtatatttcaatgagttttaatacatttatgtacttgtgtcactatcctcatagatagagacaaaacatttctatcacaccggcaatttcctatgtgtcccatcccaatcaatcctttcccctttgctggctccaaacaatgactctttcctatctttttagaaagattagaattgcttttctagagttccagtaatggaatcatacagtgtctaagtctgtttgtggtgctgtaacaaaatacctgagactgggtaatttataaattataggaatttatttctcacagttctggatgctgaaaagtttatgatcaaggcactagcaggtttggtgtctgagggcccagtttctaatttgaagatggtgctttaaacactgtcctcacatggtagaaggggcagatgggcaaaaaaaaaaaaaaaaaaaaaa

SEQ ID NO: 227 - DNA, 1257 bp, Homo sapiens
ggcagagtgggggttggcgtataggtgtaggggcccatgttggtttgggagtratgacagttcacgcctgtgggtttgcggacaaagataccatgccccatccctgtctccctgtcagcacgcacttggaagggcgctgggggtgttaatcagctttgctagcctggggtgtgccagcctgggcaggtgtgctctggtgatggacagagcgcctgaggttccatagagggagggtgttgctatgacatctgagatgtcaccagcatgcccctgatgtgtgctccttgcatgtccccaggtgtgctaggcatgttctgtgtgtcctggcatgttaacctggcagtatcagggtgcatgttccatgtgtggcacggtgggcacatgtttgaggattgccctcactgaggtgggccttggcacacccccctgcctcgtgggcccttctcccaggtggtggacatcatgagggtgaacgtggacaagtycttggagcgagaccagaagctgtcggagctggacgaccgtgcacatgcactccaggcgggggcctcccagtttgaaacaagcgcagccaagctcaagcgcaaatactggtggaaaaacctcaaggtaagggtggggacaggaaggaggacaggtgggtgaatggggtatcatagtttgtcttactgatcctcgcctctcacccccagatgatgatcatcttgggagtgatttgcgccatcatcctcatcatcatcataggtgagtagggtgagaatggccggggccctttccctggagaggtttccccagtggattctaggttttgaaggtcattaatctagtttttactcttcagccaaaaacacatatagctgctaatggcaattctgattcatctararccaaaaactttgatgttatttagcctgcattttgcctarttcttggcagtcttgttaacatttggaaataaggaaagctggtgtwtccattgargaccctttaggcctaagagcccagtctgagaaccctggaattgaggagtgggagaaaggaaaggaccaggggcttgagacatgactagccccaagtcccttcatttgcatctgctatgcaatagtccctctcctttccttcttcttccctcagatttagctgatccttcctcccaccctggccttcctttcctctttcctcctcactctccccgtcatgctccctctgccccgccctcaaaaaaaaaaaaaaaaaaaaaaaaaaaaaaaaaaaaaa

SEQ ID NO: 228 - DNA, 1504 bp, Homo sapiens
ggcacgagcataactggcccctaacaatgggggccatctgcacgctgttgtatgcagatttggatgtgttttctagcacttacatgcagatagtgaagctcctgggactggatgtgccatctctgtgcttggcagaactggtgaagacctattgcagcagcttcaaactgttccaagcttcaccttctgtgccagccaaatacgtggaagacaaagagaagatgctgtctcgaacaatgcagttggtggagctggcaaatgagacgtggctggtgaccgggaggcatcccttgcccgtcatcactgctgcgactttcctggcttggcagtcgctgcagcctgcagatcggctttcatgttcccttgcccgattttgtaaattggcaaatgtggacctgccctacccggcgtcctcccgcctgcaggagctgctggctgtgctgctgcggatggctgagcagctggcctggttacgagttctgagacttgacaaacggtctgtggtgaagcacatcggtgaccttctccagcaccgccagtcactggtccgctctgcctttcgggatgggacagcagaagtggagacccgagagaaggagccaccggagtggggacaggggcaaggagaaggggaggtgggaaataattccttaggtttaccccaggggaagcggccggccagtcctgcccttctcttgccaccctgcatgttgaagtccccgaagcggatctgccctgtaccccctgtctccactgtcactggagatgagaacatttctgatagtgaaatagaacagtatttgcgtacccctcaggaagttagggactttcagagagcccaggctgctagacaggctgccacgagtgtccctaaccctccctgatggatatccactgggagcacttcatcctgttctgacagcttgataacattcctgttataaccaaggatggaagtgtacaccagtccgtaggtattgcttttcttgtttgaaggaaccaagaggggctctgccattagttggaccctgggtcctggagtaaagtcaggagtgcagggatgactataggtaggagagattcccatcccttggtgtgggagagcaagttgcctatgtccatgttctgtgagatggctttcctcatagatggatgggaaaatgtcaggctctttgctgctggtttgaattggacacactgctgcggctcctcctgcaggcctgagggggcttccctctgcttgtggagtggttggcattcccagcagtatcaaccctcagaggagcgggaactggggaattctggccctacgtgcattcacaggcaatgatgggtttgtgtgtatggtgtcatgagatcctctacctcataacaaaaggacagtgggtagactaaggcagtagctcaaagggctttgcaaaattttaatatattaaaacaagaggcatctgctagaaaacattctattgtataaaacccgagttcttaaaaaaaaaaaaaaaaa

SEQ ID NO: 229 - DNA, 1973 bp, Homo sapiens
ggcacgagcgtcacttccggcttccttcagtccgctggtcccgagcacgagctgtgaggggattcacttgtgtgcggaactcctcggaaccatggcgtccctttcccttgcacctgttaacatctttaaggcaggagctgatgaagagagagcagagacagctcgtctgacttcttttattggtgccatcgccattggagacttggtaaagagcaccttgggacccaaaggcatggacaaaattcttctaagcagtggacgagatgcctctcttatggtaaccaatgatggtgccactattctaaaaaacattggtgttgacaatccagcagctaaagttttagttgatatgtcaagggttcaagatgatgaagttggtgatggcactacctctgttaccgttttagcagcagaattattaagggaagcagaatctttaattgcaaaaaagattcatccacagaccatcatagcgggttggagagaagccacgaaggctgcaagagaggcgctgttgagttctgcagttgatcatggttccgatgaagttaaattccgtcaagatttaatgaatattgcgggcacaacattatcctcaaaacttcttactcatcacaaagaccactttacaaagttagctgtagaagcagttctcagactgaaaggctctggcaacctggaggcaattcatattatcaagaagctaggaggaagtttggcagattcctatttagatgaaggcttcctgttggataaaaaaattggagtaaatcaaccaaaacgaattgaaaatgctaaaattcttattgcaaatactggtatggatacagacaaaataaagatatttggttcccgggtaagagttgactctacagcaaaggttgcagaaatagaacatgcggaaaaggaaaaaatgaaggagaaagttgaacgtattcttaagcatggaataaattgctttattaacaggcaattaatttataattatcctgaacagctctttggtgctgctggtgtcatggctattgagcatgcagattttgcaggtgtggaacgcctagctcttgtcacaggtggtgaaattgcctctacctttgatcacccagaactggtgaagcttggaagttgcaaacttatcgaggaagtcatgattggagaagacaaactcattcacttttctggggttgcccttggtgaggcttgtaccattgttttgcgtggtgccactcaacaaattttagatgaagcagaaagatcattgcatgatgctctttgtgttcttgcgcaaactgtaaaggactctagaacagtttatggaggaggctgttctgagatgttgatggctcatgctgtgacacagcttgccaatagaacaccaggcaaagaagctgttgcaatggagtcttatgctaaagcactgagaatgttgccaaccatcatagctgacaatgcaggctatgacagtgcagacctggtggcacagctcagggctgctcacagtgaaggcaataccactgctggattggatatgagggaaggcaccattggagatatggctatcctgggtataacagaaagttttcaagtgaagcgacaggttcttctgagtgcagctgaagcagcagaggtgattctgcgtgtggacaacatcatcaaagcggcacccaggaaacgtgtccctgatcaccacccctgttaagcattcccacgtgctgtcgatctttggaccagtttctagcaaagttgtgtttgaaagatactctattaaagaagactgtggaatctgtttatcggtgcccattatatccttaagtttggatatttagctgaccttcgctttaacataggtctaatttatttgccgtgtcattttccatacaaatcagttgatttaaaaaagttcatttctcatactgtgcattaaaataaaaatttgaacaattaaaaaaaaaaaaaaaaaaaaaaaaaaaaaa

SEQ ID NO: 230 - DNA, 1880 bp, Homo sapiens
  misc_feature (642)..(642): n equals a,t,g, or c
  misc_feature (655)..(655): n equals a,t,g, or c
ggcacgagcagaaactcattctgaaatacaaggaggcaatgagcaacaaggcgtgcaggtattttgatgaaggacgtgggagctgcccatttggagggaactgtttttacaagcatgcgtaccctgatggccgtagagaggagccacagagacagaaagtgggaacatcaagcagataccgggcccaacgaaggaaccacttctgggaactcattgaggaaagagagaacagcaacccctttgacaacgatgaagaagaggttgtcacctttgagctgggcgagatgttgcttatgcttttggctgcagtggggacgacgaactaacagactctgaagatgagtgggacttgtttcatgatgagctggaagatttttatgacttggatctatagcaaccttgcgtggcgtgtgaactggtctgctgacctcagacagcagctgtcccctgtggtggtgtggcatgcctgtgttctctcctaggcagctctcaactccaggtgctgtcctaagaatttttacccagggcctgtcttctcaacccctcacctttccctagaggagtgtgttgttttccctgtggaaaaaagttacaaaaataaatcttaaagttagtttttggtaacacaaatttaactgtcanacagttagtgtangtgtgttgcgtcacctgtttccaaccaaatggcatttatggactttccacacactcattttgaggaccccaggttcaaaagtaaaagcagtggccctgctttggggtccaagaataggagtgatgggtgaagggacctaagctggccaatagccctctgccccagacatgggatgtggatccttgaggtttctggtgaaatctgcacatctgtgtttttatatctgttccctaccctgtaatccctaccacgtgcacttgttctgtggttttggtctcttgtttaattgcacacaagtaatactactgggtaaccagaatcaggtgtgaatgtgttgagattttttactgttttgcatgataggaaaattgagaaagaatacgtataaaagatagagaggcataacatcaatgcagagttggaagttggctcccaagggctgacatggtgtgagtgtgtgggtgtgtgataagcttctcatccctgcatagatgcagtattcttagccttagtagaaaaacctggtttagtggtttaagccttgtgtggcagatagatcttaaagggcaaagcagtatattggtagttgtcaatatagcagtgctagctctgtctatataaatagagaaatggggttagccatagaggttaaaactacctggttatcccatataataacacaaactgggtcttggatacacagttgtatttaatgttttacgatctagcctttccagtacaggcactttctgagaaacctttgtcctcacttgaggcattttgttgtcgggtttttgtgtttgtttttgtgggtatttgcctcattccacccctgagctttcaggtagacagacgtgattcaaaactctgttctaaggtgtttattgtagtggagtaatgggtttgcagtgataagtcatacttttccaccgaaagggagggcttgggaatccctgagattagctaaagttaagttgttggaagaattccttgattggaaattgtacctttgtgttttgttgctctgtttcctgaaaataactcggggatgctcctggtttgtccatctactgctttgattccttggatcccacccattctttcactttaagaaaaaacaaataattgttgcagaggtctctgtattttgcagctgcccttttgtaagaagcacttttcccaaataaaacaattaaaaaaaaaaaaaaaaaaaaaaaaaaaaaaa

SEQ ID NO: 231 - DNA, 1361 bp, Homo sapiens
  misc_feature (903)..(903): n equals a,t,g, or c
  misc_feature (1031)..(1031): n equals a,t,g, or c
  misc_feature (1264)..(1264): n equals a,t,g, or c
gattcaaggctcactccagtccacgtttctagcttccgtcttccctcccctgcacatactactgcatgtacctccacagtcttcccttttgctttgctggcatctcatgtctttgttgcctatccaagctccctgttgaaattctatccatacttataattaacatgtcccttgattcatacagactttatcagcctgcccttagtttctgtcagacagaattaagtcctctgttcccatataaagcagatctttatagctgttttagtagatattgtttatatatctctctctttcacagccccttgtaacccatctcattcccatattctctttcaacccccatctctggattacagatagaaagggtgataagtttgtgggctgtgtctctttaatcttgtacctccacagcatctaggacagtgtcttgcctaaagcaaggatggaattaacatttgttaatacacgcttatctgtcagtcttactatcctcaccctgcttcataaggaaatwatattttattwatattttatttcaaatcagtaatactgcctgtcacatcactaaaacctcaaaaaacagaaatgtttgaaataagaattttcaggtttgccttgtgataactgtatactaactagttgaaagtatggattcagtatcttcaaagtgttctgatttgctaggactcactgttttcttgtgtttaatcttcagtttgtgaggtcatttaatttgtagcatttgcaaatgttatactgaaaaactctgagaatgaaataagtcactatactacgtatttttataaataaggaagtgcacaattatgtgacttcacatttcttgcttgcttgctttttttggggtggggacggagtgttgctctgtcacccaggctcgantgtggggtggtgtgatctctgctcactgcaacctcctattcccaggctccagtgatccttctgcctcagctgggactacaggtgtgcaccaccatactggctaagttttatattttttgttgagatgnaagtttcactgtgttgtccaggctggtcttgaactcctgggcttaagtgatccacctacttcagccttccaaagtgctgggattacaggcaggagccactgtgtccagcttacattttttgtataatcaacattagccagagtaaccacactttagatctgttggtcttcaggaaaagcaatatgtgtctggatgtggtggctcacacctgtaatcccaacactttgggaggnccgaggtcggaggatcacctgaggtcaggagtttgaagccagcctggccaacatggtggaactccatctctactaaaaaaaaaaaaaaagggcggcc

SEQ ID NO: 232 - DNA, 1441 bp, Homo sapiens
  misc_feature (269)..(269): n equals a,t,g, or c
  misc_feature (420)..(421): n equals a,t,g, or c
  misc_feature (1439)..(1439): n equals a,t,g, or c
ccggggtcccagttctaaagtccccaskcacccacccggactcagawtctccycagacgccgagatgcgggtcayggcgccccgaaccstcctcctgctgctctsgggrgcmstggccctgaccgagacctgggccggctcccactccatgaggtatttctacaccgccrtgtcccggcccggccgcggggagccccgcttcatcgcagtgggctacgtggacgacacscagttcgtgmggttcgacagcgacgcgcgagtccgagganggagccscgggcgcctacgacggcaaggattacatcgccctgaacgaggacctgmgctcctggaccgcsgcggacacsgcggctcagatcacccagcgcaagtgggaggcggcccgtgwggcggagcagckgagagcctacctggagggcnngtgcgtggagtggctccgcagatacctggagaacgggaaggagacgctgcagcgcgcggaccccccaaagacacacgtgacccaccaccccrtctctgaccatgaggccaccctgaggtgctgggccctgggcttctaccctgcggagatcacactgacctggcagcgggatggcgaggaccaaactcaggacacygagcttgtggagaccagaccagcaggagatagaaccttccagaagtgggcagctgtggtggtgccttctggagaagagcagagatacacatgccatgtacagcatgaggggctgccgaagcccctcaccctgagatgggagccrtcttcccagtccaccrtccccatcgtgggcattgttgctggcctggctgtcctagcagttgtggtcatcggagctgtggtcgctrctgtgatgtgtaggaggaagagctcaggtggaaaaggagggagctactctcaggctgcgtscagcgacagtgcccagggctctgatgtgtctctcacagcttgaaaagcctgagacagctgtcttgtgagggactgagatgcaggatttcttcacgcctcccctttgtgacttcaagagcctctggcatctctttctgcaaaggcacctgaatgtgtctgcgtycctgttagcataatgtgaggaggtggagagacagcccacccyygtgtccacygtgacccctgtycccayrctgacctgtgttycctccccrrtcatctttcytgttccagagaggtggggctggatgtctccatctctgtctcaactttaygtgcactgagctgcaacttcttacttccctactgaaaataagaatctgaatataaatttgttttctcaaatatttgctatgagaggttgatggattaattaaataagtcaattcctggaakttgagagagcaaataaagacctgagaaccttccagaaaaaaaaaaaaaaaaaactcgggggtwyttttgggggggccgggggccctggtttttcccncc

SEQ ID NO: 233 - DNA, 1162 bp, Homo sapiens
  misc_feature (1144)..(1144): n equals a,t,g, or c
ggcacgagcctgcattcctctcctctcttctttcctctctgtcccttctctttcccctctcaaccaggagaccatcatgtctctctgccttcctcctctcccctccaggggagtcaggctgactgtgaaagccatgagcttctctccctctcccactcctcctctcctactttcagatggatttattccttttttaaacaatgaacatcggaaatgagactgtggggtgtggtttctctctctcttttttttttaattttctttgttgggtttttgagcaacctcatgtccccttcccagggagccttttaatttacctcttagaactcaagtggatgggaagtagagcactatgtgtcagtatgctttgttttctgacacgattacacagcgaggctttaatgccatttgggtaggtgagcttctgcacttctgttgtgctgaactgtattttcttctctcatctcctctttgtctttttctcttttcctctccttcctgccttcttctgctggcctccttttctctttctttaccttccttggattatccttccaggttttcataataaatttatattttgtaaaaggattttgttgtaccaggttttgcatcctcactgaatctgactggctttattttcctctccaaaatcaggttttgttctcaacactttcccatcatgtctagtcactgttttggttttggcaccatcagtatcaaatgtacaaacggttcttgctaaccaacaccaggtatatctgatgttcagatgagttccaataaaaataatttttttttttttcaaaaggtgtctttttcttgagtgctggagggcttccaagcaagtccagacagctctgtgtggccccacactagtctagctctcatctggccaaagctgttatctcatttgtgtaatgggagtccttaaggtaaatttggggtccaaacttggagggctttgggggcaagaaagttggtgtgtgagttctgaggttggaaatgagttcaggtgtcttcttccaggggcagcatggtccagtgagcacatgtaagtttgggcagtagatcctctgagcctactttctcttctactcagtgaggatgctgctttctgggcaggtgattgtgatgtgaaggntagtaagtcatagacgtt

SEQ ID NO: 234 - DNA, 989 bp, Homo sapiens
gacctctctgcccccatttccactcctgctcttgggacacaggagactggttagatgagagtagaaagtttatttttgaacacccaggtgtggggtggctgggcgagaccatctgatggctttgggagccaggccgcagggtttagcttggatctgttgagtaggagacccttaaacatggccaccctgagcttaagagctggtcttggattttgctttcttttgggattaaccgagtattttgtgggattccatttgatcccttaactggctgaccagctataactcctggttatgttgttttagtgttgctccaggtgtcgttggaggagaagttgaaggtacaaggagtttgcaggagggaaggtggcagttaatgagccttcctggtgggaccggatggtgagggcaggggcatctggcccagcgtggactcgggccatagatgggaagtggtcatttggaggtcaccatctctctgacaccctgaccatagcacctgcacccctgtgctgagctgccaggtccccggcaccagcgtctgtgcagctcaggtgttgctgagccgtggcctccgcagctctccatcaggatttctcaagcttcattatgaattatctctgtgtgagctcacaacggtgactgcagagtcccaggtcatctctcagatcttctgaatcaaacatatggtctgcagttgccgcgcatgtctttggccgattttctgacaatcaaagtgaagaagttctgagctacgggaagttgggttgaaggcatgatggggaaaacatgattagttgacagcttttcccagagagtttttagacaaactcaaccttggtaaccttctcagtgggcttatgataagaaccttcaatgtgccaaaaaataaaaaaagcagcactccaggtagttaatctttgtttaaaaaacccttccccccacccagtcctgcaaacaaacaaacaaacaaaaaaaaaaaaaaaaaa

SEQ ID NO: 235 - DNA, 1861 bp, Homo sapiens
ggcacgagcttctttggtttaatgcaggatcaccagactctgtggcccaagacctgtttttgtgtagcccataagacatacctttctaagtactatagctgaaaaacatcaaaagagtagtaatattttgtgacatgtgaaaattatatgaaattcaaatttctgtctgtaaacctcactggaacacagccatgctcattcgtttgtatatggtctgtggctgctttctccctacaacggtagaattgaacagttgcatcagagaccttatggcctgctaggccagaaatgttaagccctttacagagaaagcttgctggctcctgtttaatgctttaactgccctactgaaaggcaggaggttgaaaaaatgatggtagtcaaaaggaatgcatgaaatcctgttatcttctgttagctgattgcaagtagtacacaggatatatttgagacatctcttttcctatctcccaccaaaggataattcaggcggatctcagtgcacaggcacaggcatttgcctcattcttgttttgtctgttttgaatttagttatgggaatattttaatatctctcaaaaatagggtatctggtgtgagtcagaatgattatagaacatgcttgcctggagaacaggaaatgcgggatccactcctggtgtgctgttagctgaaggacgtcagaactgtcctttaacctccctgcaggtctctaaatggtaggattgtttggggattacactagatcatctctaggcaccgttcagctcagtagagacattgctgcatggtggaaggagtgacctcagtgtgaatcctggttctgtccctttctgcccaggagaccttgagcagcttatctaaatgctgtgtgcctttgttagctcatctgaaaatgtggctgtaagaatgacctcatgagaatggactgagatcatattcttaaaactcttggcactaataggtatttaatctactataactgtgaaaattatgtctgtgaactcttttttttttttttttttgagacagagcaagactccgcctcaaaaaaaaaaaaaaaaagtaccttggggatttttctgtttttgtacttacaggcctatctcatactttttaatggctgcttagtatgccatagaatagagaaaacacagtttatttaactaatcctactaaatggacatttatttctaattttcactctaatagtcaaaaaatgaatttagaaaatgcaaataatttgtgtttttagggtctttcatttcttatttagttatataattattctagcttttaaaaaagcttattagggtgggaagtgcctcactgatactgtaatgttagaactacactgaaaactttgtttcagaagaaaaagttgaatgtaagttctctgtgactgcggacttcattagcattgtgtcttcagggctttctttttaggtatgattataaaccaaaagcactataagtggttacataattttcttacagtttgtatacctcattcaaaagaagcatacatctctaaggattagaactagaaccataagccaggtgtggtggctcacacttgtaatcccagcactttggtaggctgaggtgggaggatcatttgcacccaggagtcagagaccagcctgggtaacatagggagaccccatctctacaaaaaaaaaatacaaaaattagccgggcatgctggctcatggctgtggtcccagctacttgggaggctgcggtgggaggattgcttgagcctgggaggtcaaggctgcagtgagctgtgattgtgccactgcactccagcccaggtaatagagcgagaccctatctcaaaaaaaaaaaaaaaaaaaaa

SEQ ID NO: 236 - DNA, 1187 bp, Homo sapiens
gagatgggtctcctggtattagaaaggagagcagacgcctagagttctgacctcttgggcctcccctaaacaaaaagcatagccccttcactaccctagtaacaagtatgacctgttgcctgttgaggtcaggtgtacctgtgtgtctctctctgtgatgtatgtgggcttggtgtccacatcaatgtgcgtgaatactcctacccacagactgctactgtgccaatatagaggytcataagaaagataaaagagaaccagcagaaccccaggttctgcctctccttcctccctttgcccagataaaggtgtacagtgtttgtggtgaggctgctggacactgctgttttgggctttctagagagaatgcaaacatgcaaaaacagtgtggtagtgtaggcagaacaagatctagaatcagaagacctggagtcgaatctcagctccaacacccactggatgaacgtggacaagctgcttgatctctcagatcctcgatttcttcatctgtaagatggaaacaatatgtgtcttttctaaggggaaagatcaaatgacatcatgtatgtgaaaatgcttagaaatgggtgatgatgatgatgatgatactgattattagggtatctaataaagttggggaaagaacaaaatccccccctcacaccctattgcaccaccagccttctccctccctgctcaattatacccatgttatagggaaggaaatagggaagaaacttgtctaaggtcacatggatgttcgcaacaattgggatgcagaacttgatctgactcccaggccaggtttgattttgatttgcagtggcagagaggactaattttttactaggttctgagccctgtactgaactctggattgccctgtacttggtggtggtatacagttcagcagtttttagcatatacacgaatttgtgcagccayaaccactatctaattctagaacatttttatcacccccaaaagaaatcatgtacccatttgcagtcacttgccattccctcttctccccagccctgggaaaccactgacctaccttatatctctatgaatttgcctaatctggacatttcatataaatgcaattgtacatgtgaaaaaaaaaaaaaaaaaaactcgagggggggcccgagtacccaattggccctacgaagaggcgaacagag

SEQ ID NO: 237 - DNA, 1652 bp, Homo sapiens
gggcagcttctggggacagccacaaggagggtaccaggggtcccccgccgctgcctacagacatgcgccagatcagccaggactttagcgagctaagcacccagctgacgggtgtggcccgggacctgcaggaggagatgctgccaggaagctctgaggattggctggaacccccaggggcagttgggcgaccagccacagagccccccagggagggcacaaccgagggggatgaggaggatgccacggaggcatggcgcctgcaccagaagcatgtctttgtgctgagtgaggcagggaagcctgtgtactcccgctatgggtctgaggaggcactttccagcactatgggtgttatggtggccctggtgtccttcctggaggcagacaagaacgccatccgctccatccatgcagatggctacaaggtagtattcgtgcgccggagcccgctggtgctagtggcggtggctcgtacgcggcagtcggcacaagagctggcgcaggagctgctctacatctactaccagatcctaagccttcttaccggtgcgcagctgagccacatcttccagcagaagcagaactatgatttgcggcgcctactctcgggctcagagcgcatcaccgacaacctgctgcagctcatggcacgagaccccagcttcctgatgggggcggcacggtgcctgcccctggcggcggccgtgcgcgacactgtgagcgccagcctgcagcaggcgcgtgcgcgcagcctggtcttctccatcctgctggcccgcaaccagctcgtggcactcgtgcgccgaaaggaccaatttctgcaccccatcgacctgcacctgctcttcaacctcattagttcctcctcgtcctttcgcgagggcgaggcctggacgcccgtgtgcctgcccaaattcaacgcagccggcttcttccacgcacacatctcttacctagagcctgacactgacctctgcctgctgcttgtctccactgaccgtgaggacttctttgcagtctctgactgccgccgccgcttccaggagcgccttcgcaagcgcggagcccacctggccctgcgagaggcactgcgcacaccctactacagcgttgcccaagtgggcatccctgacctgcgtcacttcctctataagtcaaagagctcgggactcttcaccagccctgagattgaggccccatacaccagtgaagaggagcaggagcggctgctgggcctctaccagtacttgcacagtcgtgcccacaatgcctctcgcccactcaagaccatttactacacgggccccaacgagaacctcctggcctgggtgacaggcgcctttgagctctacatgtgttacagccccctggggaccaaggcgtcagccgtcagtgccatccataagctgatgcgctggatccgcaaagaggaagaccgcctcttcattctcacgcccctcacctattgatgggaatgtgtgcgggctcagccttcctggacacactaggtgtgggaagccataggagcctccagatgggggctggcctctcttgcccagccagcgggcagggactgtgggttggtgaatgcattaaagtgctttggggaagacaaaaaaaaaaaaaaaaaaaaaaaaaaaaaaaaaaaa

SEQ ID NO: 238 - DNA, 2069 bp, Homo sapiens
ggcacgagaggaggccaacttactgcttcctgaactgggcagtgccttctatgacatggccaggtgagttcaaccagcaaggccaggagggaggtgggaggaggtcagagggaaagggcatctgtgtggacagtcaccaggccctgctcccaacccctgcccttcttggcctcagccaagaaaaggagatacaggtatggttaacaaggaaaatgactcactgctccaaatcccagatgccttcaggtaatccctacccctatcttatcaatgcactcagaggtcctgcctttaactggcttctatgttgttctagcaccatcttctgcagagcccaaattgccctgcttcccctctctcctgcctctaccccttccccaaccaccaggtaggtacctagggtcctccggggaggaagggaggtgaccatggcccccagggataggagcagagagaagactgggatccagcatccatctggctacaactgaaatgctttccctcttccctgacttccctgggtaacccttagggaagggaacctatagaggtgggggtttcaggtatcagattgtccccttctgccttcccttttattcccaggttcaagggggcaggcacagggaagagagatttgatcatctagtcccggttttgcctggatgtgagatgggctcagggcagggagggggtgatgctgtcatccttctcggctggagcaggaagatgaaggacgatgtcagactcattttcagcctcattaggcagcagacggagatggagggaggagagcaggaggctgggggatgggctctgcactgcagagaccagcagggactaaagaagagaggacatggggaactggaaaaataagccttccaggattgtggggagaaagacgctgtgggagaggccaggatgctgcattaggcacaggataacctgggaacccaggcacatgggtcctgctctccgaagtctgcaagtcaagaagggaacagagcacgccgaccctctccctttcccctctgtctctcttagtggctttacagtgggtaccctgtcagaaaccagcactgggggccctgccacccccacatggaaggagtgtcctatctgtaaggagcgctttcctgctgagagtgacaaggatgccctggaggaccacatggatggacacttctttttcagcacccaggaccccttcacctttgagtgatcttactccctcgtacatgcacaaatacacactcatgcacacacacactcacacacatgcatacacttaggtttcatgcccattttctatcacactgggctccatgatattctgttccctaagaactgcttctgtgtgccctgttttcatcccaagatttctcacttcatcctctcctacctggctcttttgtcccagggaggggtcctgttcggaagcagtggctgaatttatcccctgaaagtggttttggaggaaccgggatggaggaggccttcccctgtgggaatagaatcgtccactcctagccctggttgcttctgatacacagccactgcacacacacactcacactcacactcccttgtctgatgccccaaagccaattcctggggcaccctaccctctcttatttggagtttccgttggtttacctgagttttctctggggtctgcacagaggcagcagcatggacatcatggcctctcaggtcccttttggttctcagtttcattggttcctctttctgttcccccattgacttctgtgccccaccctagccttttccataaccttaggtattcagtttggaggggttttttgtatttttgaggattcctgtattctgtatcctctcctcgcatctcctcacatggaaagaaataatgtatttgtgccttctgtgaggaatggggggaacaagtggtcccaggtatccccatttccaaggcccccctccctctccaggtccccccacagcaataaaagcttccccctgatatccatccctttgtagtttgaacaaatatatttatatgatatgtaaaaaaaaaaaaaaaaaaaaaaaaa

SEQ ID NO: 239 - DNA, 1105 bp, Homo sapiens
ggcacgagcaaaggttctttgtaatttgaagaaaaattttgttttagttatctgctaagagggcatgggtttctttgtacttctcttccctacgtccagattagcttaagcaatagaaggaactgaaaagagcagaaacagttaagtgttaattaagaagcacttacagtcttaagaagttactcggggacttaacgtaaagttctatgatacatgctattaggaacttattttaaggtgtaccttatattcaagtgtttttacattttcttatataaaagtaggaagatgcatttccatttacaaaaaagctgaccaaaagacataataaaaatcatctcatatgaccataaaccttttaaaattagaatttaaaagagtaactgtttttcagaggtattttggatactttggatagaatttcatgggtaaattctgtgcggagtatccaatggttttaaaaatctagaagagaaggattttccaaaagggtaccagccctgccctccaggatatggtggccaggatatggtgggttggccaaattatccattaggctccaaattccttaaaacctggaattagttttttgggtttgttgccaaaagatttgaccagaggcagaactttcctttggaagaacaaagaacaggttttctgtagctgagtagggaagaggaaatagcaacattgactttactgagacactggaacttgaatagagtgtaagtgtaaaatattaagatgtatttaagaaaataattctcaaggctcgttgcatagagaagagggtaagggcttgggaatcttaaattaatggtcttttaccatcatacttaccgatgtgttccttgatacacacaattgtggacttatttttaaagtttacacactgttagcatttaatcttaggtcctatatctacagataggtatgaggctacatatctgccattgttagtcccaagaatgctctaaagcagggctgtcccaatgttttggcttccctgggccactttggaggaagaataattgtcttgggccacacaaaaattcgctaacacaaacaatatagctaatgaactttaaaaaaaaaaaaaaaaaaa

SEQ ID NO: 240 - DNA, 3342 bp, Homo sapiens
  misc_feature (2005)..(2005): n equals a,t,g, or c
gcggctgtgtgtcgccggagccgaagcgcgcaggcccgtcccggtggccggggagcgggcgggtgggggcgccatgtggttcatgtacctgctgagctggctgtcgctcttcatccaggtggccttcatcacgctggctgtcgcggctggactctattacctggcagaactgatagaagaatacacagtggccaccagcaggatcataaaatacatgatctggttctccaccgctgtactgattggcctctacgtctttgagcgcttccccaccagcatgattggagtgggcctattcaccaacctcgtctactttggcctcctccagaccttccccttcatcatgctgacctcgcctaacttcatcctgtcgtgtggactagtggtggtgaatcattacctagcatttcagttttttgcagaagaatattatcccttctcagaggtcctggcctatttcactttctgcctgtggataattccgtttgcgttttttgtgtcactttcggccggggagaacgtcctgccctctaccatgcagccaggagatgatgtcgtctccaattatttcaccaaaggcaagcggggcaaacgcttagggatcctggttgtcttctccttcatcaaagaggccattctacccagtcgtcagaagatatactgacccccatgcaggcaggatgtggggggcaagatcaggagagtcaggcccctgggcctctatgccaggtggggaccagaagtcgggaaggcacctaccacctgccctggctttcttcccctcaactctggagccccatccccaccctccttggggggctcagcttggctcagatctgatgcttcaagaggctgtaacctcagagggcaccaaggagggtggcagagcctgcttagccaggaggccgaggtccctcagtcctcccctgtcccttccaaggtgggtcaggaggttctggccccgctggggcaggcagggcagggtctgtgaagcttaagagcagatggtgacaagttctctgggcaggtggccatggggaggggccatggcttggcatgtccaacagaaatagtttttgctgttgaacggtgatttctgtccaagtgcagatttccgtttgaataaagcttcgcttctaggtggcactgtttgccttaataccctgacagttcatcttcctttcttcctgctaaccttctgctctggactggactcacttttctgctccagggactccttttctgggtttgggtcttgcccttcccaagggactgttcttgtggcccttaatgggaagggggcaggggtgaggagctgagcctgctcaaggagtgggaagtggggctataggcagcctctctgatgcactctcttccatctctttccccaaggctccgtgactgacaaactgggagtaggagaggggacaatttaggactgggctagattttcagaagaacatctacaatatcctatttataaatcttcctctgggaaaaggagtggtttctggctgaatactatcttaggctcaaggagaaacaaaataaaaattagcttccaggcagcctgtttttaaagaaatgggactaatgggagaagctgtttgtcactctaagagcatccaagccctggcccgtctgtgcactcttggctcctggggagatatatctgccttctaagaaggcaggccaggtcttgggcacagacctgcatttgttgaccttgcactccaactatagtgccttgcaagtgctcaacagtacatatttggaatgaagtccctatgagagccatttctggccatgttctatacctcaaagtgaggctggcaggtacagagatgaactgtacacatgtgatacatttaagccactggaaaaacccctgtgcttgamaatatttcctctatatcatgcctggagttccatcatagcccttcatttccttggctttagcatttaccttctcttaagaataccagctttcccctttccctgaganggaagagcacatgttggtctcctcttagtgtgaacgagattgccaggcccttttctcctatgcacaccaggatagacaaggcaggggatactggcagcctgcatcatcctcccattgggctgacagctggccctactttcctccctctgctgcttggtccctcaccttgatgatgtggcttcgccccctccactctactgccagtgttctcccaggggttgctaaatccagcagacccctttcctgtcttactagatctgggcagcatttgacatggctgatcaccccttgcttcttggatggcacttccctggcacctctgtggctagttgtcctacctccctggctgttcctttcaggcttccgtgcaggcttctccacttgcccatgcacagtagggtctttcagggttctgctgtgggctccctagggaagcccatccatctggatggtttcaaggatggtgaggaatttagagttgacctccagccccaacatccttcctgatcacctgaaccacagttttgctgccctctaggtgcacagacaattcaggtccatggcccagatggtacttgctgtcttctgcaaacctgccccttctgggtacttcccttgaccccgagatcactcaggagccagacaggaaacttattctattcctgttttctctttctgcccaccacatccaatctctcaaaacggtcaggtctaccttaacatctcttgatttgagccactcccactgtcatcagctttcacctggattatcgtgacagcctcctactgcttctctatcatgtggccagagctatcttcctaaaatgcattgcatagttgatcaagtcactctctggcctaaaaccttccttggctccctgctgccctcaggataaagtctggacccctcagcatggcttgtgagactcatggtgtccttgtccctgctcacctctctggtctcatcacttgccttcttgcattctgggtcccagcctcctgtatccagagatgcagtggctctccattgccactctgattcctcctttcttttggtcacagagaaagggtactttctctgtcaaatctcaacttagacttgacttcctccaaggagctttggctatactctctcctcccgacccccaccctggcatactacacagatcactctgggctcacttgcctgcctaatggtcatctccccagtagactgtaagctccttgagggcaaggattgtgttggaatttttgtattaacagtgcctggcttggtgcctggcacctagaaagcactcaataaatgtttgtttaatgaaaaaaaaaaaaaaaaaaaa

SEQ ID NO: 241 - DNA, 1008 bp, Homo sapiens
  misc_feature (21)..(21): n equals a,t,g, or c
  misc_feature (895)..(895): n equals a,t,g, or c
  misc_feature (928)..(928): n equals a,t,g, or c
  misc_feature (960)..(960): n equals a,t,g, or c
gaaaccgacctaaggggattntcccatttggcccgtcctaccctaaagtcaccacctgctgcttttttggagcgcttaccagtgaccaagaggaacagaacacagagcagcctggcagtgtccaagcaacaagcctccgctcctccttcctgcaccctggggctcctgaaactcacatgggtaaaaaagatacagtaaagacataaataccacatttgacaaatggaaaaaaaggagtgtccagaaaagagtagcagcagtgaggaagagctgccgagacgggtatacagggagctaccctgtgtttctgagaccctctgtgacatctcacattttttccaagaagatgatgagacagaggcagagccattattgttccgtgctgttcctgagtgtcaactatctrggggggacattcccagtgtatcagaagagcaggaatcttcagagggacaagattcaggagacatttgctcagaagagaatcaaatagtttcctcttatgcttctaaagtctgttttgagatcgargaagattataaaaatcgtcagtttctggggcctgaaggaaatgtggatgtygagttgattgataagagcacaaacagatacagcgtttggttccccactgctggctggtatctgtggtcagccacaggcctcggcttcctggtaagggatgaggtcacagtgacgattgcgtttggttcctggagtcagcacctggccctggacctgcagcaccatgaacagtggctggtgggcggcccyttgtttgatgtcactgcagagccagaggaggctgtcgccgaaatccacctcccccacttcatctccctccaagcaggtgaggtggacgtctcctggtttctcgttgcccattttaagaatgaanggatggtcctggagcatccagcccgggtggagnctttctatgctgtcctggaaaagccccagctnctctctgatgggcatcctggctgcggatcgccatgggactcggctctc

SEQ ID NO: 242 - DNA, 1054 bp, Homo sapiens
  misc_feature (89)..(89): n equals a,t,g, or c
  misc_feature (149)..(149): n equals a,t,g, or c
cgcaattaatgtgagttagcttcactcattaggcaccccaggcctttacactttatgcttccggctcgtatgttgtgtggaattgtgancggataacaatttcacacaggaaacagctatgaccatgattacgccaagctctaatacgnctcactatagggaaagctggtacgcctgcaggtaccggtccggaattcccgggtcgacccacgcgtccgagtgacactactgacttggctctaccacctgaaatgccgattttgattgatttccatgctctgaaagacatccttgggcccccgatgtatgaaatggaggtgattcattctttttatttctttttgctccagtcaatgaaaggaacactttattgaggccccagggccgtagggcctgggcaggaggctgccctttggggaaggaatagccttattcgaccttctttttgggacgcaggttgttggtgtggccgcacttcttgcagcagttgactgcatgggggcgcaggcgagcacagctcttgtggcacatcatcttcttgcagttgtatttctgggcaaggtggcagagggaaggctccgtaatgccacctcacaggcacagcatcaggcgcagggtggactctttctggatgttgtagtctaagagtgtgtggccatccttcagctgtttgccctcaaatatcagacactgctggtcaggtaagatgccctacctgtcttgaattttggctttgacattctcagtggcatcactgggctcgacctcaagggtgatggtctggcctgtgagggtcttcacaaagatccacatctcagcgtctgcagcttggccagtctcactccattctcatttttttgttggtactcactggtgtactcaggtggttgcttaacagagaagtaaaattggatgtttccagaggctgaattttgccttaagatggaamctttatttctaaaaaaaaaaaaaaaaaaaaaaaaagggcggccgctctagaggatccaagcttacgtacgcgtgcatgcgaagtcataactcgtctataggaatg

SEQ ID NO: 243 - DNA, 876 bp, Homo sapiens
cccgggtcgacccacgcgtccgcccacgcgtccgcggacgcgtgggcttctgttacatggagctcaatggacgtgcccaggaatgcttttggctgttattttgcagttaatacctcctgtaactaaagcatttgtttatgagttgacttgagagaagggctgatctcagagccgctttgagctaagttggattagtcacactaggaagttaattccacacctttcgtctaagtctcagtattgaggcctctccagttctcatgcaccctgatcttagggttagaatacttgaccctgatacctgcaccatgcttcatggttcctgagctctttctcctgtttcatttgagcctccaaactacatatttggtcatattgcctgcctaccccatgcctgctgcagaaatattcatccaggttaaccttgatatacacagagatggtcttggagaattgtgaatgtatgtactgtattgtcatcaaggatactgtcccttatttgaaggcatctaaagagaaactgttttcagatccaagtgctcagatctaaagcctctgcaacaagtcaggtggtggtcatgtttcccttctagttttggctgacaggaagctcagttcagtaccataactacagaacctgtcatctgtattttttgttctcaccccgtttttgttattttgtttctggttttttatattgaggtatgttttagatatagtttacaaaaataaaacgcacagattttaaaaaaaaaaaaaaaaaaaaaaaaaaaaaaaattaaaaaaaaaaaaaaaaaaaaaaaaaaaaaaaaaaaaaaaaaaaaaccaaaaaaaaaaaaaaaaaaaaaaaaaaaaaaaaaaaaaagggcggccgct

SEQ ID NO: 244 - DNA, 1827 bp, Homo sapiens
  misc_feature (601)..(601): n equals a,t,g, or c
  misc_feature (918)..(918): n equals a,t,g, or c
  misc_feature (1825)..(1825): n equals a,t,g, or c
gaattcggcacgagatttattattatttaactcctgcagtgagcaaatgtgagtaacatttgaatgaaaataaattttcagcttatttacatgaggtaataaacttgactttatcaagtaattgtgggagtggggaataaacctcatctggggatgggaaataaacaccactataaagaaaccactaagatttgaatgccttgcttgttttaagtttgttgatgcaggtattgcattgattatgcatcagggaactggaaaccaaggcattcgttcttttaagaaaatagattcttaagcataggagtctcatgttttaagaactatttctaagttcaactaagatcgagtttttctgtctctattggcaaktwtyaagaggcataaactttaaagaaaaagggaaaatgtgataaattaatggaatagactccataggcttttattccaacttttatatgatgcaagtctatgtgcttctgtctgactcacttatttctgtwatcaagatgaactagtgaagggaatttctctctcaatgctaaattaattacatgcattggggatagtcatccagagagagggaaggtgaccttctgangttgtcacycagwaaataattgcctgagctgagaatggcatgtgggtcacagaattggtgtttctggatttaggaaatacttcctattttttttccactcctgctggctaagccaagaatggcaaatatgtgttcatgctgctgcattcccttccaggcccataaggacgttggcaatccttcatagccttctcacaggcggaacctggattaatttaagaacccttttgtgcctggcttttcaggaagccagtaccaatcaattggtgctggcatgaagcatgaaactatttgccatctctgagttatgccagtanaattggcatgcttctggtttccatgcataccactacctttcatgggttttattgtgcacaaactttgcatgcctttagaatgatatacctacgcaggtatataatttgtcaccctgatccaaaaagggkaagawgccmagaccatagtgagcctcttattagaaagctcttggcttcagtttttgacacttccctgactctttatattcacgttatcataagctgccaaattcttgactctataaattgccctttaacagcttattaggaattccaactactgtattctagcaccaactacagcatattcagagcctctgcaattcctaaaagtacacttaaaccaaatacatgggccagcctgcatcttttaaaatacattttatgcctttacacttcgtattaagttgggtgagaattatgttttaatctacactctatcttgaattgtcttacattttattctgcttaccagggttcaggttcttatccaaaatgaagttaaatttttttctcttagatagttgcattcctgaagcaattagaacagcatgatcccttggtgtttattgacattctcatcattgtctcattggctttaggtttaacatgcctcatgatgacaacaacaaatgtaaagaagaaggagttaagagtccccagcatgtcatggctccaacactgaacttctacaccaacccctggatgtggtcaaagtgtagtcgaaaatatatcactgagtttttagagtaagacttgaacattcttttagcacaaacttctagtgcctggcctacatgtagtgaactaattgtgggaaagacaatatgaagtcaaacattccttttgagttatttttgttgacattccttggagaaggcaaaaaaaaaaaaaaaaaaaaactcgnag

SEQ ID NO: 245 - DNA, 1958 bp, Homo sapiens
  misc_feature (374)..(374): n equals a,t,g, or c
  misc_feature (377)..(377): n equals a,t,g, or c
  misc_feature (1244)..(1244): n equals a,t,g, or c
  misc_feature (1300)..(1300): n equals a,t,g, or c
  misc_feature (1311)..(1311): n equals a,t,g, or c
  misc_feature (1327)..(1327): n equals a,t,g, or c
aattcccgggtcgacccacgcgtccgcagctccctctctccctctggcccagtcccttccgcttgtgtccgggaagctgtgggcggtgatttaacatgactcacttgggggcataggcgctatgaagttcagtggctgggtgccaggtggcgccaatgacaccctttttctcagagcccgggctgaatggacacctccctcaaagccttccagacccagggttacggccgttcccagagacatgttcccgtgctgctgggcacacctgcagaggggagggaaggtcctgtgtttgctggtgctgctcgtcctctcacttcctaccgagcatcatgttgcaaacaaatgaccttggcaccaccgttttgcaaatngtnctttcttgggctttactttttggtctatgtgagcaaaatgaactgaagtcaaggtacgactcccaataacctgctgtgggatgagagggctttgtcattatgcatctgattagttatccacgcccagagctacactttctcgatgcttctcagctctgactctcacagggccagggagaaatttttgtgccccctaaatcatgtagttggatacaaaacattccctggaggcctaccattctcaaatccccgtgcagggctctgtggggtgcaacatgaaactcgctctaactccctacgtggaggacagacagacccatcctaactccaaagccagacacaagggacaaaggtaccaaaaaggtgcaaggtgcaagaatggacgacgctggtcttccaatttgctggaatatctgtgcggctagaatggtgtcttgtcagcatatatcaagcatcttgcccttgctctgtcctgcctggccacaaaggacactcagacaacaccggcctcataaatgctgcctggagaaaagcctagctaggtacggagggtcagggtatttcagaaaagagaaactgcttcagccaatgctcatgagatttaccagggaatagcaaacaagtctagtgcaagccagggttgggggagtgggagggtgattagcagagatcaatctagaaaggaggtcaaggttctgtaggtggggaaagagggtgcttgtgtattaaaacttgttttccagcagtttggagatttctcacagaactaaaaatagaactaccattcatcccagcaatcccattactaggtatatactcaaaggaaaacaaattgttctatcaaaaagacacctgtactcctatgtntatcgcagcactattcacaatagcaaagacatggagtaaacccaggtgcccatcancggtgaactgnataaagaaaatgtagncatatgcctaccatggaatactacgcagctgtaaagaggaaagaaatcatgtcctttgcaacaacatggatacagctggaggccattatgctaagtgaattaatgcagaaacagaaaactaaatatcacatgttcttatttgtaagcagaagctaaatattgggtgcacacaggcacaaagatgggagcaataaacactggggattccacaaagggagcaggcagagggaagggttgaaaaactacctatcaggtcctctgtgcactacttgtgagacagaatcattagaagcccaaacctcagcatcacacaatatacttatataacaaacctgcacattgacccctgaacctaaaaaaaaaaaaaaaaaaaaaaaaaaaaaaaaaaaaaaaaaaaaaaaggggggggggggggggaagaagtggggtgggacgacagtgaaatctagagtaaaatcaagctggcccaaggtgtcctgcaggctgtaatgcagtttaatcagagtgccatttttttttttgttcaaatgattttaattattggaatgcacaatttttttaatatgcaaataaaaagtttaaaaacttaaaaaaaaaaaaaaaaaaaaaaagggcggccgctctagaggat

SEQ ID NO: 246 - DNA, 781 bp, Homo sapiens
  misc_feature (34)..(34): n equals a,t,g, or c
  misc_feature (751)..(751): n equals a,t,g, or c
  misc_feature (762)..(762): n equals a,t,g, or c
  misc_feature (764)..(764): n equals a,t,g, or c
cccggaattcccgggtcgacccacgcgttcggcncagtgacagaggcacccagggctcagcaagctcatggcccagcttgttggactcagagggcagaagaatcacattctaaacatgataaggtatagccagcaggaggcagattcccagattgattctccagagccttgtaggtcccaagggtgcctatgacaccaatgggaatctgaaccaacacagacagcacagtcttcttaggagaccctagtgcagcagcgctggcctcctcctgagcgtgcacgcttatatggcttctgagctggccaggctacttcatgcatttggtttaatgggtcctcgtaaggcaggagaatcttcttgaacttggagttgggtctgtggtccattggtcagtactttgttcagaggcactgagggtgggaaggctcatggagctggattctgctgctgggaagctgggtgggccttgtttgtgggcctcaggttcaggactgaatgagagtcctcttgttgcgagttgagggtgtactctgggcatgccatgccctttttttgtactaagagggtagaaaagcaaagaccagactagttggcaaattggaacccaactacccagtttatttatttcttargcgtagaaggaataatttagggggaactgaagagccaacctaaaggaaaaaaaaaaaaaaagggcggccctatagaggatccctcgaggggcccaagcttacgcgtgcatgcgggcgngttacctcaantnaaatatagagagttccc

SEQ ID NO: 247 - DNA, 1007 bp, Homo sapiens
  misc_feature (995)..(995): n equals a,t,g, or c
cggcacgaggcatatgttcagctatatgttataaaaccagttttcaagtggttgtaccaatgtacactcccaccaacccagtatgcgagttctagtgctccacatacttgccaacatttggcattttccatcttttttactatagccattagtggtgggcatatagtgatatgtcagttttagttttcggttttattttcttgtcctccaaaccattgtagtatctccccaggatagatgagtgatggctgagacctgagacctaggcctgttcctcacatgactgcaccattttacattctatcaatgtatgaggtttccggtttctccacatccttaccaactcttattattattagtcttttttattatagctatcctagtacatgtgaagttatattgtgatattaatttacactgccctaatgattaataatattgatcatcttttattgagaatctttgatgaartgtctgtttaaatcttttgcccattatcagttgggttatttgggtttttttattgttgagcactgatagtttttaaaaatatattctgggtgtaacttcactatcagtccattatccttgcaaaggttttctcccagtctctggattgtcttttcattctcttaagagtgtcttttgaagaacagaactgcttattttgatgaagtccgttctttccatttgttcatttctgggttgtgctttgagtgctgtatctaagaaatccttgcctaaccaaagattacaatgattttttcctgtgttttcttctaaaggtttaagttttacatctagatctagcatgtattttgagttatatggtgtgaaatatggatccaagttcttttatgtttttgttttgttttgttttgtttttgcttatggatattcaaatgtttccacaccatttgtttaaaaatactaccctttctcaataaaaaaaaaaaaaaaagggcggccgctctagaggatccaagcttacgtangcgtgcatgcga

SEQ ID NO: 248 - DNA, 1982 bp, Homo sapiens
  misc_feature (35)..(35): n equals a,t,g, or c
cggacgcgtgggcgagcccgggcgccggcgggcgnccgtcgcgtctgacagaccactgcagaccacgggccgaggcccagcgcccgtccgcagcgcgsscggcatggcggcgacaaggagccccacgcgggcaagggagcgggagcggtctggcgctsccgccgcaggaagtgaccaagttcactcctggatgctagctacaagccaagccttagacactgtctggagaatggcaaaaggctttgtgatgttggcagtttcatttctggtggctgccatctgctacttccggaggctacatttatattcagggcacaagctgaaatggtggattggatatctgcagagaaaattcaaaaggaacctcagtgtggaggcagaggttgatttactcagttattgtgcaagagaatggaaaggagagacaccccgtaacaagctgatgaggaaggcttatgaggagctattttggcggcatcacattaaatgtgttcgacaagtaaggagagataactatgatgctctcagatcagtgttatttcagatattcagccagggcatctcttttccatcatggatgaaagaaaaggacattgttaagcttcctgaaaaactgctgttttcacaaggttgtaattggattcagcagtacagttttggtcctgagaagtatacaggctcgaatgtgtttggaaaactacggaaatatgtggaattattgaaaacacagtggactgaatttaatggcattagagattatcacaagagaggaagtatgtgcaacacccttttttcagatgccattctggaatataaactttatgaagctttaaagttcatcatgctgtatcaagtcactgaagtttatgaacaaatgaagactaaaaaggtcattcccagtctttttagactcctgttttccagggagacatcctctgatcctttgagcttcatgatgaatcacctgaattctgtaggcgacacatgtggactagagcagattgatatgtttatacttggatactcccttgaagtaaagataaaagtgttcagactgttcaagtttaactccagagactttgaagtctgctacccagaggagcctctcagggactggccggagatctccctgctgaccgagaacgaccgccactaccacattccagtcttttaagtccgctgggggccgaacagcagtgctcaccagtgacggtggtcacagttgcaataaagtctctctctgaaaccaaagctagcatttcagcatggaaggaattaggaccttttcttcaggattacaggtacactggatgcagccatgcatggatggtttttctttatttttcagtgatttcctctgaagcagctgcactgatacatttgggagttggtggcttgactttgtccataaggggcgtggccacttcacatgatggcgggcctttaagagcacaaagaagtttaatatggacaacaacaggaaaaagcaagaagaaaacaagtagggaaaaacagctaacctggagagaaagaatttctttaacctttatgttcttcattaaaaatcttatcttggactgatttgagggatttttagaaacatggccttattttatataagcattaccttcccaggaatctttgttgtatattaatttttgataaccatttgattaactttaaaattaagtatatgtgtgtatatatacatatgtatgtttatatacacacatgtatctgtatagttttatatatacatatatacacatagacatacagagaaccactactttgtaatagtgtacagtttgttttatatctctttactttttttgttactattttatctggccagcgtaatagttttatttagattttttaaaattctgtagattaaagcaaatgacagttattgaactatcacaaaactattaaactgtggtacatttaaaaaaaaaaaaaaaaaaaaaaaaaaactcgag

SEQ ID NO: 249 - DNA, 1478 bp, Homo sapiens
  misc_feature (1385)..(1385): n equals a,t,g, or c
  misc_feature (1390)..(1390): n equals a,t,g, or c
  misc_feature (1468)..(1468): n equals a,t,g, or c
gctggaggtccttctttctgccacagtcagctttcgttgaagctgttttgatgatgagctcccagcttcagagtcaggacccaagcggggctccamgaaaggcctgggcgacccagccactgggcctaagcctgacctgctgcacccctgcctccctccacagttgccgaggtactgtctgaatgccgcctgctcgcctacatatcccaggtgcccacgcagatgtccttcctcttccgcctcatcaacatcatccacgtgcagacgctgacccaggagaacgtcagctgcctcaacaccagcctggtgatcctgatgctggcccgacggaaagagcggctgcccctgtacctgcggctgctgcagcggatggagcacagcaagaagtaccccggcttcctgctcaacaacttccacaacctgctgcgcttctggcagcagcactacctgcacaaggacaaggacagcacctgcctagagaacagctcctgcatcagcttctcatactggaaggagacagtgtccatcctgttgaacccggaccggcagtcaccctctgctctcgttagctacattgaggagccctacatggacatagacagggacttcactgaggagtgaccttgggccaggcctcgggaggctgctgggccagtgtgggtgagcgtgggtacgatgccacacgccctgccctgttcccgttcctccctgctgctctctgcctgccccaggtctttgggtacaggcttggtgggagggaagtcctagaagcccttggtccccctgggtctgagggccctaggtcatggagagcctcagtccccataatgaggacagggtaccatgcccacctttccttcagaaccctggggcccagggccacccagaggtaagaggacatttagcattagctctgtgtgagctcctgccggtttcttggctgtcagtcagtcccagagtggggaggaagatatgggtgacccccaccccccatctgtgagccaagcctcccttgtccctggcctttggacccaggcaaaggcttctgagccctgggcaggggtggtgggtaccagagaatgctgccttcccccaagcctgcccctctgcctcattttcctgtagctcctctggttctgtttgctcattggcygctgtgttcatccaagggggttctcccagaagtgaggggcctttccctccatcccttgrggcacggggcagctgtgcctgccctgcctctgcctgaggcagccgctcctgcctgagcctggacatggggcccttccttgtgttgccaatttattaacagcaaataaaccaattaaatggagactattaaataactttattttaaaaatgaaaaaaaaaaaaaaggcgggcgntctanaggaaccaagttacgtacgcgtgcatgcgacgcatactcttctatagggcacctaaatcaattactggccgccgttanaacgtctgat

SEQ ID NO: 250 - DNA, 3034 bp, Homo sapiens
  misc_feature (5)..(5): n equals a,t,g, or c
aaggntaccgtccctcccctcccaagtgctgagccactgcgctcggccagcgtaaatttcttctaaagatacattttagctattaaaaaaatctattttagctatagctacagcttttagctatcagtagctatagataaaaataactatattctaatatggcttaaatggagatatgaccctctcattgatattttcctatgtgtaattatttttgaagcattgtgagttctgtgaaattttgctatttattgaactatgaaagcacttgattttcttaactcttgagtgccagaaatttgggaagaatattcctgaggattagacaaataatgataccttgtgtatatacatggtgttggaatgtctacatttcccttaagggcatcaattccataagttggtctacagataacttcacattagttgaccattgtttaacaatgctttaaagttacatttgcataagaatccaacttgatttttctaggaaaagttaaggaaaagaaccgaagaacctgatcgtgatgagcgtctaaaaaaggagaagcaagaaagagaagaaagagaaaaagaacgggagagagaaagggaagaaagagaaaggaaaagacgaagggaagaggaagaaagagaaaaagaaagggctcgtgacagagaaagaagaaagagaagtcgttcacgaagtagacactcaagccgaacatcagacagaagatgcagcaggtctcgggaccacaaaaggtcacgaagtagagaaagaaggcggagcagaagtagagatcgacgaagaagcagaagccatgatcgatcagaaagaaaacacagatctcgaagtcgggatcgaagaagatcaaaaagccgggatcgaaagtcatataagcacaggagcaaaagtcgggacagagaacaagatagaaaatccaaggagaaagaaaagaggggatctgatgataaaaaaagtagtgtgaagtccggtagtcgagaaaagcagagtgaagacacaaacactgaatcgaaggaaagtgrtactaagaatgaggtcaatgggaccagtgaagacattaaatctgaagtgcagctktaagtatgcacagatgaagatggaactaagccgagtaagaagacatacaaaagcctcttctgaaggaaaagacagtgtagtcctgcaaaacattttgaggtacattgttttgtctcagctattttgtagcagactcgtgcccccattagtgtgcctctttggaaattatcgcccacatttgtaatatagtcgccattgaaaagttaattatcctttttttagggattttgatgtcatttcttttttttttttaataaaaaggttgaactgtttttttttttctttttggtattaagtccatcttgtgttggtacattggcagagacatatgctttaaaaacttaaatatttcggaggcacatgttggactactttgttttaattaaactgctagtatttctttgtcaaggatgtttctagttttttgctttattgccttgcattctaatgcagtttgttctgtaactcgagagccagtagcattggattgatggaagtgtagggtttatgaattattgcagctgactaccatacctcacacagcgttggtgttgtgagcggcccatgaaaagccaaattaaaaatcaaggattcagtcaaactaagcaggtactcatgccaggtactcctttctctacccacatccatgtttgaatgctattgcctgtgatctttacgcttaactgttgtgtatcttttttgttctttacaagaagtgcagaggggttttttgtgtattgcgtgaaaacttataaaacaaatgttaacagaatggaattttttttcaactgtatgtagggctgcagtggtggccagaattagatatctttaaagaattttaaatacaataaacacttcatattattcgccttgttacactcaatgcaattctcaagtctataagaggtatgtgcttaatatttcctactgtgtaggagaatttgcagtcagccataggtatgtaggaatagtcactcactggctgatacatttaaagcagcagtgtgaatagcaaggacagacaccttcaatttgtgaaatcaaagaactgatgcactatatagaacgaatttgggtttttaaagaaatattaaaagttaggtactgtaagtgttcttaaaacctgtaaacttcattctgtgggctagtggtgtgggacaaaatattcctaatgaaaggaagtaccaattagttgatttgttggtggcattccccttttgggaaagcaatgtaaggttatgtctgtgtatgtcattcacacttaggcaagcatacacaggcacatggctttaagaaccacactgatgccttgataattaaaaagaatacaagcattccatgtacacatgttaattagcagttagtgactgggccaacactttctcataaaaattggccttttacatgttgtctaattatcatttttccccaaattttgcgttgtaggactactgttcgaagatttttggaagaatactgagaacggcataaagtgaagatcgacatttaaaaaatgaggtgaaagaaagctatagtggcatagaaaaagtataaagctcagttagtttttttattattattattattaaaagttaattcaggactgatgtgacctaccagatttcagaacatgtgttaatagtatatatgccactgaaaacttaggtcctgtatcatacttttttctttaagactttttaagaaatattacttaaacatgtggcttgctcagtgtttaattgcaagttttcaatcttggactttgaaaacaggattaaacgttagtattcgtgtgaatcagactaagtgggatttcatttttacaactctgctctacttagcctttggatttagaagtaaaaataaagtatctctgactttctgttaaaaaaaaaaaaaaaaaaaaaaaaaaaaaaaaaaaaaaaaaaaaaaaaaaaaaaaaaactcgag

SEQ ID NO: 251 - DNA, 1158 bp, Homo sapiens
  misc_feature (826)..(826): n equals a,t,g, or c
  misc_feature (842)..(842): n equals a,t,g, or c
caaggtcgccggtatcgataagctttgatatcgaattcaaccaatcactgttatcagggcagtcatccctttgtccagccatgctcctgtatcagagaagcactgccatgacagatattgggcaaactgatatatgacccccaatactgggtttggtgctcattctcgttaatgcatgtgttaagggtttcattctaatcatctgcaaaaaagtgattgttgtctttaaaatgttaccaaaactagtcttttagcaagaatcttactagaataaaatggctcttgctacctgtatttttaatcagcctatgtatattgatcccattcctgatattatcaccttaatatataacagccccaattcctcttattgagcattggttgctagggaaagcaaaaagttaagagaaaactactgagattttctctctaatttgcctctgtctgcctctaactagcttagagatcttggacaagtcctttaacagttctctgtcagctgcttggactgtgaaatagagataaaagtacctgtctawttcaggccgggcacggtggctcacgcctgtaatcccagcactttgggaggcccaggagggtgggtcacgaggtcaggagattgagaccatcctggctaatgcagtgaaaccccgtttctactaaaaatacaaaaaaattagccgggggtggtggtgggcacctgtagtcccagctacctgggaggctgaggcaggagaatggcatgaaacccggaggcggagcttgcagtgagccgagatcacgccacggcattgcagcctgagtgacagagtgagacyccstctcnaaaaaatwaaaccttnaaaaaaaaaaaaaaacaactgtctatttcatagaggtattgtgaggattaaatgagataatgttgatgaagtaattttgaaaagcatatcaatgtgcagctgtaaagttttattcatatttaccagccaggcaagtagtattagctgttataagtaaaggtaaacatccaagtgcatatgttcagatgattatttttaatatacattttctcctgatatatattcttctagttgcagatctgattggttgaattcgatatcaagcttatcgataccgtcgacctcgagggggggcccggtacccaattggccctag

SEQ ID NO: 252 - DNA, 3977 bp, Homo sapiens
gctcgtgccgctcgtgccgctcgtgccgctccttccagttgtcttgaacagcctgactcctgccagccctatggaagttccttttatgcattggaggaaaaacatgttggcttttctcttgacgtgggagaaattgaaaagaaggggaaggggaagaaaagaaggggaagaagatcaaagaagraaagaagaaggggaagaaaagaaggggaagaagatcaaaacccaccatgccccaggctcaacggcgtgctgatggaagtggaagagcctgaagtcttacaggactcactggatagatgttattcgactccgtcaatgtactttgaactacctgactcattccagcactacagaagtgtgttttactcatttgaggaacagcacatcagcttcgcccttkacgtggacaataggttttttactttgacggtgacaagtctccacctggtsttccagatgggagtcatattcccacaataagcagcccttastaakccgagagatgtcattcctgcaggcaggacctataggcacgtgaagatttgaatgaaastayagttccatttggaagcccagacataggatgggtcagtgggcatggctctattcctattctcaraccatgccagtggcaacctgtgctcagtctgaagacaatggacccacgttaggtgtgacacgttcacataactgtgcagcacatgccgggagtgatcagtcrgacattttaatttgaaccacgtatctctgggtagctacaaaattcctcagggatttcattttgcaggcatgtctctgagcttctatacctgctcaaggtcaktgtcatctttgtgtttagctcatccaaaggtgttaccctggtttcaatgaacctaacctcattctttgtgtcttcagtgttggcttgttttagctgatccatctgtaacacaggagggatccttggctgaggattgtatttcagaaccaccaactgctcttgacaattgttaacccgctaggctcctttggttagagaagccacagtccttcagcctccaattggtgtcagtacttaggaagaccacagctagatggacaaacagcattgggaggccttagccctgctcctctcaattccatcctgtagagaacaggagtcaggagccgctggcaggagacagcatgtcacccaggactctgccggtgcagaatatgaacaatgccatgttcttgcagaaaacgcttagcctgagtttcataggaggtaatcaccagacaactgcagaatgtrgarcactgagcaggacarctgacctgtctccttcacatagtccatatcaccacaaatcacacaacaaaaaggagargagatattttgggttcaaaaaaagtaaaaagataatgtagctgcatttctttagttattttgarccccaaatatttcctcatctttttgttgttgtcatkgatggtggtgacatggacttgtttatagaggacaggtcagctgtctggctcartgatctacattctgaagttgtctgaaaatgtcttcatgattaaattcagcctaaacgttttgccgggaacactgcagagacaatgctgtgagtttccaacctcagcccatctgcgggcagagaaggtctagtttgtccatcaccattatgatatcaggactggttacttggttaaggaggggtctaggagatctgtcccttttagagacaccttacttayaatgaagtacttgggaaagyggttttcaagagtataaatatcctgtattctaatgatcatcctctaaacattttatcatttattaatcctccctgcctgtgtctattattatattcatatctctacrctgcaaatttkgggtctcaatttttactgtgcctttgtttttactagtgtctgctgttgcaaaaagaagaaaacattctctgcctgagttttaatttttgtccaaagttaattttaatctatacaattaaaaccttttgcctatcactctggacttttggattgtttttcacattcagtgttataatatttgattatgctgattggttttggtgggtactgatgcgaattaataaaaacwtttcatttccatgtttattttgtaatctcttccacattgtaggctatgtttaccatacgtagcagaatgtgtttacatttcttggttctagtcatttgtattcttcgtgagtgtgagagtgtgtgtgtgtgtgtgtgtgtctgtgtgtgcctttggcatttaggaagggttgtatagctcatgttaaatattgcactaaaaatgtttttgatggttttcctccctttgaactagacacacttctaatattggtttatagttttaaattataactttcagcatcaaatatttccatacaacagtcaattacatgatgtgttttctttttctacctcctttacctgccacttctcataatagtatttgaacctaaacatataccggtgacattctgtgattatcatcttgcccctaccttggtttttggtttagatccacaatgaaatatattaacgctcatgagctattcaaaagtgaatgtcacagtcatcacttgctgagtggtactcatccttaacagagtcctcatgagggaatcaggtctcgctgagtttagcatgtttaataatcttttctcacggtctcgatacatggatcgcattactagatataaggtgcttgcccaaaatgatttttctggagtttttaggagayattgtcttccttgggggacatacatggtgtatgttctcattgtgggattckattttgttctaccaggacctctaatttctgccagttacttcaytcatttgttctcttcaccatgagtctccagaggatacttccatggtccgtgcctccccatctcccagcaattctgcatttccaagattggcacctctggtcctctgcacggtgaagccccttcctttcaattccccagtagccagtgctctaatccaccaggtctcaggcatgatctatgtttctccacactcgctttctgaggakagttttgcctgggttctatcatgaacaggccctccctgctgtcctggcctctatttgcatagtgtttcctgctccctctgccgtcgtgtggctcccagacctggctaaagaaaatcacctgagggccacagtgttccctagccctggtgtttagggcaggattatgggtgagatttttgagtctctaagttgacccctacrgctctgaagtgtatgttgagaaattcagctgttatcatcctaggtggacttgctccctcctatcctcctacttcaaatgcagaacttcaatcgtttacaaaagaagactgaatcgtataatagaacacacccttattcattggctggcttcaccaatctcatggctgaacttgtaaaaatacaatcttagccacatacctatgaaatgtatatgtgtgtrtatatatatacatgaatttgcttctgagattatggaggctgaaattcccaagatggaaggaaagctggatacccaggaaagcatttgtttcccattaggcctcttaattctctcctggcccttgattgattgcatgaggcccacccctattaaggagggcaatctgcttcacttagtctgcccatcccaatgttaatcgtatctgaaagactctctggaacacaaccagaatcatgtttggccaaatgtcctggcaccctggtgctcggtcacagtgacaagtacaagtaactatcacacatgccctttgtcatattggtgatttccactgtttttctcccaaactgcagcttatatttgttctcttartactgttgagcaaaaacttttaatttttataaagtcgaatttatcaatgttttctttaatggtttgtgtttattgataataaagaacactttrcctaaaaaaaaaaaaaaaaaactgcgaggggggcccggtacccaa

SEQ ID NO: 253 - DNA, 3179 bp, Homo sapiens
  misc_feature (49)..(49): n equals a,t,g, or c
  misc_feature (2993)..(2993): n equals a,t,g, or c
gctctctctctctctctctctctctctgctttcctcgcgagcctgcggntgggcttcttctcagaggaacgagaatgaatatgactcaagcccgggttctggtggctgcagtggtggggttggtggctgtcctgctctacgcctccatccacaagattgaggagggccatctggmtgtgtactwcaggggaggagctttactaactagccccagtggaccaggctatcatatcatgttgcctttcattactacgttcagatctgtgcagacaacactacaaactgatgaagttaaaaatgtgccttgtggaacaagtggtggggtcatgatctatattgaccgaatagaagtggttaatatgttggctccttatgcagtgtttgatatcgtgaggaactatactgcagattatgacaagaccttaatcttcaataaaatccaccatgagctgaaccagttctgcagtgcccacacacttcaggaagtttacattgaattgtttgatcaaatagatgaaaacctgaagcaagctctgcagaaagacttaaacctcatggccccaggtctcactatacaggctgtgcgtgttacaaaacccaaaatcccagaagccataagaagaaattttgagttaatggaggctgagaagacaaaactccttatagctgcacagaaacaaaaggttgtggaaaaagaagctgagacagagaggaaaaaggcagttatagaagcagagaagattgcacaagtggcaaaaattcggtttcagcagaaagtgatggaaaaagaaactgaaaagcgcatttctgaaatcgaagatgctgcattcctggcccgagagaaagcgaaagcagatgctgaatattatgctgcacacaaatatgccacctcaaacaagcacaagttgaccccggaatatctggagctcaaaaagtaccaggccattgcttctaacagtaagatctattttggcagcaacatccctaacatgttcgtggactcctcatgtgctttgaaatattcagatattaggactggaagagaaagctcactcccctctaaggaggctcttgaaccctctggagagaacgtcatccaaaacaaagagagcacaggttgatgcaagaggtggaaatgttctccatatcaagatgtggcccaaggggttaagtgggaacaatcattatacggactcttcagatttacagagaacttacacttcatctgttccacctctcctgcgatagtcctgggtgctccactgattggaggatagagccagctgtctgacacacaaatggtcttttcagccacagtcttatcaagtatcctatatgtattcctttctaaactgctactcatgaatgaggaaagtctgatgctaagatactgcctgcactggaatgttaaacactaaatatataacaagctgtgttttcctaagctgagatctgttgaataatgtttacattcgtcccccggggaaatgtatgctcagccaccattcaagagatgactgagaaggagatggtaagttcaagaagactgattgcacctgggacccaggccctttctttgggatccagtcccagccttcatccatgtgattaagatccaggccgctgaagttccccaggaaatgatcttccacttgagcaaccttttacttgatacgatttgcacctttctgttttcctgcagtcagggtggtggcctgcagggacctgagctttgctacccaaccagattcctcatagagattcctaatcactagtttcttgtattcataaactcagagatacagagggcttggtttgaagttggggtgagatgaaacctttgctctgagccaaagctctggggccttgcattccctgcattgggttgatgactgtcagcatcactgccgcagcatgcttgactaaggtacctggttttagccacagccacctccttgtatgttacctttcagctctggccaagagtgggacagggttttaaccacaaataggagcagcatgcaattcctagtgacttgctgcacagtattgtatcataattacaggaagtttttatttttaaaactggatctggggtatattcatttgccccatcacctctgtctaaaggcccaagtcctagggctgccatggtcacaagcacactgatgctccttaagattgtttatctggagcccacatagtgtggaacaaaaagtcacctagaaagcatccttggtcatcattgtctccttcccacctggcccagagatgcttaaatccaagttgtttctccagctgtcacctcccccaggagatcaggattccactgacgtcctgggcagccagtgaatttaattttccatgagaaacaacagagttaacctgtggcattaggagacctacttcatgtggaccctttttttccttcagtttaacttttctggagcagtgtgctgcgtagttcggcctgagtttgtgcagcttgttaagacaactcttgtgtacgctatgttgaagctcaacaaaaaagtcatgggaccacttctagaaatctttcagctgtcaggcctgtcagtctcatgacagtttgttggttgtgccaaacactttatttgggaaaggaaagcccagatttgaatgggtctttcccctgggccttatcctatagaggcatttgtaatatggagaaaataatttttcatttttgctcatttaattctataaattctctttataaatgaattttgtgttctttagttctccttaaaagaacttttgaattataaaaataaaatctttacctgtcgaattgttgctgcagatgattgttgtggaaaatctggatcattgacctctgtgctttcattcctagagatgttttatagttacatgagcaaaagctgttgccccaaagtgatggccctggaggcggggctgaggaacagggaaatgccgctgtgaagtcttaaagcacttctgcttaaactccnatgtgtgaggagtgtgcctccctgtgccctctcagctctgaggctggccgtctttcggggtgttccttttggcaaatatacactgtaatcttgagtctaaatttatatgttgaaatgctaccttttttaaaataagaaactaaataaaattattttactatcaaaaaaaaaaaaaaaaaactcgag

SEQ ID NO: 254 - DNA, 1411 bp, Homo sapiens
ggcacgagctgtaccaaggcttcagagtgagcagggggacatctggataggttagccagggccacagagagaagagctgcttacacctgaattgtttcacccttttcaagaacagggttgtccttctccccatctggatccttgggctagatctctgccgaggggctccgtcaagtcccgcaaggctagagaagggagccccacatcatttccactttcaaagagggaagatgctcgtcattcaaattacttctgttgatttccatggtatccccctgtccgtcccacaatctcttaccaggcgtcaatgcacatgcaggggatggaaagaggatgagccgatgagcagactttgcattaatcaaggagaaagaaaaagcagatggaaggaggtaggtagatggagaaagcaacagctccttttagcccttgatgacggccctgaaggcctgtctcttttagtgactcctctttgggtcctcttcccctacctctcagtgactaggttcctcatattaattccctgctgtgagtttggctccttgtgctgggcaattcagtcatcctcagaaagagcaaagttggtcttggaattaaggtgcaggtggggaaaaagaggactcagctagacacgaagaaaggctctcttcccagtctaagcccttctaccgtaaggggcattttatcaagacagccacccaactccccatcccatctcccctcctttgtagaaacagcatttgactcaccaagcctttctctccctttccgtgtgtcttgcttagtttctggattgagagaatttctatccttgctccctcgaactctaaaagagcttcttttgaaaactggggagtatcaggcctacctctacatgtgcaacagtgccaggattcaaaggaaaagctcattccagcctctgcctcttgggagatggttcagagtgccacatagggactgaaagagggtgtctgaatccttcaggaatgctttaagtgacattgttgaaaagagataaagaaaaggaaaacaatggaattgggtttctaaggtccctggaaatatcctgggggtctaattgagaaagaaaataagaggaaatttgaagactcacttcttccttcatctgaatccactcagatggcaactgatctctgtcccaaggaccctctaccccacccaattcataatcatctcagattagaaaaggcagaattccttcccattctcaaatcagcatttgggttaggggcccctaagttacgtgagcatgttagaaatgtgaccccaggcctcaagagagaggctctgccacatgagaggagataggaatcatgactgaaaggggattagcacagaacagagaaaactgatttgatagacaaatcaaatagaaaaaaaaaaaaaaaaa

SEQ ID NO: 255 - DNA, 687 bp, Homo sapiens
  misc_feature (675)..(675): n equals a,t,g, or c
gggtttctccacatccttaccaactcttattattattagtcttttttattatagctatcctagtacatgtgaagttatattgtgatattaatttacactgccctaatgattaataatattgatcatcttttattgagaatctttgatgaagtgtctgtttaaatcttttgcccattatcagttgggttatttgggtttttttattgttgagcactgatagtttttaaaaatatattctgggtgtaacttcactatcagtccattatccttgcaaaggttttctcccagtctctggattgtcttttcattctcttaagagtgtcttttgaagaacagaactgcttattttgatgaagtccgttctttccatttgttcatttctgggttgtgctttgagtgctgtatctaagaaatccttgcctaaccaaagattacaatgattttttcctgtgttttcttctaaaggtttaagttttacatctagatctagcatgtattttgagttatatggtgtgaaatatggatccaagttcttttatgtttttgttttgttttgttttgtttttgcttatggatattcaaatgtttccacaccatttgtttaaaaatactaccctttctcaataaaaaaaaaaaaaaaagggcggccgctctagaggatccaagcttacgtangcgtgcatgcga

SEQ ID NO: 256 - DNA, 1980 bp, Homo sapiens
  misc_feature (35)..(35): n equals a,t,g, or c
cggacgcgtgggcgagcccgggcgccggcgggcgnccgtcgcgtctgacagaccactgcagaccacgggccgaggcccagcgcccgtccgcagcgcggcggcatggcggcgacaaggagccccacgcgggcaagggagcgggacggtctggcgctcccgccgcaggaagtgaccaagttcactcctggatgctagctacaagccaagccttagacactgtctggagaatggcaaaaggctttgtgatgttggcagtttcatttctggtggctgccatctgctacttccggaggctacatttatattcagggcacaagctgaaatggtggattggatatctgcagagaaaattcaaaaggaacctcagtgtggaggcagaggttgatttactcagttattgtgcaagagaatggaaaggagagacaccccgtaacaagctgatgaggaaggcttatgaggagctattttggcggcatcacattaaatgtgttcgacaagtaaggagagataactatgatgctctcagatcagtgttatttcagatattcagccagggcatctcttttccatcatggatgaaagaaaaggacattgttaagcttcctgaaaaactgctgttttcacaaggttgtaattggattcagcagtacagttttggtcctgagaagtatacaggctcgaatgtgtttggaaaactacggaaatatgtggaattattgaaaacacagtggactgaatttaatggcattagagattatcacaagagaggaagtatgtgcaacacccttttttcagatgccattctggaatataaactttatgaagctttaaagttcatcatgctgtatcaagtcactgaagtttatgaacaaatgaagactaaaaaggtcattcccagtctttttagactcctgttttccagggagacatcctctgatcctttgagcttcatgatgaatcacctgaattctgtaggcgacacatgtggactagagcagattgatatgtttatacttggatactcccttgaagtaaagataaaagtgttcagactgttcaagtttaactccagagactttgaagtctgctacccagaggagcctctcagggactggccggagatctccctgctgaccgagaacgaccgccactaccacattccagtcttttaagtccgctgggggccgaacagcagtgctcaccagtgacggtggtcacagttgcaataaagtctctctctgaaaccaaagctagcatttcagcatggaaggaattaggaccttttcttcaggattacaggtacactggatgcagccatgcatggatggtttttctttatttttcagtgatttcctctgaagcagctgcactgatacatttgggagttggtggcttgactttgtccataaggggcgtggccacttcacatgatggcgggcctttaagagcacaaagaagtttaatatggacaacaacaggaaaaagcaagaagaaaacaagtagggaaaaacagctaacctggagagaaagaatttctttaacctttatgttcttcattaaaaatcttatcttggactgatttgagggatttttagaaacatggccttattttatataagcattaccttcccaggaatctttgttgtatattaatttttgataaccatttgattaactttaaaattaagtatatgtgtgtatatatacatatgtatgtttatatacacacatgtatctgtatagttttatatatacatatatacacatagacatacagagaaccactactttgtaatagtgtacagtttgttttatatctctttactttttttgttactattttatctggccagcgtaatagttttatttagattttttaaaattctgtagattaaagcaaatgacagttattgaactatcacaaaactattaaactgtggtacatttaaaaaaaaaaaaaaaaaaaaaaaaaaactcgta

SEQ ID NO: 257 - DNA, 1338 bp, Homo sapiens
ggcacgagggaagaggaaggtgctcagtcaggaaactggkgctgctgggggcccccttcccccagtcctatctcacctctgtgcagggagagctctgtgggtggcccgaggcctggggycactctsctccctgcctgatggctacccaggttcaccaggggccactggggctcccaccagcccctgaccctgtggrcctgtggcyttgcaggagaacgtcagctgcctcaacaccagcctggtgatcctgatgctggcccgacggaaagagcggctgcccctgtacctgcggctgctgcagcggatggagcacagcaagaagtaccccggcttcctgctcaacaacttccacaacctgctgcgcttctggcagcagcactacctgcacaaggacaaggacagcacctgcctagagaacagctcctgcatcagcttctcatactggaaggagacagtgtccatcctgttgaacccggaccggcagtcaccctctgctctcgttagctacattgaggagccctacatggacatagacagggacttcactgaggagtgaccttgggccaggcctcgggaggctgctgggccagtgtgggtgagcgtgggtacgatgccacacgccctgccctgttcccgttcctccctgctgctctctgcctgccccaggtctttgggtacaggcttggtgggagggaagtcctagaagcccttggtccccctgggtctgagggccctaggtcatggagagcctcagtccccataatgaggacagggtaccatgcccacctttccttcagaaccctggggcccagggccacccagaggtaagaggacatttagcattagctctgtgtgagctcctgccggtttcttggctgtcagtcagtcccagagtggggaggaagatatgggtgacccccaccccccatctgtgagccaagcctcccttgtccctggcctttggacccaggcaaaggcttctgagccctgggcaggggtggtgggtaccagagaatgctgccttcccccaagcctgcccctctgcctcattttcctgtagctcctctggttctgtttgctcattggcygctgtgttcatccaagggggttctcccagaagtgaggggcctttccctccatcccttggggcacggggcagctgtgcctgccctgcctytgcctgaggcagccgctcctgcctgagcctggacatggggcccttccttgtgttgccaatttattaacagcaaataaaccaattaaatggagactattaaataactttattttaaaaatgaaaaaaaaaaaaaaaaaaaaaaaaaaaaaaaaaaaaaaaaa

SEQ ID NO: 258 - DNA, 1663 bp, Homo sapiens
ggtattaagtccatcttgtgttggtacattggcagagacatatgctttaaaaacttaaatatttcggaggcacatgttggactactttgttttaattaaactgctagtatttctttgtcaaggatgtttctagttttttgctttattgccttgcattctaatgcagtttgttctgtaactcgagagccagtagcattggattgatggaagtgtagggtttatgaattattgcagctgactaccatacctcacacagcgttggtgttgtgagcggcccatgaaaagccaaattaaaaatcaaggattcagtcaaactaagcaggtactcatgccaggtactcctttctctacccacatccatgtttgaatgctattgcctgtgatctttacgcttaactgttgtgtatcttttttgttctttacaagaagtgcagaggggttttttgtgtattgcgtgaaaacttataaaacaaatgttaacagaatggaattttttttcaactgtatgtagggctgcagtggtggccagaattagatatctttaaagaattttaaatacaataaacacttcatattattcgccttgttacactcaatgcaattctcaagtctataagaggtatgtgcttaatatttcctactgtgtaggagaatttgcagtcagccataggtatgtaggaatagtcactcactggctgatacatttaaagcagcagtgtgaatagcaaggacagacaccttcaatttgtgaaatcaaagaactgatgcactatatagaacgaatttgggtttttaaagaaatattaaaagttaggtactgtaagtgttcttaaaacctgtaaacttcattctgtgggctagtggtgtgggacaaaatattcctaatgaaaggaagtaccaattagttgatttgttggtggcattccccttttgggaaagcaatgtaaggttatgtctgtgtatgtcattcacacttaggcaagcatacacaggcacatggctttaagaaccacactgatgccttgataattaaaaagaatacaagcattccatgtacacatgttaattagcagttagtgactgggccaacactttctcataaaaattggccttttacatgttgtctaattatcatttttccccaaattttgcgttgtaggactactgttcgaagatttttggaagaatactgagaacggcataaagtgaagatcgacatttaaaaaatgaggtgaaagaaagctatagtggcatagaaaaagtataaagctcagttagtttttttattattattattattaaaagttaattcaggactgatgtgacctaccagatttcagaacatgtgttaatagtatatatgccactgaaaacttaggtcctgtatcatacttttttctttaagactttttaagaaatattacttaaacatgtggcttgctcagtgtttaattgcaagttttcaatcttggactttgaaaacaggattaaacgttagtattcgtgtgaatcagactaagtgggatttcatttttacaactctgctctacttagcctttggatttagaagtaaaaataaagtatctctgactttctgttaaaaaaaaaaaaaaaaaaaaaaaaaaaaaaaaaaaaaaaaaaaaaaaaaaaaaaaaaactcgag

SEQ ID NO: 259 - DNA, 1157 bp, Homo sapiens
  misc_feature (826)..(826): n equals a,t,g, or c
caaggtcgccggtatcgataagctttgatatcgaattcaaccaatcactgttatcagggcagtcatccctttgtccagccatgctcctgtatcagagaagcactgccatgacagatattgggcaaactgatatatgacccccaatactgggtttggtgctcattctcgttaatgcatgtgttaagggtttcattctaatcatctgcaaaaaagtgattgttgtctttaaaatgttaccaaaactagtcttttagcaagaatcttactagaataaaatggctcttgctacctgtatttttaatcagcctatgtatattgatcccattcctgatattatcaccttaatatataacagccccaattcctcttattgagcattggttgctagggaaagcaaaaagttaagagaaaactactgagattttctctctaatttgcctctgtctgcctctaactagcttagagatcttggacaagtcctttaacagttctctgtcagctgcttggactgtgaaatagagataaaagtacctgtctawttcaggccgggcacggtggctcacgcctgtaatcccagcactttgggaggcccaggagggtgggtcacgaggtcaggagattgagaccatcctggctaatgcagtgaaaccccgtttctactaaaaatacaaaaaaattagccgggggtggtggtgggcacctgtagtcccagctacctgggaggctgaggcaggagaatggcatgaaacccggaggcggagcttgcagtgagccgagatcacgccacggcattgcagcctgagtgacagagtgagacyccstctcnaaaaaataaacctttaaaaaaaaaaaaaaacaactgtctatttcatagaggtattgtgaggattaaatgagataatgttgatgaagtaattttgaaaagcatatcaatgtgcagctgtaaagttttattcatatttaccagccaggcaagtagtattagctgttataagtaaaggtaaacatccaagtgcatatgttcagatgattatttttaatatacattttctcctgatatatattcttctagttgcagatctgattggttgaattcgatatcaagcttatcgataccgtcgacctcgagggggggcccggtacccaattggccctag

SEQ ID NO: 260 - DNA, 1995 bp, Homo sapiens
gaattcggcacgagtcactctggacttttggattgtttttcacattcagtgttataatatttgattatgctgattggttttggtgggtactgatgcgaattaataaaaacttttcatttccatgtttattttgtaatctcttccacattgtaggctatgtttaccatacgtagcagaatgtgtttacatttcttggttctagtcatttgtattcttcgtgagtgtgagagtgtgtgtgtgtgtgtgtgtgtctgtgtgtgcctttggcatttaggaagggttgtatagctcatgttaaatattgcactaaaaatgtttttgatggttttcctccctttgaactagacacacttctaatatttggtttatagttttaaattataactttcagcatcaaatatttccatacaacagtcaattacatgatgtgttttctttttyctacctcctttacctgccacttctcataatagtatttgaacctaaacatataccggtgacattctgtgattatcatcttgcccctaccttggtttttggtttagatccacaatgaaatatattaacgctcatgagctattcaaaagtgaatgtcacagtcatcacttgctgagtggtactcatccttaacagagtcctcatgagggaatcaggtctcgctgagtttagcatgtttaataatcttttctcacggtctcgatacatggatcgcattactagatataaggtgcttgcccaaaatgatttttctggagtttttaggagayattgtcttccttgggggacatacatggtgtatgttctcattgtgggattckattttgttctaccaggacctctaatttctgccagttacttcaytcatttgttctcttcaccatgagtctccagaggatacttccatggtccgtgcctccccatctcccagcaattctgcatttccaagattggcacctctggtcctctgcacggtgaagccccttcctttcaattccccagtagccagtgctctaatccaccaggtctcaggcatgatctatgtttctccacactcgctttctgaggakagttttgcctgggttctatcatgaacaggccctccctgctgtcctggcctctatttgcatagtgtttcctgctccctctgccgtcgtgtggctcccagacctggctaaagaaaatcacctgagggccacagtgttccctagccctggtgtttagggcaggattatgggtgagatttttgagtctctaagttgacccctacrgctctgaagtgtatgttgagaaattcagctgttatcatcctaggtggacttgctccctcctatcctcctacttcaaatgcagaacttcaatcgtttacaaaagaagactgaatcgtataatagaacacacccttattcattggctggcttcaccaatctcatggctgaacttgtaaaaatacaatcttagccacatacctatgaaatgtatatgtgtgtrtatatatatacatgaatttgcttctgagattatggaggctgaaattcccaagatggaaggaaagctggatacccaggaaagcatttgtttcccattaggcctcttaattctctcctggcccttgattgattgcatgaggcccacccctattaaggagggcaatctgcttcacttagtctgcccatcccaatgttaatcgtatctgaaagactctctggaacacaaccagaatcatgtttggccaaatgtcctggcaccctggtgctcggtcacagtgacaagtacaagtaactatcacacatgccctttgtcatattggtgatttccactgtttttctcccaaactgcagcttatatttgttctcttartactgttgagcaaaaacttttaatttttataaagtcgaatttatcaatgttttctttaatggtttgtgtttattgataataaagaacactttrcctaaaaaaaaaaaaaaaaaactgcgaggggggcccggtacccaa

SEQ ID NO: 261 - DNA, 4102 bp, Homo sapiens
  misc_feature (1992)..(1992): n equals a,t,g, or c
agacagtaccttggcttggctcttgacgtggacagaattaaaaaggaccaggaagaggaagaagaccaaggcccaccatgccccakgctcagcagggagctgctggaggyagtagagcctgaagtcttgcaggactcactggatagatgttattcaactccttccagttgtcttgaacagcctgactcctgccwgccctatggaagttccttttatgcattggaggaaaaacatgttggcttttctcttgacgtgggagaaattgaaaagaaggggaaggggaagaaaagaaggggaagaagatcaaagaagraaagaagaaggggaagaaaagaaggggaagaagatcaaaacccaccatgccccaggctcaacggcgtgctgatggaagtggaagagcctgaagtcttacaggactcactggatagatgttattcgactccgtcaatgtactttgaactacctgactcattccagcactacagaagtgtgttttactcatttgaggaacagcacatcagcttcgcccttkacgtggacaataggttttttactttgacggtgacaagtctccacctggtsttccagatgggagtcatattcccacaataagcagcccttastaakccgagagatgtcattcctgcaggcaggacctataggcamgtgaagatttgaatgaaastayagttccatttggaagcccagacataggatgggtcagtgggcatggctctattcctattctcaraccatgccagtggcaacctgtgctcagtctgaagacaatggacccacgttaggtgtgacacgttcacataactgtgcagcacatgccgggagtgatcagtcrgacattttaatttgaaccacgtatctctgggtagctacaaaattcctcagggatttcattttgcaggcatgtctctgagcttctatacctgctcaaggtcaktgtcatctttgtgtttagctcatccaaaggtgttaccctggtttcaatgaacctaacctcattctttgtgtcttcagtgttggcttgttttagctgatccatctgtaacacaggagggatccttggctgaggattgtatttcagaaccaccaactgctcttgacaattgttaacccgctaggctcctttggttagagaagccacagtccttcagcctccaattggtgtcagtacttaggaagaccacagctagatggacaaacagcattgggaggccttagccctgctcctctcaattccatcctgtagagaacaggagtcaggagccgctggcaggagacagcatgtcacccaggactctgccggtgcagaatatgaacaatgccatgttcttgcagaaaacgcttagcctgagtttcataggaggtaatcaccagacaactgcagaatgtrgarcactgagcaggacarctgacctgtctccttcacatagtccatrtcaccacaaatcacacaacaaaaaggagargagatattttgggttcaaaaaaagtaaaaagataatgtagctgcatttctttagttattttgarccccaaatatttcctcatctttttgttgttgtcatkgatggtggtgacatggacttgtttatagaggacaggtcagctgtctggctcartgatctacattctgaagttgtctgaaaatgtcttcatgattaaattcagcctaaacgttttgccgggaacactgcagagacaatgctgtgagtttccaacctcagcccatctgcgggcagagaaggtctagtttgtccatcaccattatgatatcaggactggttacttggttaaggaggggtctaggagatctgtcccttttagagacaccttacttataatgaagtacttgggaaagyggttttcaagagtataaatatcctgtattctaatgatcatcctctaaacattttatcatttattaatcctccctgcctgtgtctattattatattcatatctctacrctgcaaantttgggtctcaatttttactgtgcctttgtttttactagtgtctgctgttgcaaaaagaagaacattctctgcctgagttttaatttttgtccaaagttaattttaatctatacaattaaaaccttttgcctatcactctggacttttggattgtttttyacattcagtgttataatatttgattatgctgattggttttggtgggtactgatgcgaattaataaaaacwtttcatttccatgtttattttgtaatctcttccacattgtaggctatgtttaccatacgtagcagaatgtgtttacatttcttggttctagtcatttgtattcttcgtgagtgtgagagtgtgtgtgtgtgtgtgtgtgtctgtgtgtgcctttggcatttaggaagggttgtatagctcatgttaaatattgcactaaaaatgtttttgatggttttcctccctttgaactagacacacttctaatattggtttatagttttaaattataactttcagcatcaaatatttccatacaacagtcaattacatgatgtgttttctttttctacctcctttacctgccacttctcataatagtatttgaacctaaacatataccggtgacattctgtgattatcatcttgcccctaccttggtttttggtttagatccacaatgaaatatattaacgctcatgagctattcaaaagtgaatgtcacagtcatcacttgctgagtggtactcatccttaacagagtcctcatgagggaatcaggtctcgctgagtttagcatgtttaataatcttttctcacggtctcgatacatggatcgcattactagatataaggtgcttgcccaaaatgatttttctggagtttttaggagayattgtcttccttgggggacatacatggtgtatgttctcattgtgggattckattttgttctaccaggacctctaatttctgccagttacttcaytcatttgttctcttcaccatgagtctccagaggatacttccatggtccgtgcctccccatctcccagcaattctgcatttccaagattggcacctctggtcctctgcacggtgaagccccttcctttcaattccccagtagccagtgctctaatccaccaggtctcaggcatgatctatgtttctccacactcgctttctgaggakagttttgcctgggttctatcatgaacaggccctccctgctgtcctggcctctatttgcatagtgtttcctgctccctctgccgtcgtgtggctcccagacctggctaaagaaaatcacctgagggccacagtgttccctagccctggtgtttagggcaggattatgggtgagatttttgagtctctaagttgacccctacrgctctgaagtgtatgttgagaaattcagctgttatcatcctaggtggacttgctccctcctatcctcctacttcaaatgcagaacttcaatcgtttacaaaagaagactgaatcgtataatagaacacacccttattcattggctggcttcaccaatctcatggctgaacttgtaaaaatacaatcttagccacatacctatgaaatgtatatgtgtgtrtatatatatacatgaatttgcttctgagattatggaggctgaaattcccaagatggaaggaaagctggatacccaggaaagcatttgtttcccattaggcctcttaattctctcctggcccttgattgattgcatgaggcccacccctattaaggagggcaatctgcttcacttagtctgcccatcccaatgttaatcgtatctgaaagactctctggaacacaaccagaatcatgtttggccaaatgtcctggcaccctggtgctcggtcacagtgacaagtacaagtaactatcacacatgccctttgtcatattggtgatttccactgtttttctcccaaactgcagcttatatttgttctcttartactgttgagcaaaaacttaatttttataaagtcgaatttatcaatgttttctttaatggtttgtgtttattgataataaagaacactttrcctaaaaaaaaaaaaaaaaaactgcgaggggggcccggtacccaa

SEQ ID NO: 262 - DNA, 4907 bp, Homo sapiens
  misc_feature (2797)..(2797): n equals a,t,g, or c
ttcgactccttcaggttatcttgaactgcctgacttaggccagccctacagcagtgctgtttactcattggaggaacagtaccttggcttggctcttgacgtggacagaaytaaaaaggacsaagaagrggaagaagaycaarrcccaccatgccccaggctcagcagggagctgctggaggtagtagagcctgaagtcttgcaggactcactggatagatgttattcaactccttccagttgtcttgaacagcctgactcctgccagccctatggaagttccttttatgcattggaggaaaaacatgttggcttttctcttgacgtgggagaaattgaaaagaaggggaaggggaagaaaagaaggggaagaagatcaaagaaggaaagaagaaggggaagaaaagaaggggaagaagatcaaaacccaccatgccccaggctcagcagggagctgctggatgagaaagggcctgaagtcttgcaggactcactggatagatgttattcaactccttcaggttgtcttgaactgactgactcatgccagccctacagaagtgccttttayrtattggagcaacagcgtgttggcttggctgttgacatggatgaaattgaaaagtaccaagaagtggaagaagaccaagacccatcatgccccaggctcagcagggagctgctggatgagaaagagcctgaagtcttgcaggactcactggatagatgttattcgactccttcaggttatcttgaactgcctgacttaggccagccctacagcagtgctgtttactcattggaggaacagtaccttggcttggctcttgacgtggacagaattaaaaaggaccaagaagaggaagaagaccaaggcccaccatgccccaggctcagcagggagctgctggaggtagtagagcctgaagtcttgcaggactcactggatagatgttattcaactccttccagttgtcttgaacagcctgactcctgccagccctatggaagttccttttatgcattggaggaaaaacatgttggcttttctcttgacgtgggagaaattgaaaagaaggggaaggggaagaaaagaaggggaagaagatcaaagaagraaagaagaaggggaagaaaagaaggggaagaagatcaaaacccaccatgccccaggctcaacggcgtgctgatggaagtggaagagcctgaagtcttacaggactcactggatagatgttattcgactccgtcaatgtactttgaactacctgactcattccagcactacagaagtgtgttttactcatttgaggaacagcacatcagcttcgcccttkacgtggacaataggttttttactttgacggtgacaagtctccacctggtsttccagatgggagtcatattcccacaataagcagcccttastaakccgagagatgtcattcctgcaggcaggacctataggcacgtgaagatttgaatgaaastayagttccatttggaagcccagacataggatgggtcagtgggcatggctctattcctattctcaraccatgccagtggcaacctgtgctcagtctgaagacaatggacccacgttaggtgtgacacgttcacataactgtgcagcacatgccgggagtgatcagtcrgacattttaatttgaaccacgtatctctgggtagctacaaaattcctcagggatttcattttgcaggcatgtctctgagcttctatacctgctcaaggtcaktgtcatctttgtgtttagctcatccaaaggtgttaccctggtttcaatgaacctaacctcattctttgtgtcttcagtgttggcttgttttagctgatccatctgtaacacaggagggatccttggctgaggattgtatttcagaaccaccaactgctcttgacaattgttaacccgctaggctcctttggttagagaagccacagtccttcagcctccaattggtgtcagtacttaggaagaccacagctagatggacaaacagcattgggaggccttagccctgctcctctcaattccatcctgtagagaacaggagtcaggagccgctggcaggagacagcatgtcacccaggactctgccggtgcagaatatgaacaatgccatgttcttgcagaaaacgcttagcctgagtttcataggaggtaatcaccagacaactgcagaatgtrgarcactgagcaggacarctgacctgtctccttcacatagtccatrtcaccacaaatcacacaacaaaaaggagargagatattttgggttcaaaaaaagtaaaaagataatgtagctgcatttctttagttattttgarccccaaatatttcctcatctttttgttgttgtcatkgatggtggtgacatggacttgtttatagaggacaggtcagctgtctggctcartgatctacattctgaagttgtctgaaaatgtcttcatgattaaattcagcctaaacgttttgccgggaacactgcagagacaatgctgtgagtttccaacctcagcccatctgcgggcagagaaggtctagtttgtccatcaccattatgatatcaggactggttacttggttaaggaggggtctaggagatctgtcccttttagagacaccttacttataatgaagtacttgggaaagyggttttcaagagtataaatatcctgtattctaatgatcatcctctaaacattttatcatttattaatcctccctgcctgtgtctattattatattcatatctctacrctgcaaantttgggtctcaatttttactgtgcctttgtttttactagtgtctgctgttgcaaaaagaagaacattctctgcctgagttttaatttttgtccaaagttaattttaatctatacaattaaaaccttttgcctatcactctggacttttggattgtttttyacattcagtgttataatatttgattatgctgattggttttggtgggtactgatgcgaattaataaaaacwtttcatttccatgtttattttgtaatctcttccacattgtaggctatgtttaccatacgtagcagaatgtgtttacatttcttggttctagtcatttgtattcttcgtgagtgtgagagtgtgtgtgtgtgtgtgtgtgtctgtgtgtgcctttggcatttaggaagggttgtatagctcatgttaaatattgcactaaaaatgtttttgatggttttcctccctttgaactagacacacttctaatattggtttatagttttaaattataactttcagcatcaaatatttccatacaacagtcaattacatgatgtgttttctttttctacctcctttacctgccacttctcataatagtatttgaacctaaacatataccggtgacattctgtgattatcatcttgcccctaccttggtttttggtttagatccacaatgaaatatattaacgctcatgagctattcaaaagtgaatgtcacagtcatcacttgctgagtggtactcatccttaacagagtcctcatgagggaatcaggtctcgctgagtttagcatgtttaataatcttttctcacggtctcgatacatggatcgcattactagatataaggtgcttgcccaaaatgatttttctggagtttttaggagayattgtcttccttgggggacatacatggtgtatgttctcattgtgggattckattttgttctaccaggacctctaatttctgccagttacttcaytcatttgttctcttcaccatgagtctccagaggatacttccatggtccgtgcctccccatctcccagcaattctgcatttccaagattggcacctctggtcctctgcacggtgaagccccttcctttcaattccccagtagccagtgctctaatccaccaggtctcaggcatgatctatgtttctccacactcgctttctgaggakagttttgcctgggttctatcatgaacaggccctccctgctgtcctggcctctatttgcatagtgtttcctgctccctctgccgtcgtgtggctcccagacctggctaaagaaaatcacctgagggccacagtgttccctagccctggtgtttagggcaggattatgggtgagatttttgagtctctaagttgacccctacrgctctgaagtgtatgttgagaaattcagctgttatcatcctaggtggacttgctccctcctatcctcctacttcaaatgcagaacttcaatcgtttacaaaagaagactgaatcgtataatagaacacacccttattcattggctggcttcaccaatctcatggctgaacttgtaaaaatacaatcttagccacatacctatgaaatgtatatgtgtgtrtatatatatacatgaatttgcttctgagattatggaggctgaaattcccaagatggaaggaaagctggatacccaggaaagcatttgtttcccattaggcctcttaattctctcctggcccttgattgattgcatgaggcccacccctattaaggagggcaatctgcttcacttagtctgcccatcccaatgttaatcgtatctgaaagactctctggaacacaaccagaatcatgtttggccaaatgtcctggcaccctggtgctcggtcacagtgacaagtacaagtaactatcacacatgccctttgtcatattggtgatttccactgtttttctcccaaactgcagcttatatttgttctcttartactgttgagcaaaaacttaatttttataaagtcgaatttatcaatgttttctttaatggtttgtgtttattgataataaagaacactttrcctaaaaaaaaaaaaaaaaaactgcgaggggggcccggtacccaa

SEQ ID NO: 263 - DNA, 2908 bp, Homo sapiens
  misc_feature (2)..(2): n equals a,t,g, or c
tnttaggtgacactatagaaggtacgcctgcaggtaccggatccggaattcccgggtcgacccacgcgtccgcccasgmgtcmggccgctggcaggagacagcatgtcacccaggactctgccggtgcagaatatgaacaatgccatgttcttgcagaaaacgcttagcctgagtttcataggaggtaatcaccagacaactgcagaatgtrgaacactgagcaggacarctgacctgtctccttcacatagtccatrtcaccacaaatcacacaacaaaaaggagargagatattttgggttcaaaaaaagtaaaaagataatgtagctgcatttctttagttattttgarccccaaatatttcctcatctttttgttgttgtcatkgatggtggtgacatggacttgtttatagaggacaggtcagctgtctggctcartgatctacattctgaagttgtctgaaaatgtcttcatgattaaattcagcctaaacgttttgccgggaacactgcagagacaatgctgtgagtttccaacctcagcccatctgcgggcagagaaggtctagtttgtccatcaccattatgatatcaggactggttacttggttaaggaggggtctaggagatctgtcccttttagagacaccttacttayaatgaagtacttgggaaagyggttttcaagagtataaatatcctgtattctaatgatcatcctctaaacattttatcatttattaatcctccctgcctgtgtctattattatattcatatctctacrctgcaaatttkgggtctcaatttttactgtgcctttgtttttactagtgtctgctgttgcaaaaagaagaaaacattctctgcctgagttttaatttttgtccaaagttaattttaatctatacaattaaaaccttttgcctatcactctggacttttggattgtttttcacattcagtgttataatatttgattatgctgattggttttggtgggtactgatgcgaattaataaaaacwtttcatttccatgtttattttgtaatctcttccacattgtaggctatgtttaccatacgtagcagaatgtgtttacatttcttggttctagtcatttgtattcttcgtgagtgtgagagtgtgtgtgtgtgtgtgtgtgtctgtgtgtgcctttggcatttaggaagggttgtatagctcatgttaaatattgcactaaaaatgtttttgatggttttcctccctttgaactagacacacttctaatattggtttatagttttaaattataactttcagcatcaaatatttccatacaacagtcaattacatgatgtgttttctttttctacctcctttacctgccacttctcataatagtatttgaacctaaacatataccggtgacattctgtgattatcatcttgcccctaccttggtttttggtttagatccacaatgaaatatattaacgctcatgagctattcaaaagtgaatgtcacagtcatcacttgctgagtggtactcatccttaacagagtcctcatgagggaatcaggtctcgctgagtttagcatgtttaataatcttttctcacggtctcgatacatggatcgcattactagatataaggtgcttgcccaaaatgatttttctggagtttttaggagayattgtcttccttgggggacatacatggtgtatgttctcattgtgggattckattttgttctaccaggacctctaatttctgccagttacttcaytcatttgttctcttcaccatgagtctccagaggatacttccatggtccgtgcctccccatctcccagcaattctgcatttccaagattggcacctctggtcctctgcacggtgaagccccttcctttcaattccccagtagccagtgctctaatccaccaggtctcaggcatgatctatgtttctccacactcgctttctgaggakagttttgcctgggttctatcatgaacaggccctccctgctgtcctggcctctatttgcatagtgtttcctgctccctctgccgtcgtgtggctcccagacctggctaaagaaaatcacctgagggccacagtgttccctagccctggtgtttagggcaggattatgggtgagatttttgagtctctaagttgacccctacrgctctgaagtgtatgttgagaaattcagctgttatcatcctaggtggacttgctccctcctatcctcctacttcaaatgcagaacttcaatcgtttacaaaagaagactgaatcgtataatagaacacacccttattcattggctggcttcaccaatctcatggctgaacttgtaaaaatacaatcttagccacatacctatgaaatgtatatgtgtgtrtatatatatacatgaatttgcttctgagattatggaggctgaaattcccaagatggaaggaaagctggatacccaggaaagcatttgtttcccattaggcctcttaattctctcctggcccttgattgattgcatgaggcccacccctattaaggagggcaatctgcttcacttagtctgcccatcccaatgttaatcgtatctgaaagactctctggaacacaaccagaatcatgtttggccaaatgtcctggcaccctggtgctcggtcacagtgacaagtacaagtaactatcacacatgccctttgtcatattggtgatttccactgtttttctcccaaactgcagcttatatttgttctcttartactgttgagcaaaaacttaatttttataaagtcgaatttatcaatgttttctttaatggtttgtgtttattgataataaagaacactttrcctaaaaaaaaaaaaaaaaaactgcgaggggggcccggtacccaa

SEQ ID NO: 264 - protein, 141 aa, Homo sapiens
LPASGCHGPAASSYSASAEPARVRALVYGHHGDPAKVVELKNLELAAVRGSDVRVKMLAAPINPSDINMIQGNYGLLPELPAVGGNEGVAQVVAVGSNVTGLKPGDWVIPANAGLESRSVAQAGAILAHCNLQPPPHRRMA

SEQ ID NO: 265 - protein, 6 aa, Homo sapiens
MWPAPS

SEQ ID NO: 266 - protein, 18 aa, Homo sapiens
LGLLVPLEPHHVLGVESP

SEQ ID NO: 267 - protein, 47 aa, Homo sapiens
MTPPHVLLKGVLVVSRVCVSLLCCPPGCSVCCPLPPGGSPCFSPIYS

SEQ ID NO: 268 - protein, 78 aa, Homo sapiens [sequence omitted]

SEQ ID NO: 269 - protein, 25 aa, Homo sapiens
HGLLPVCPWACGLRPPRTTPRKKIS

SEQ ID NO: 270 - protein, 20 aa, Homo sapiens
FLLSFCAFPCVFMFWVSVLH

SEQ ID NO: 271 - protein, 54 aa, Homo sapiens
MTENPKVQMMLIIVVPLQLFINPVQHPIQQVRCIHLHLCHGWALDRLALELVCL

SEQ ID NO: 272 - protein, 10 aa, Homo sapiens
MTRCLWRTLQ

SEQ ID NO: 273 - protein, 38 aa, Homo sapiens
VLLILKLLLLKGARSIQIFMFRCLIAFALITKLQNYMD

SEQ ID NO: 274 - protein, 94 aa, Homo sapiens
MRTIYSAFFFLSLCLSVLLSSTVFDDWHPISISWVQNFGLTPSFDVQVPQTLRCFFRSGCRWHPLNLLQFKLSTFLRIISFYLSFCSEKRLQHE

SEQ ID NO: 275 - protein, 359 aa, Homo sapiens
MMVIFLVGLVSMILMRTLRKDYARYSKEEEMDDMDRDLGDEYGWKQVHGDVFRPSSHPLIFSSLIGSGCQIFAVSLIVIIVAMIEDLYTERGSMLSTAIFVYAATSPVNGYFGGSLYARQGGRRWIKQMFIGAFLIPAMVCGTAFFINFIAIYYHASRAIPFGTMVAVCCICFFVILPLNLVGTILGRNLSGQPNFPCRVNAVPRPIPEKKWFMEPAVIVCLGGILPFGSIFIEMYFIFTSFWAYKIYYVYGFMMLVLVILCIVTVCVTIVCTYFLLNAEDYRWQWTSFLSAASTAIYVYMYSFYYYFFKTKMYGLFQTSFYFGYMAVFSTALGIMCGAIGYMGTSAFVRKIYTNVKID

SEQ ID NO: 276 - protein, 37 aa, Homo sapiens
MVGNAFLWLFVHLESVYVQLSSAISWAMGNISVKTNF

SEQ ID NO: 277 - protein, 42 aa, Homo sapiens [sequence omitted]

SEQ ID NO: 278 - protein, 19 aa, Homo sapiens
MYAFLQGFIFLLLFFFIAE

SEQ ID NO: 279 - protein, 2 aa, Homo sapiens
GA

SEQ ID NO: 280 - protein, 76 aa, Homo sapiens
LVPLLPGPLVRFCFCLHVGVGSSVGGGAPCPGCRPASCARAPFRVGLDHPSPHQGPHCEVITALNPPLLFYLLNLI

SEQ ID NO: 281 - protein, 58 aa, Homo sapiens
EFFLFSLSFSLLPSCLSFSPFFSLPFPSPPSLPPSLPSFLPSFLVLFCNPGCSAMAKS

SEQ ID NO: 282 - protein, 203 aa, Homo sapiens
MGIKTALPAAELGLYSLVLSGALAYAGRGLLEASQDGAHRKAFRESVRPGWEYIGRKMDVADFEWVMWFTSFRNVIIFALSGHVLFAKLCTMVAPKLRSWMYAVYGALAVMGTMGPWYLLLLLGHCVGLYVASLLGQPWLCLGLGLASLASFKMDPLISWQSGFVTGTFDLQEVLFHGGSSFTCCVAPALHWRAVPTLTATTP

SEQ ID NO: 283 - protein, 29 aa, Homo sapiens
MFSCFSLVVFILFSLGFFCNAFVQLILSC

SEQ ID NO: 284 - protein, 34 aa, Homo sapiens
MISMCQMLRTTVMTHLWIVTWIQRSWQESGDIRV

SEQ ID NO: 285 - protein, 13 aa, Homo sapiens
EFRAGFLLLLHGM

SEQ ID NO: 286 - protein, 733 aa, Homo sapiens
MQKPTDNAQFTCHYGTTYEIMTVPNDPYTFLSCGEDGTVRWFDTRIKTSCTKEDCKDDILINCRRAATSVAICPPIPYYLAVGCSDSSVRIYDRRMLGTRATGNYAGRGTTGMVARFIPSHLNNKSCRVTSLCYSEDGQEILVSYSSDYIYLFDPKDDTARELKTPSAEERREELRQPPVKRLRLRGDWSDTGPRARPESERERDGEQSPNVSLMQRMSDMLSRWFEEASEVAQSNRGRGRSRPRGGTSQSDISTLPTVPSSPDLEVSETAMEVDTPAEQFLQPSTSSTMSAQAHSTSSPTESPHSTPLLSSPDSEQRQSVEASGHHTHHQSDNNNEKLSPKPGTGEPVLSLHYSTEGTTTSTIKLNFTDEWSSIASSSRGIGSHCKSEGQEESFVPQSSVQPPEGDSETKAPEESSEDVTKYQEGVSAENPVENHINITQSDKFTAKPLDSNSGERNDLNHDRSCGVPEESASSEKAKEPETSDQTSTESATNENNTNPEPQFQTEATGPSAHEETSTRDSALQDTDDSDDDPVLIPGARYRAGPGDRRSAVARIQEFFRRRKERKEMEELDTLNIRRPLVKMVYKGHRNSRTMIKEANFWGANFVMSGSDCGHIFIWDRHTAEHLMLLEADNHVVNCLQPHPFDPILASSGIDYDIKIWSPLEESRIFNRKLADEVITRNELMLEETRNTITVPASFMLRMLASLNHIRADRLEGDRSEGSGQENENEDEE

SEQ ID NO: 287 - protein, 8 aa, Homo sapiens
SCFNLLGT

SEQ ID NO: 288 - protein, 36 aa, Homo sapiens
MNAAVLLTLVFFLLLYLFYLGVLGSDPAYLPLLKKS

SEQ ID NO: 289 - protein, 31 aa, Homo sapiens
MISMKMILVILVTLALPVAQLHLLLLVLKIQ

SEQ ID NO: 290 - protein, 4 aa, Homo sapiens
FPYS

SEQ ID NO: 291 - protein, 31 aa, Homo sapiens
MPLVYPVCLLLICFHLSFIEEDPFMILNTFH

SEQ ID NO: 292 - protein, 28 aa, Homo sapiens
MARNVWFFIVSFCYKFLSYFRASSTLKV

SEQ ID NO: 293 - protein, 11 aa, Homo sapiens
MHLHLPTTLVL

SEQ ID NO: 294 - protein, 48 aa, Homo sapiens
  SITE (2): Xaa equals any amino acid
MXLQGLPGTSGTGLGCLLCLVLFLSIAVTNKGMEEQSDKKKKKKKKNS

SEQ ID NO: 295 - protein, 1 aa, Homo sapiens
I

SEQ ID NO: 296 - protein, 35 aa, Homo sapiens
AHVVVVVLWWEFAAVQTLWPGKSKFLQDGFTASLD

SEQ ID NO: 297 - protein, 40 aa, Homo sapiens
MLFISNLPLPSQFIYLASDSFFSSPTPFSSTSQPTNTYSL

SEQ ID NO: 298 - protein, 254 aa, Homo sapiens
  SITE (222): Xaa equals any amino acid
MQGVILLLFAKYYHLPFLRDVQTDCTRTGLGGYWGNKGGVSVRLAAFGHMLCFLNCHLPAHMDKAEQRKDNFQTILSLQQFQGPGAQGILDHDLVFWFGDLNFRIESYDLHFVKFAIDSDQLHQLWEKDQLNMAKNTWPILKGFQEGPLNFAPTFKFDVGTNKYDTSAKKRKPAWTDRILWKVKAPGGGPSPSGRKSHRLQVTQHSYRSHMEYTVSDHKPVXAQFLLQFAFQGRHATGAAGGGQMSGCGPSRRW

SEQ ID NO: 299 - protein, 32 aa, Homo sapiens
KAIWFLILCTTHSILIITFIYKKNKENNSKLC

SEQ ID NO: 300 - protein, 55 aa, Homo sapiens
MTNYFWASASSCTVFPLAFLCSSCVGPPSFSCAHHILHQESWHLFFSSAWNAFLC

SEQ ID NO: 301 - protein, 23 aa, Homo sapiens
VGHFWVVIWLVRSMSDRMNKNAL

SEQ ID NO: 302 - protein, 43 aa, Homo sapiens
MGIFDYKLFSHYFKACFIFFLILLTHLCLSLFYYKLFIVQSLP

SEQ ID NO: 303 - protein, 27 aa, Homo sapiens
MVVHILWSWCCRGLAGTAALPRVLFYF

SEQ ID NO: 304 - protein, 25 aa, Homo sapiens
MALCSLAVFCPSTILGCDLVQLGPE

SEQ ID NO: 305 - protein, 147 aa, Homo sapiens
VGAALQTLYILAYLHYCPRKRVVLLQTATLLGVLLLGYGYFWLLVPNPEARLQQLGLFCSVFTISMYLSPLADLAKVIQTKSTQCLSYPLTIATLLTSASWCLYGFRLRDPYIMVSNFPGIVTSFIRFWLFWKYPQEQDRNYWLLQT

SEQ ID NO: 306 - protein, 80 aa, Homo sapiens
NSLVKFTFPPPLSGAPSCVICGFWTPNVSLAVGLPEVWYVLEQWEAVICCVSSHPALESNGHSQPELPLSTPCLGFCSLG

SEQ ID NO: 307 - protein, 14 aa, Homo sapiens
MPYMYSSPLPIFYT

SEQ ID NO: 308 - protein, 31 aa, Homo sapiens
MLMLPLLLLILSVELFQLFLSLKLLPLLLLL

SEQ ID NO: 309 - protein, 47 aa, Homo sapiens
MRFASSDLLCYWKLALFTAIRSSLASIPLMTSFTSLTPLYYCLAQFS

SEQ ID NO: 310 - protein, 45 aa, Homo sapiens
  SITE (31): Xaa equals any amino acid
MHVLLFSFLIPFLLLSPVGVTCNSHMLERQXSWLKKRSTQASQHV

SEQ ID NO: 311 - protein, 29 aa, Homo sapiens
MLCVLVLFILYLPGFSKSNQDVPWGDILC

SEQ ID NO: 312 - protein, 60 aa, Homo sapiens [sequence omitted]

SEQ ID NO: 313 - protein, 49 aa, Homo sapiens
  SITE (40): Xaa equals any amino acid
  SITE (48): Xaa equals any amino acid
MKGHSSKLFCLVVWGFLCFLFLGCFFFNCLVQKKKEKKNXGGAPEPNXP

SEQ ID NO: 314 - protein, 5 aa, Homo sapiens
WASLT

SEQ ID NO: 315 - protein, 120 aa, Homo sapiens
MMCVVLTTLPCLTFSIAVTEVQKSINGSADVLPDMLPDLPVSLVLLSLIMVDIIEKLRIYPLRGSQKSKCSFKCEYFLKFDIFFTFLPLCYLTTCLMIPFLRANITDRRLQMKISKHNYF

SEQ ID NO: 316 - protein, 73 aa, Homo sapiens [sequence omitted]

SEQ ID NO: 317 - protein, 23 aa, Homo sapiens
MAFLPSPAWWISLLPSLLSIARS

SEQ ID NO: 318 - protein, 35 aa, Homo sapiens
MLAVLSLCNFCRCSLGRELFFRRLAKSQVLSLDLR

SEQ ID NO: 319 - protein, 133 aa, Homo sapiens
MISDAGAGFGVFLLVPRAGHCWGAGKPSLPVLLWPPSPHGCCHPSWREGGESWCEPSGFPPTHPGAGWARTGRGSTAALLALLLPQLGVDRASLSPLFWREGEGGGLQAGARLGVLGGEMRFRGCLMGWAGLG

SEQ ID NO: 320 - protein, 62 aa, Homo sapiens
MEQEPVRRYPLVPLVPLVVVAVWGFFPGGSESSSSELDSISLRSSLDTLPLETALQAIFTIK

SEQ ID NO: 321 - protein, 16 aa, Homo sapiens
LFVFFCFVLVFFFFLA

SEQ ID NO: 322 - protein, 38 aa, Homo sapiens
MAHSRYSTIIILYLIANWLAFAQHSAYIGPLRGLSPAS

SEQ ID NO: 323 - protein, 48 aa, Homo sapiens
  SITE (9): Xaa equals any amino acid
  SITE (10): Xaa equals any amino acid
MATQQCIYXXLCWLFIYSLYRRKLNMDHTFSPEFSFSLQVPQNYCVLN

SEQ ID NO: 324 - protein, 13 aa, Homo sapiens
CTHPASGPLSSTS

SEQ ID NO: 325 - protein, 42 aa, Homo sapiens
MLLCPNLRNPLIWGLILLTHAISVSVASFYYIILVKSKLYHV

SEQ ID NO: 326 - protein, 226 aa, Homo sapiens
  SITE (10): Xaa equals any amino acid
  SITE (31): Xaa equals any amino acid
  SITE (32): Xaa equals any amino acid
  SITE (37): Xaa equals any amino acid
  SITE (129): Xaa equals any amino acid
  SITE (130): Xaa equals any amino acid
  SITE (150): Xaa equals any amino acid
  SITE (214): Xaa equals any amino acid
MRGLLCWPVXLLLLQPWETQLQLTGPRCHTXXLDLVXVIDSSRSVRPFEFETMRQFLMGLLRGLNVGPNATRVGVIQYSSQVQSVFPLRAFSRREDMERAIRDLVPLAQGTMTGLAIQYAMNVAFSVAXXARPPEERVPRVAVIVTDGRXQDRVAEVAAQARARGIEIYAVGVQRADVGSLRAMASPPLDEHVFLVESFDLIQEFGLQFQSRLXGPGPLQWRGPWL

SEQ ID NO: 327 - protein, 33 aa, Homo sapiens
MRAGIVCILYIFICSVFAQCLVHSRVSMYECVG

SEQ ID NO: 328 - protein, 78 aa, Homo sapiens
DLGTLRTARRWLRGVQGPFPPGSSCLHPALSCGPSSHSEALQNMSPVGTSSFPVPGPQLVSAAASLGPFPKPRVTAGA

SEQ ID NO: 329 - protein, 118 aa, Homo sapiens
MPFTFSWCFSLWTLLNHRPDKSLQRKGLWAVPEAGWGQDNTAASPGCPLWGPLGAGKGIGQRGSGAGHEGPPSALWLQGWRWFCPPSLPSGGAGGSAAGVGTSPRMAVEGVRTVLGSP

SEQ ID NO: 330 - protein, 36 aa, Homo sapiens
MFLLTIGKIEKALCFLFFCCCCHCCFFQKTSVSVLS

SEQ ID NO: 331 - protein, 41 aa, Homo sapiens
DFLFFFPPCGSHCFLSCLYLSLCLSSSFPQMSQLSLPNFPI

SEQ ID NO: 332 - protein, 29 aa, Homo sapiens
MRQQQTHLAAGVLFCCRLTFSSSVSGKSG

SEQ ID NO: 333 - protein, 42 aa, Homo sapiens
MMNVSLEIYFVVFLSLFCVVLPLHALFLKSFFFLDFACFQIL

SEQ ID NO: 334 - protein, 34 aa, Homo sapiens
MQCNFLSSLERWGHIPLGCFLLCVILISLAGKQK

SEQ ID NO: 335 - protein, 50 aa, Homo sapiens
MSLSVAWWLSVCSAAGEGPTPGQCSAFRRPTGNQKFPNIMAPSPLQSSFP

SEQ ID NO: 336 - protein, 42 aa, Homo sapiens
FLPTLLIIISLFQFGLFFSFNESNRIHGSFYFNVFILSGQCI

SEQ ID NO: 337 - protein, 40 aa, Homo sapiens
MRCARHWKWLLLCFWGQLICRRLWRRSGRGKCFLCCLHRE

SEQ ID NO: 338 - protein, 43 aa, Homo sapiens
MEIYVSLGIVGLAILALLAVTSIPSVSDSLTWREFHYIQVNNI

SEQ ID NO: 339 - protein, 55 aa, Homo sapiens
MSMSCPWLGTWAVVCASPRQRNDSQGTDARGGNRADQRLPGHKRNLEERTPAEQT

SEQ ID NO: 340 - protein, 44 aa, Homo sapiens
MWVLLSLFCIFVLLLILFAFIAKTHIRLTMSQALFSVLHRYEFI

SEQ ID NO: 341 - protein, 30 aa, Homo sapiens
MAVGSCSPILSLLGPGILAPLSALPLISVP

SEQ ID NO: 342 - protein, 10 aa, Homo sapiens
MWQVAPVHLL

SEQ ID NO: 343 - protein, 39 aa, Homo sapiens
MEAVYHYFLLLLLEIFSEYLILHFLLSFAIEFFIPMITS

SEQ ID NO: 344 - protein, 52 aa, Homo sapiens
TFGLFLLFLAIVNSAVMNTDVQFFGVNICFYSFGYIPRCGIAGSYMVILSLT

SEQ ID NO: 345 - protein, 3 aa, Homo sapiens
GRW

SEQ ID NO: 346 - protein, 36 aa, Homo sapiens
MVLALAVFTLLASVCCQLHSHSFYPCMSCFYSSLSF

SEQ ID NO: 347 - protein, 64 aa, Homo sapiens
MWLLWQPYLAGFLLQVLEGRVAQSQAEADSGVLGAGGTTPAGGRRGLCQQSEQPRGPIPHILQV

SEQ ID NO: 348 - protein, 223 aa, Homo sapiens
MWGLVSALAATLCFSLQNIFSKKVLRDSRIHHLRLLNILGCHAVFFMIPTWVLVDLSAFLVSSDLTYVYQWPWTLLLLAVSGFCNFAQNVIAFSILNLVSPLSYSVANATKRIMVITVSLIMLRNPVTSTNVLGMMTAILGVFLYNKTKYDANQQARKHLLPVTTADLSSKERHRSPLEKPHNGLLFPQHGDYQYGRNNILTDHFQYSRQSYPNSYSLNRYDV

SEQ ID NO: 349 - protein, 47 aa, Homo sapiens
MTLTAWTGACWPSFTWLMPRTSWRMLLLLFWTSSMIWLPRECGSFST

SEQ ID NO: 350 - protein, 24 aa, Homo sapiens
MGELLWLVILCAHIIVATHHCWEN

SEQ ID NO: 351 - protein, 8 aa, Homo sapiens
MFQRLLKY

SEQ ID NO: 352 - protein, 27 aa, Homo sapiens
GVSVIISLLISSSEDCYQSLGLEVQII

SEQ ID NO: 353 - protein, 5 aa, Homo sapiens
FCELA

SEQ ID NO: 354 - protein, 55 aa, Homo sapiens
MSACLPGSLFLLFPPAGRYQRRGHPSRPGMGRKEVTAKAVEWGWHQPLVCFPCGS

SEQ ID NO: 355 - protein, 24 aa, Homo sapiens
MSIWLMHFCLLVLGKRMSILDVKL

SEQ ID NO: 356 - protein, 56 aa, Homo sapiens
MWPFYLRRVVVQSSLGPMKLPCSLWLWTVVASCICCPHGGVFLCGSCSCCVSGLLL

SEQ ID NO: 357 - protein, 5 aa, Homo sapiens
MGHTP

SEQ ID NO: 358 - protein, 9 aa, Homo sapiens
LKILFLIEV

SEQ ID NO: 359 - protein, 27 aa, Homo sapiens
MTSSVACPGARVCLAGSWPAASSSPCW

SEQ ID NO: 360 - protein, 34 aa, Homo sapiens
FGYFWYRWPLGWIFLHSVPQLQEGVPLVCEYVCL

SEQ ID NO: 361 - protein, 18 aa, Homo sapiens
LATLLLRLLLSLGTGCQR

SEQ ID NO: 362 - protein, 117 aa, Homo sapiens
CVETPRPGFCQKAPWYQPGKSATKPTTTREETIPSKFTSPNTNLPKLNRLQPLCPDPTLTAFPFTQIWAFWQKVLRLWGKRRAVMALRWVSYSPEEIGLFYALPYIRNYIQDAILRH

SEQ ID NO: 363 - protein, 36 aa, Homo sapiens
  SITE (35): Xaa equals any amino acid
MFDSTPVLVALFLHPRLGASYSLCLQHSSSPCLPXS

SEQ ID NO: 364 - protein, 36 aa, Homo sapiens
MELWLPRYLKGLSCLLLFDLFNLIWAIKYHFSGLFF

SEQ ID NO: 365 - protein, 10 aa, Homo sapiens
MCGAFQDSPQ

SEQ ID NO: 366 - protein, 41 aa, Homo sapiens
MYNHLSLNCTLPLFICALFLVYSVIIPHLKNKNHYCYILLI

SEQ ID NO: 367 - protein, 348 aa, Homo sapiens
MNMTQARVLVAAVVGLVAVLLYASIHKIEEGHLAVYYRGGALLTSPSGPGYHIMLPFITTFRSVQTTLQTDEVKNVPCGTSGGVMIYIDRIEVVNMLAPYAVFDIVRNYTADYDKTLIFNKIHHELNQFCSAHTLQEVYIELFDQIDENLKQALQKDLNLMAPGLTIQAVRVTKPKIPEAIRRNFELMEAEKTKLLIAAQKQKVVEKEAETERKKAVIEAEKIAQVAKIRFQQKVMEKETEKRISEIEDAAFLAREKAKADAEYYAAHKYATSNKHKLTPEYLELKKYQAIASNSKIYFGSNIPNMFVDSSCALKYSDIRTGRESSLPSKEALEPSGENVIQNKESTG

SEQ ID NO: 368 - protein, 66 aa, Homo sapiens
  SITE (40): Xaa equals any amino acid
MCLLSLAYFILVLGYGASYGKGKGPFRKTSFGEIKMWTVXKKKKKKKKKKKKKKKKKKKKKKKKKK

SEQ ID NO: 369 - protein, 14 aa, Homo sapiens
MLSQPPHSKRGYRL

SEQ ID NO: 370 - protein, 34 aa, Homo sapiens
MFLSFLNILIILLQGIWEPYLVFACNVIRYNYTM

SEQ ID NO: 371 - protein, 127 aa, Homo sapiens
MVFCLAFGATLLLAGKIQFGYVYGISAIGCLGMFCLLNLMSMTGVSFGCVASVLGYCLLPMILLSSFAVIFSLQGMVGIILTAGIIGWCSFSASKIFISALAMEGQQLLVAYPCALLYGVFALISVF

SEQ ID NO: 372 - protein, 2 aa, Homo sapiens
PC

SEQ ID NO: 373 - protein, 72 aa, Homo sapiens [sequence omitted]

SEQ ID NO: 374 - protein, 17 aa, Homo sapiens
MCTSVLLAIFLLCFSVT

SEQ ID NO: 375 - protein, 49 aa, Homo sapiens
MWAGASRGRTGARLAVPLHAWCTLWPLALGQAILLQIPVLPQGHHQAPP

SEQ ID NO: 376 - protein, 32 aa, Homo sapiens
MFHVCCAFLNFMLHSKTVVLFLWCLDSCGVCF

SEQ ID NO: 377 - protein, 23 aa, Homo sapiens
YVCVYVVCCYLHGKIWHHQQKIY

SEQ ID NO: 378 - protein, 73 aa, Homo sapiens [sequence omitted]

SEQ ID NO: 379 - protein, 42 aa, Homo sapiens
MSKFVSLPVFLACISPWFNSYQIFGRGGTEVSSHSRALGCPY

SEQ ID NO: 380 - protein, 48 aa, Homo sapiens
MCPPHLMLICLMVMPRVQDLVTCAVVNTQRLGRSVSLVLPSFKVHGKI

SEQ ID NO: 381 - protein, 26 aa, Homo sapiens
MVFFSAILFLYILYLFADYSSIFDFP

SEQ ID NO: 382 - protein, 8 aa, Homo sapiens
MAKFTVLW

SEQ ID NO: 383 - protein, 17 aa, Homo sapiens
LWVWLRSCWKNSTCPAW

SEQ ID NO: 384 - protein, 31 aa, Homo sapiens
MYNLSSLFMISFLVCHVTPSQTLKGPPLSWS

SEQ ID NO: 385 - protein, 6 aa, Homo sapiens
MFLREQ

SEQ ID NO: 386 - protein, 32 aa, Homo sapiens
TSCCIIIFLCAEQLKTQPQYANCFNAILRQLI

SEQ ID NO: 387 - protein, 10 aa, Homo sapiens
MLLYLTVGYW

SEQ ID NO: 388 - protein, 48 aa, Homo sapiens
MIGKKKGTLEEIVLMIVVLVSTQCLIMTMEVVLKNLVIMTEWIMKMTD

SEQ ID NO: 389 - protein, 30 aa, Homo sapiens
MAMGAASSGWSAPASSSWSTLWWSSFPRPR

SEQ ID NO: 390 - protein, 227 aa, Homo sapiens
MKPSLLCRPLSCFLMLLPWPLATLTSTTLWQCPPGEEPDLDPGQGTLCRPCPPGTFSAAWGSSPCQPHARCSLWRRLEAQVGMATRDTLCGDCWPGWFGPWGVPRVPCQPCSWAPLGTHGCDEWGRRARRGVEWQQGPAAVVRHGSLGTAPGQVAKNSRPVRGHRHRPCLLPHGAVGHPGVQPPQAEGLPLHGAQRVGPGPGVEAVESTLPTGLRMPMRTPLGSWCA

SEQ ID NO: 391 - protein, 40 aa, Homo sapiens
MNIYTILKILPHRMLWPFIYLIIATYLFFISSSTHSKGYS

SEQ ID NO: 392 - protein, 397 aa, Homo sapiens
MDARRVPQKDLRVKKNLKKFRYVKLISMETSSSSDDSCDSFASDNFANTRLQSVREGCRTRSQCRHSGPLRVAMKFPARSTRGATNKKAESRQPSENSVTDSNSDSEDESGMNFLEKRALNIKQNKAMLAKLMSELESFPGSFRGRHPLPGSDSQSRRPRRRTFPGVASRRNPERRARPLTRSRSRILGSLDALPMEEEEEEDKYMLVRKRKTVDGYMNEDDLPRSRRSRSSVTLPHIIRPVEEITEEELENVCSNSREKIYNRSLGSTCHQCRQKTIDTKTNCRNPDCWGVRGQFCGPCLRNRYGEEVRDALLDPNWHCPPCRGICNCSFCRQRDGRCATGVLVYLAKYHGFGNVHAYLKSLNRNLKCKHNIWKICCLPSTSQIFLVKVSNFFTET

SEQ ID NO: 393 - protein, 40 aa, Homo sapiens
MRRNMMNPLTFMLLGCACLRWLHLNILTRSAKMLRRSTVA

SEQ ID NO: 394 - protein, 58 aa, Homo sapiens
  SITE (54): Xaa equals any amino acid
MYMPAPPLSLAPAVGETFPVCRERMWSWQAWLLPDSVSSGNTQPSFKKKKTRSXPSDR

SEQ ID NO: 395 - protein, 629 aa, Homo sapiens
MCFIPLVCWIVCTGLKQQMESGKSLAQTSKTTTAVYVFFLSSLLQPRGGSQEHGLCAHLWGLCSLAADGIWNQKILFEESDLRNHGLQKADVSAFLRMNLFQKEVDCEKFYSFIHMTFQEFFAAMYYLLEEEKEGRTNVPGSRLKLPSRDVTVLLENYGKFEKGYLIFVVRFLFGLVNQERTSYLEKKLSCKISQQIRLELLKWIEVKAKAKKLQIQPSQLELFYCLYEMQEEDFVQRAMDYFPKIEINLSTRMDHMVSSFCIENCHRVESLSLGFLHNMPKEEEEEEKEGRHLDMVQCVLPSSSHAACSHGLVNSHLTSSFCRGLFSVLSTSQSLTELDLSDNSLGDPGMRVLCETLQHPGCNIRRLWLGRCGLSHECCFDISLVLSSNQKLVELDLSDNALGDFGIRLLCVGLKHLLCNLKKLWLVSCCLTSACCQDLASVLSTSHSLTRLYVGENALGDSGVAILCEKAKNPQCNLQKLGLVNSGLTSVCCSALSSVLSTNQNLTHLYLRGNTLGDKGIKLLCEGLLHPDCKLQVLELDNCNLTSHCCWDLSTLLTSSQSLRKLSLGNNDLGDLGVMMFCEVLKQQSCLLQNLGLSEMYFNYETKSALETLQEEKPELTVVFEPSW

SEQ ID NO: 396 - protein, 43 aa, Homo sapiens
ELRCLVCFFAFQRHFLAERYNGALQETLCPQHLFCSLADRSWP

SEQ ID NO: 397 - protein, 32 aa, Homo sapiens
MLRGFFVVLFCLIMNGCWILSHARSASIGMIM

SEQ ID NO: 398 - protein, 114 aa, Homo sapiens
DRERNMATCAQLLRLVLEAEHIAPAAWHWPWDMGGRGRRVPAYVGRWAGAQTQQAPWGHSSPLHPFILKHLQRASSARLSGAKGTEMRTDSPLGETVFAWSCPQCKAQEWCRGA

SEQ ID NO: 399 - protein, 243 aa, Homo sapiens
  SITE (146): Xaa equals any amino acid
MLVIQITSVDFHGIPLSVPQSLTRRQCTCRGWKEDEPMSRLCINQGERKSRWKEVGRWRKQQLLLALDDGPEGLSLLVTPLWVLFPYLSVTRFLILIPCCEFGSLCWAIQSSSERAKLVLELRCRWGKRGTQLDTKKGSLPSLSPXTVRGILSRQPPNSPSHLPSFVETAFDSPSLSLPFRVSCLVSGLREFLSLLPRTLKELLLKTGEYQAYLYMCNSARIQRKSSFQPLPLGRWFRVPHRD

SEQ ID NO: 400 - protein, 22 aa, Homo sapiens
GSLLSQILHMACDHPRGLTVGA

SEQ ID NO: 401 - protein, 52 aa, Homo sapiens
GATGMWRCRGYWAPGQNAIWWLALKMVLCCSCLGLGEFMRPSMSSLSGAVPL

SEQ ID NO: 402 - protein, 32 aa, Homo sapiens
MAPAPCSASPRPAGGRDGGGAPELSFLLSVLV

SEQ ID NO: 403 - protein, 9 aa, Homo sapiens
VFYCYGLII

SEQ ID NO: 404 - protein, 45 aa, Homo sapiens
MAAAKALISLWLVSACGQWETSFPIYGGDMECQAVVFWWLEEERK

SEQ ID NO: 405 - protein, 43 aa, Homo sapiens
MAPLPTPLTALGASHLPFRCLSCLDACLFLWGYLNSAHPIGAS

SEQ ID NO: 406 - protein, 34 aa, Homo sapiens
MQCPYLLGAQLLVSSICPVVPALPRPVNKCLVPD

SEQ ID NO: 407 - protein, 25 aa, Homo sapiens
MSMLFLFCVHVSLLIFLICSPMLYL

SEQ ID NO: 408 - protein, 21 aa, Homo sapiens
MLAALACSWRLLSLGAHSGRA

SEQ ID NO: 409 - protein, 64 aa, Homo sapiens
MSSFGKCLFILVLGLFFNWVFVFFFAIDFLKFLDSNLLSDMWFTNIFSYSVDCLFILSIISFAL

SEQ ID NO: 410 - protein, 41 aa, Homo sapiens
MTTSSLAVGCFGWLRLLLHFLDPGNYSHQDDMDQSTVFKHD

SEQ ID NO: 411 - protein, 66 aa, Homo sapiens
  SITE (36): Xaa equals any amino acid
  SITE (58): Xaa equals any amino acid
  SITE (63): Xaa equals any amino acid
MQLSSAVIAFSCCPVFMWSLVNSTRILSLLAKVLPXAERESPSKLTSVTPPSLTPHLXRATNXLFD

SEQ ID NO: 412 - protein, 123 aa, Homo sapiens
MVWLPRPSLGWVWGWSGLAHASHLCLHLCCHPAPPSSSSPTSSSLCASVSCRKKWVEPERRLSEEGRGRAWGGSPTPHPKPQGLPPGSGRGRSWLCGVVAPLLLPCFSHLSCPSLVPTAVHHE

SEQ ID NO: 413 - protein, 27 aa, Homo sapiens
SFYVLFSNLQWYVFNIFATYTLGKKKM

SEQ ID NO: 414 - protein, 43 aa, Homo sapiens
MTLWKCGRTTLRASLLMIFTSCSWWLGVCLSVLVRQRCQENDG

SEQ ID NO: 415 - protein, 39 aa, Homo sapiens
MAAKSATYWGWHWVDWRWWCTACGVLRFWSGCREGSQLC

SEQ ID NO: 416 - protein, 28 aa, Homo sapiens
MFQDQELSKLPSAFYLSSIQFNSNHSLP

SEQ ID NO: 417 - protein, 83 aa, Homo sapiens
MCVFVYELMLLSLVFLPHWSLPSLPYFSFALHSNTVKPDIYFLCGSNSLIFPVDKRYVFYSFISLIVNRKQLENWNTFSLCGC

SEQ ID NO: 418 - protein, 88 aa, Homo sapiens
SLKIFSVSGVLQGWPLAPEPLPQCSHQPPPHPSVCRASSTGPHAAFFTHSALGRFVIWLSLHWAEVCVHRVGVPSSPFHSEGHTQRCQ

SEQ ID NO: 419 - protein, 26 aa, Homo sapiens
  SITE (3): Xaa equals any amino acid
MAXGSFLFFCLVHINVATSFLDLGLS

SEQ ID NO: 420 - protein, 25 aa, Homo sapiens
MTCHIQFVFVPTVRGLNFIILAFCS

SEQ ID NO: 421 - protein, 93 aa, Homo sapiens
MRLTDSLFLWVGATPHLRNLAVAMCSRYDSIPVSTSLLGDTSDTTSTGLAQRLARKTNKQVFVSYNLQNTDSNFALLVENRIKEEMEAFPEKF

SEQ ID NO: 422 - protein, 19 aa, Homo sapiens
MSLLLESCVEPLSFLLLLQ

SEQ ID NO: 423 - protein, 17 aa, Homo sapiens
MCALGKLCLILQSWHPL

SEQ ID NO: 424 - protein, 37 aa, Homo sapiens
LISLAFLLPGILGKTNGFSRHPLSTNAFLKQTGTFLL

SEQ ID NO: 425 - protein, 28 aa, Homo sapiens
MAISYVSSWIILLDYLGSKDGFQLFPES

SEQ ID NO: 426 - protein, 35 aa, Homo sapiens
HSCGPDTCVCPSPVSPCLPVPLAALMVTPKGSNPC

SEQ ID NO: 427 - protein, 34 aa, Homo sapiens
MWPLIGYLTKSLLNFILCVIIAMCLCVLSSSDTY

SEQ ID NO: 428 - protein, 134 aa, Homo sapiens
MLKLILLLLFSGATLSSTWFTLNCLNSITHLPLTTVTLYASCILLGVFLNSSVPIFFELFVETVYPVPEGITCGVVTFLSNMFMGVLLFFLTFYHTELSWFNWCLPGSCLLSLLLILCFRESYDRLYLDVVVSV

SEQ ID NO: 429 - protein, 35 aa, Homo sapiens
IAWVQRTSCSCFGIGDWYRESARPPEQYVQLPRTP

SEQ ID NO: 430 - protein, 80 aa, Homo sapiens
MGRMAILACSLPTTWSSLSEAEGTSCPSPLRHGFLIAGRGGLGVDIQHSSRNRTPSEDEASGLPPAWQTQPVTPNAAMAW

SEQ ID NO: 431 - protein, 44 aa, Homo sapiens
ICVANYRLWCKVCLIFLPLTPANCCILDSLFQYCIKTLVLCWTE

SEQ ID NO: 432 - protein, 253 aa, Homo sapiens
MNCFLSPLLTLLAKNGAFFAGSILAVLIALTIYDEDVLAVEHVLTTVTLLGVTVTVCRSFIPDQHMVFCPEQLLRVILAHIHYMPDHWQGNAHRSQTRDEFAQLFQYKAVFILEELLSPIVTPLILIFCLRPRALEIIDFFRNFTVEVVGVGDTCSFAQMDVRQHGHPQRLSAGQTEASVYQQAEDGKTELSLMHFAITNPGWQPPRESTAFLGFSRSRFSGMEQLLASPKGVCSLKMPSLRLSSPYNLSLSP

SEQ ID NO: 433 - protein, 65 aa, Homo sapiens
MAPSTATRHWHAHCFASCRSTGMQRLCGPGIPKNSLPVTSWWTWGASTTLGDTDMTITRGLSQRP

SEQ ID NO: 434 - protein, 46 aa, Homo sapiens
GIIQSVLFCAWFVLVNIASGSFISVQGWRTPAYKPNLVLCLFSYGL

SEQ ID NO: 435 - protein, 9 aa, Homo sapiens
AGAGLPPGS

SEQ ID NO: 436 - protein, 72 aa, Homo sapiens
MGYNLSPQFTQLLVSRYCPRSANPAMQLDRFIQVCTQLQVLTEAFREKDTAVQGNIRLSFEDFVTMTASRML

SEQ ID NO: 437 - protein, 10 aa, Homo sapiens
MPLHSSLGGH

SEQ ID NO: 438 - protein, 42 aa, Homo sapiens
MNCGTRGCENLRWNLSFFLSFFLNFVFSIQQQCVERILCRCR

SEQ ID NO: 439 - protein, 26 aa, Homo sapiens
IFLHLLSCSLLFAWTNGEKSAQNEIM

SEQ ID NO: 440 - protein, 22 aa, Homo sapiens
MNILFILCNLIWLLWGKQHVHK

SEQ ID NO: 441 - protein, 36 aa, Homo sapiens
MISVWFDVLFLSSVSAWVSVCMKWNKLPTAKKKKKK

SEQ ID NO: 442 - protein, 36 aa, Homo sapiens
  SITE (31): Xaa equals any amino acid
  SITE (33): Xaa equals any amino acid
MSSLLLIIILALSLAYKKKKKKLEGGPGTHXPXGGV

SEQ ID NO: 443 - protein, 10 aa, Homo sapiens
WHPVCSWCLH

SEQ ID NO: 444 - protein, 13 aa, Homo sapiens
  SITE (12): Xaa equals any amino acid
MWLVHRRLMSLXL

SEQ ID NO: 445 - protein, 91 aa, Homo sapiens
MVTFSTALTILIMNLHYCGPSVRPVPAWARALLLGHLARGLCVRERGEPCGQSRPPELSPSPQSPEGGAGPPAGPCHEPRCLCRQKPYCTT

SEQ ID NO: 446 - protein, 27 aa, Homo sapiens
PAPHLPRLTLPCQVVWGPRCWGGESGS

SEQ ID NO: 447 - protein, 4 aa, Homo sapiens
DKLM

SEQ ID NO: 448 - protein, 62 aa, Homo sapiens
DILRLFVALQGCMAGRAGQRPESQRTCPPGVESEWRAGSTGSGAVCHCGGGQADKTQEGDCQ

SEQ ID NO: 449 - protein, 11 aa, Homo sapiens
MCLPLMPSWPR

SEQ ID NO: 450 - protein, 21 aa, Homo sapiens
EKQLYLESYCLGFLIRHSSPD

SEQ ID NO: 451 - protein, 21 aa, Homo sapiens
  SITE (14): Xaa equals any amino acid
MAGRVGYLRYCLFXISALLIF

SEQ ID NO: 452 - protein, 62 aa, Homo sapiens
MCNLPENLFCFWSTSGVASGPRAFATVLPPAPTSSVCLQSLIYRSPRCLLYSLCAWPFCYLA

SEQ ID NO: 453 - protein, 60 aa, Homo sapiens
ELWWFWLLWTVLILFSCCCAFRHRRAKLRLQQQQRQRRNQLVGLSWGMPWGWSFPYRFTA

SEQ ID NO: 454 - protein, 125 aa, Homo sapiens
GRGPVLGPMVYAICYCPLPRLADLEALKVADSKTLLESERERLFAKMEDTDFVGWALDVLSPNLISTSMLGRVKYNLNSLSHDTATGLIQYALDQGVNVTQVFVDTVGCQRHTRRGCSKVFPGLR

SEQ ID NO: 455 - protein, 14 aa, Homo sapiens
HSSISRSSLSCPYS

SEQ ID NO: 456 - protein, 27 aa, Homo sapiens
  SITE (2): Xaa equals any amino acid
  SITE (6): Xaa equals any amino acid
  SITE (18): Xaa equals any amino acid
  SITE (20): Xaa equals any amino acid
MXLVHXIIVLIFLPGMTXKXERRKKMC

SEQ ID NO: 457 - protein, 137 aa, Homo sapiens
LFLLFLVFELPWRRAWETSRGQATDLRTSPPVLGAGRPRSGVSTHARLKRRRRDPLPDRARPPPPLLPQGAWTAGLTCSLLRVCPRTSPPAPRWWRGHGYLSLLLLAWRRAVPALGFWDSSPPGAFCSPCGLSDPSP

SEQ ID NO: 458 - protein, 31 aa, Homo sapiens
MAPLRRLTVWRVGLRLGPAGAAGGPGEASSV

SEQ ID NO: 459 - protein, 22 aa, Homo sapiens
MPFYIHLWHQMLLIIIVMWWIC

SEQ ID NO: 460 - protein, 323 aa, Homo sapiens
  SITE (217): Xaa equals any amino acid
  SITE (226): Xaa equals any amino acid
  SITE (229): Xaa equals any amino acid
MELSKAFSGQRTLLSAILSMLSLSFSTTSLLSNYWFVGTQKVPKPLCEKGLAAKCFDMPVSLDGDTNTSTQEVVQYNWETGDDRFSFRSFRSGMWLSCEETVEEPGERCRSFIELTPPAKRENPMVIPGNADHLHRTSIHQLPPATNRLATHWEPCLWAQTERLCCCFLCPVRSPGDVAHMMYSQVFQATVNLGPEDWRPHVWNYGWAFYMACSPSXAAWRRLSPXSTXTPGWCWSSSASIVKSFKENPNCLPHHHQCFPRRLSSAAPTVGPLTSYHQYHNQPIHSVSEGVDFYSELRNKGFQRGASQELKEAVRSSVEEEQC

SEQ ID NO: 461 - protein, 37 aa, Homo sapiens
VLSCWTWMTWCGWLCPTPSASTHTSRNCTAALCRKDW

SEQ ID NO: 462 - protein, 7 aa, Homo sapiens
FVKLRHP

SEQ ID NO: 463 - protein, 34 aa, Homo sapiens
MAAMRHLLRLFSGCGDLGFLTLYIFFLYSKQNNF

SEQ ID NO: 464 - protein, 23 aa, Homo sapiens
MPFLHTPTVPSIFLRVIIFLFTL

SEQ ID NO: 465 - protein, 38 aa, Homo sapiens
MLRLAGPPFYWPVLLALLPFASSGFQVSLKVGGCLSSL

SEQ ID NO: 466 - protein, 56 aa, Homo sapiens
MNLWLGALIPVTVHLKRMWSHPKFQAQKTFPLSKSPKYHPVFLLVIIMARSSQLKR

SEQ ID NO: 467 - protein, 84 aa, Homo sapiens
  SITE (58): Xaa equals any amino acid
MLVSSHFLFLCFVRLLSSLPLFLTSITFLYSPSSPSLFLSLYSFSYPSFSPLSFLPLXLISFPPPMPSSLFPFPCFFPQPLFLF

SEQ ID NO: 468 - protein, 1 aa, Homo sapiens
M

SEQ ID NO: 469 - protein, 20 aa, Homo sapiens
MPQASTHIKAPPPPSPEPGN

SEQ ID NO: 470 - protein, 129 aa, Homo sapiens
MFHLQPLMFLGLFPLFAVFEGLHLSTSEKIFRFQDTGLLLRVLGSLFLGGILAFGLGFSEFLLVSRTSSLTLSIAGIFKEVCTLLLAAHLLGDQISLLNWLGFASASREYPSTLPSKPCIPEVMVAPRP

SEQ ID NO: 471 - protein, 8 aa, Homo sapiens
MSLLLFLF

SEQ ID NO: 472 - protein, 69 aa, Homo sapiens
MSHFRPARCLPGPCQTLLTFPLLVCAGLRRPPRPHSTQPGSSCSPRHPSFPSLSWVMLLPPCVTFEAVK

SEQ ID NO: 473 - protein, 31 aa, Homo sapiens
WLLLCQGHFWVSATATGALGGEGHRVLLGRW

SEQ ID NO: 474 - protein, 37 aa, Homo sapiens
MGLWVFLELVFVHSLLFVLPSLSPCPTHVLRHSGSTW

SEQ ID NO: 475 - protein, 38 aa, Homo sapiens
MLSPSQTPGSCLKWAPSWVTRCTFWTLVVASLAQKGPK

SEQ ID NO: 476 - protein, 21 aa, Homo sapiens
MWLSAFFLARLADSVLEESII

SEQ ID NO: 477 - protein, 34 aa, Homo sapiens
MLFFFSIALSSFFFLNLFLCLCNSRVIGIVLTIS

SEQ ID NO: 478 - protein, 32 aa, Homo sapiens
MSVFRVIQILLFPFSLRYSLGDLMYLNLTTIY

SEQ ID NO: 479 - protein, 40 aa, Homo sapiens
EVKCIYIFLWLLMLLVLHLRIHCQIQGHEDLLLCFLLRIL

SEQ ID NO: 480 - protein, 18 aa, Homo sapiens
MPHPCLPVSTHLEGRWGC

SEQ ID NO: 481 - protein, 266 aa, Homo sapiens
MQIVKLLGLDVPSLCLAELVKTYCSSFKLFQASPSVPAKYVEDKEKMLSRTMQLVELANETWLVTGRHPLPVITAATFLAWQSLQPADRLSCSLARFCKLANVDLPYPASSRLQELLAVLLRMAEQLAWLRVLRLDKRSVVKHIGDLLQHRQSLVRSAFRDGTAEVETREKEPPEWGQGQGEGEVGNNSLGLPQGKRPASPALLLPPCMLKSPKRICPVPPVSTVTGDENISDSEIEQYLRTPQEVRDFQRAQAARQAATSVPNPP

SEQ ID NO: 482 - protein, 8 aa, Homo sapiens
SLFWGCPW

SEQ ID NO: 483 - protein, 28 aa, Homo sapiens
MKKRLSPLSWARCCLCFWLQWGRRTNRL

SEQ ID NO: 484 - protein, 81 aa, Homo sapiens
MYLHSLPFCFAGISCLCCLSKLPVEILSILIINMSLDSYRLYQPALSFCQTELSPLFPYKADLYSCFSRYCLYISLFHSPL

SEQ ID NO: 485 - protein, 151 aa, Homo sapiens
  SITE (4): Xaa equals any amino acid
  SITE (9): Xaa equals any amino acid
  SITE (14): Xaa equals any amino acid
  SITE (17): Xaa equals any amino acid
  SITE (36): Xaa equals any amino acid
  SITE (69): Xaa equals any amino acid
  SITE (71): Xaa equals any amino acid
  SITE (87): Xaa equals any amino acid
  SITE (92): Xaa equals any amino acid
  SITE (95): Xaa equals any amino acid
  SITE (108): Xaa equals any amino acid
  SITE (119): Xaa equals any amino acid
  SITE (150): Xaa equals any amino acid
MRVXAPRTXLLLLXGAXALTETWAGSHSMRYFYTAXSRPGRGEPRFIAVGYVDDTQFVRFDSDARVRGXSXGRLRRQGLHRPERGPXLLDRXGHXGSDHPAQVGGGPXGGAAESLPGGXVRGVAPQIPGEREGDAAARGPPKDTRDPPPXL

SEQ ID NO: 486 - protein, 66 aa, Homo sapiens
ETVGCGFSLSFFFNFLCWVFEQPHVPFPGSLLIYLLELKWMGSRALCVSMLCFLTRLHSEALMPFG

SEQ ID NO: 487 - protein, 29 aa, Homo sapiens
MATLSLRAGLGFCFLLGLTEYFVGFHLIP

SEQ ID NO: 488 - protein, 29 aa, Homo sapiens
MLIRLYMVCGCFLPTTVELNSCIRDLMAC

SEQ ID NO: 489 - protein, 16 aa, Homo sapiens
MTCCLLRSGVPVCLSL

SEQ ID NO: 490 - protein, 37 aa, Homo sapiens
MGLRRHFPALWVLWWPWCPSWRQTRTPSAPSMQMATR

SEQ ID NO: 491 - protein, 39 aa, Homo sapiens
ALRGPAFNWLLCCSSTIFCRAQIALLPLSPASTPSPTTR

SEQ ID NO: 492 - protein, 33 aa, Homo sapiens
MLLGTYFKVYLIFKCFYIFLYKSRKMHFHLQKS

SEQ ID NO: 493 - protein, 196 aa, Homo sapiens
MWFMYLLSWLSLFIQVAFITLAVAAGLYYLAELIEEYTVATSRIIKYMIWFSTAVLIGLYVFERFPTSMIGVGLFTNLVYFGLLQTFPFIMLTSPNFILSCGLVVVNHYLAFQFFAEEYYPFSEVLAYFTFCLWIIPFAFFVSLSAGENVLPSTMQPGDDVVSNYFTKGKRGKRLGILVVFSFIKEAILPSRQKIY

SEQ ID NO: 494 - protein, 47 aa, Homo sapiens
MRQRQSHYCSVLFLSVNYLGGTFPVYQKSRNLQRDKIQETFAQKRIK

SEQ ID NO: 495 - protein, 46 aa, Homo sapiens
GRRRAQLLWHIIFLQLYFWARWQREGSVMPPHRHSIRRRVDSFWML

SEQ ID NO: 496 - protein, 22 aa, Homo sapiens
MLLAVILQLIPPVTKAFVYELT

SEQ ID NO: 497 - protein, 5 aa, Homo sapiens
MPCLF

SEQ ID NO: 498 - protein, 35 aa, Homo sapiens
MFPCCWAHLQRGGKVLCLLVLLVLSLPTEHHVANK

SEQ ID NO: 499 - protein, 24 aa, Homo sapiens
MASELARLLHAFGLMGPRKAGESS

SEQ ID NO: 500 - protein, 29 aa, Homo sapiens
MKSVLSICSFLGCALSAVSKKSLPNQRLQ

SEQ ID NO: 501 - protein, 327 aa, Homo sapiens
MLATSQALDTVWRMAKGFVMLAVSFLVAAICYFRRLHLYSGHKLKWWIGYLQRKFKRNLSVEAEVDLLSYCAREWKGETPRNKLMRKAYEELFWRHHIKCVRQVRRDNYDALRSVLFQIFSQGISFPSWMKEKDIVKLPEKLLFSQGCNWIQQYSFGPEKYTGSNVFGKLRKYVELLKTQWTEFNGIRDYHKRGSMCNTLFSDAILEYKLYEALKFIMLYQVTEVYEQMKTKKVIPSLFRLLFSRETSSDPLSFMMNHLNSVGDTCGLEQIDMFILGYSLEVKIKVFRLFKFNSRDFEVCYPEEPLRDWPEISLLTENDRHYHIPVF

SEQ ID NO: 502 - protein, 62 aa, Homo sapiens
  SITE (25): Xaa equals any amino acid
  SITE (45): Xaa equals any amino acid
MLPSPKPAPLPHFPVAPLVLFAHWXLCSSKGVLPEVRGLSLHPLXHGAAVPALPLPEAAAPA

SEQ ID NO: 503 - protein, 7 aa, Homo sapiens
MFECYCL

SEQ ID NO: 504 - protein, 16 aa, Homo sapiens
FLISLCILIPFLILSP

SEQ ID NO: 505 - protein, 43 aa, Homo sapiens
MFTIRSRMCLHFLVLVICILRECESVCVCVCVCVCLWHLGRVV

SEQ ID NO: 506 - protein, 348 aa, Homo sapiens
  SITE (34): Xaa equals any amino acid
  SITE (37): Xaa equals any amino acid
MNMTQARVLVAAVVGLVAVLLYASIHKIEEGHLXVYXRGGALLTSPSGPGYHIMLPFITTFRSVQTTLQTDEVKNVPCGTSGGVMIYIDRIEVVNMLAPYAVFDIVRNYTADYDKTLIFNKIHHELNQFCSAHTLQEVYIELFDQIDENLKQALQKDLNLMAPGLTIQAVRVTKPKIPEAIRRNFELMEAEKTKLLIAAQKQKVVEKEAETERKKAVIEAEKIAQVAKIRFQQKVMEKETEKRISEIEDAAFLAREKAKADAEYYAAHKYATSNKHKLTPEYLELKKYQAIASNSKIYFGSNIPNMFVDSSCALKYSDIRTGRESSLPSKEALEPSGENVIQNKESTG

SEQ ID NO: 507 - protein, 132 aa, Homo sapiens
MLVIQITSVDFHGIPLSVPQSLTRRQCTCRGWKEDEPMSRLCINQGERKSRWKEVGRWRKQQLLLALDDGPEGLSLLVTPLWVLFPYLSVTRFLILIPCCEFGSLCWAIQSSSERAKLVLELRCRWGKRGLS

SEQ ID NO: 508 - protein, 29 aa, Homo sapiens
MKSVLSICSFLGCALSAVSKKSLPNQRLQ

SEQ ID NO: 509 - protein, 327 aa, Homo sapiens; identical to SEQ ID NO: 501

SEQ ID NO: 510 - protein, 62 aa, Homo sapiens
  SITE (25): Xaa equals any amino acid
MLPSPKPAPLPHFPVAPLVLFAHWXLCSSKGVLPEVRGLSLHPLGHGAAVPALPLPEAAAPA

SEQ ID NO: 511 - protein, 7 aa, Homo sapiens
MFECYCL

SEQ ID NO: 512 - protein, 16 aa, Homo sapiens
FLISLCILIPFLILSP

SEQ ID NO: 513 - protein, 43 aa, Homo sapiens; identical to SEQ ID NO: 505

SEQ ID NO: 514 - protein, 43 aa, Homo sapiens; identical to SEQ ID NO: 505

SEQ ID NO: 515 - protein, 471 aa, Homo sapiens
  SITE (37): Xaa equals any amino acid
  SITE (41): Xaa equals any amino acid
  SITE (43): Xaa equals any amino acid
  SITE (48): Xaa equals any amino acid
  SITE (191): Xaa equals any amino acid
  SITE (373): Xaa equals any amino acid
  SITE (446): Xaa equals any amino acid
STPSGYLELPDLGQPYSSAVYSLEEQYLGLALDVDRXKKDXEXEEDQXPPCPRLSRELLEVVEPEVLQDSLDRCYSTPSSCLEQPDSCQPYGSSFYALEEKHVGFSLDVGEIEKKGKGKKRRGRRSKKERRRGRKEGEEDQNPPCPRLSRELLDEKGPEVLQDSLDRCYSTPSGCLELTDSCQPYRSAFYXLEQQRVGLAVDMDEIEKYQEVEEDQDPSCPRLSRELLDEKEPEVLQDSLDRCYSTPSGYLELPDLGQPYSSAVYSLEEQYLGLALDVDRIKKDQEEEEDQGPPCPRLSRELLEVVEPEVLQDSLDRCYSTPSSCLEQPDSCQPYGSSFYALEEKHVGFSLDVGEIEKKGKGKKRRGRRSKKXRRRGRKEGEEDQNPPCPRLNGVLMEVEEPEVLQDSLDRCYSTPSMYFELPDSFQHYRSVFYSFEEQHISFALXVDNRFFTLTVTSLHLVFQMGVIFPQ

SEQ ID NO: 516 - protein, 43 aa, Homo sapiens; identical to SEQ ID NO: 505

SEQ ID NO: 517 - DNA, 131 bp, Homo sapiens
ggaggctgaggcaggagaatggcgtgaacccaggaggcggagcttgcagtgagctgagattgcgccactgcactccagcctgggcaacagagcgagactccgtctgaaaaaaaaaaaaacaaaaactggtg

SEQ ID NO: 518 - DNA, 162 bp, Homo sapiens
agctacttgggaggctgaggcaggagaatggcgtgaacccgggaggcggagcttgcagtgagccgagatcccgccactgcactccagcctgggcgacagagcgagactccgtctcaaaaaaaaaaaaaaaaaaaaaaaaaaaaaaaaaaaaaaaagaacaaa

SEQ ID NO: 519 - DNA, 100 bp, Homo sapiens
ctgaggcaggagaatggcgtgaacccgagaggcggagcttgcagtgagccgagatcgcgccactgcactccagcctgggcgacagagcgagactcccctt

SEQ ID NO: 520 - DNA, 140 bp, Homo sapiens
ggctgaggcaggagaatggcgtgaacccgggaggcggagcttgcagtgagtcgagatcgcgccactgcactccagcctgggcgacagagcgaaactccgtctcaaaaaaaaaaaaaaaaaaaaaaaaaaagaggggaaaa

SEQ ID NO: 521 - DNA, 114 bp, Homo sapiens
gaggcaggagaatggcgtgaaccctggaggcagagcttgcagtgagccgagatcgcgccactgcactccagcctgggcgacagagcaagattccgtctcaaaaaaaaaaaaacg

SEQ ID NO: 522 - DNA, 61 bp, Homo sapiens
atgccactgcactccagcctgggcgacagagtgagactccatctcaaaaaaaaaaaaaaaa

SEQ ID NO: 523 - DNA, 136 bp, Homo sapiens
ggcaggagaatggcgtgaacccgggaggcggagcttgcagtgagccgagattgtgccactgcactccagcctgggcgacagagtgagactccgtctcaaaaaaaaaaaaaaaaaaaaaaaaaaaaaaaaaaaaaaa

SEQ ID NO: 524 - DNA, 123 bp, Homo sapiens
aggcaggagaatggcgtgaacccgggaggcggagcttgcagtgagccgagatcccgccactgcactccagcctgggcgacagagcgagctccgtctcaaaaaaaaaaaaaaaaaatgctgtta

SEQ ID NO: 525 - DNA, 45 bp, Homo sapiens
ccagcctgggggacagagcgagactccgtctcaaaaaaaaaaaaa

SEQ ID NO: 526 - DNA, 368 bp, Homo sapiens
ggcatgggcaaggacttcatgtctaaaacgccaaaagcaatggcaacaaaagacaaaattgacaaatgggatctaattaaactaaagagcttctgcacagcaaaagagtctaccatcagagtgaacaggcaacctatacaatgggagaaaaattttgcaatctactcatctgacaaagggctaatatccagaatctacagtgaactcaaacaaatttacaagaaaaaaacaaacaaccccatcaaaaagtgggcaaagtatatgaacagacacttctcaaaagaagacatttatgcagctaaaagacacatgaaaaaatgcccatcatcactggccatcagagaaatgcaaatcaaaaccacaatgag

SEQ ID NO: 527 - DNA, 2925 bp, Homo sapiens
ctcccgagtagctgggactacaggcgcccgccaccacgcctggctaattttttgtatttttagtagagacggggtttcaccgcgttagccaggatggtcttgatctcctgacctcgtgatccgcccgtctcggcctcccaaagtcctgggattacaggcgtgagccaccgcgcccggctgagatgggtattattaagaaattaagatgtggattaccagggtaagtcatatttcaatgtgcaacctctgcaagtccacagggtgtgatatggacattaaggagatctatggacgaatagcgtatgataccttgacaagttgacaaaatgtaaaatagttgaatggccatagaaaaaaaccagctttttagccccataggccgagggattcaggagggctggctacgggcattttggaatggaagatgttgtaccaacaaatcaagcttaggttcctggcaatttgcccacatataatatgtgaaagttcagatgtgaaataaatctgcggctaatagtaagaacctagccacaggagttaaaacttacggttctgggaccagatggactgccttctaatcttagtcttactacattttagcggtaaaaccttcagcaagttatttagcctccagcatctcagttttctcatctgtaaaatggtgataatgctactcttacattgggttgtagtaggataaaaggagaaaacgtatgtaaaggatttagtagaaacttattaaaattaagcaattattatttctcaattctaagattctaacctgcaaaaggcataaggcagctgctgagaacagggtgagaagatagggattcggtcaggaaaagtcttgtttccctgttgctgttggtggttttgtttgctcatttgtgtgttttttttattaatcattttcacttgtgtttattgacaagcttaatcaataatgccattgacatttagtaaaagtaaatttccttaagtgatctcccaggtagcaatgtttattcattatgtgtggagtagagataggaattattttattgctgcaaatattttattattggtttttcaagttttaaaagtaattttaattttttaatttttgtgagtatatagtaagtgcacatatttatggggtacatgagatattttgatacaggcatatgatgtgtaataatcacatcagggtaaacagggtaagcatcacctcaagcatttgtccttttttgtattacaaagaatctaattatactcttttagttatttttaaatgtacaataaattattgttgactatagttttgccactgcaaacaatagaaggcttcctgatacagcctcctagtcattggagttctatggcagaattcctaaagtttttaagtttcatgagatggctaaattttggtaaatatgatactttctttgaacagatgctacagaggccaatataaaggagtgtaacagagtgacacctgtgatcagtatctctccaactacaaagagtgtcccttaaatttcttctgtgtggttcctctttttttttttttttttttttgagacgaagtctcgctctgtcgcccaggctggagtgcagtggcgcgaacttggctcgctgcaagctccgcctcccgggttcactccattctcctgcctcaccctctcaagtagctgggactacaggtgcctgccaccactcccggctaatttttttttgcatttttagtgagagatggggtttcactgtgttagccaggatggtctccatctcctgacctcatgatccagccgccttggcctcccaaagtgctcggattacaggcgtgagccaccgcgctcggcctgtgtggctcctcttaagtaatactctgcttcgtccatataagcagaggtcagaactggctaagaatttctttatgtgtgtttatcctgatgttttcctactgtcacttttcttttcttatggattagcattgagggaatggtcagatggtgcctgcgtgagtctgattgaaacattttagcggcggggtgcgggggttgatggcatgtgcaatagtttaggatatttgagttagtggcagaatgtagacatgagggtgagtagagagtgcgtagcagagcaagcaattcaggaatctatgttggttaattacttttgttttgtggacattttattctacctgaaaagattatctaggaactacagaaattaatgacgtgtagtggaaactttgcacagtgtaagtgttatccatttacttctcttagtttccaatacaatgactctcctggtagctgtcatacatgataaatataatttcgttaataaaattatattttatataattgcgtactttaaacaagtgatcaatataactcagttataaatgtacagtaacaaagatcaatggataataaatacttctgcgttcattttcatggatacattctatttttgtttgtctcacaagcagtaatcagactatgaatcatgatatagctccataaacacttactttatagcaattcactgatatatgctccaccaaaaaaaattaagagacggatacaagcaatttaaagcttctgtgtgtgtgtgcatgcaaccgatgtgtatggcttttttttttttttttttttttgacacagagtgtcgctctgtcgcccaggctggagtgcagtggcgtgatctccgctcactgcaagctccgcctgcctggttcacgccattctcctgccttagcctcccaagtagctgggacttcaggcgcctgacaccacgcctggctaattttttgtatttttagtagagacggggtttcaccgtgttatccaggatggtctccatctcctgacctcgtgatccacctgcctccgcctcccaaagtgctgggattacaggcttgagcctcctcgcccggcc

SEQ ID NO: 528 - DNA, 102 bp, Homo sapiens
ttttttttttttttttttttgagacggagtctcgctctgtcgcccaggctggagtgcagtggcacgatctcggctcactgcaagctctgcctcccgggttca

SEQ ID NO: 529 - DNA, 22001 bp, Homo sapiens
ggaagtgcaaagaggcgggcgtgccagtccctggacagctacgacgccatgaatatcttgcccaagaagagctggcacgtccggaacaaggacaatgtcgcccgcgtgcggcgtgacgaggcccaggcccgggaggaggagaaggagcgtgagcggagggtgctgctggctcagcaagaggtaagctcggaagccggcagggcggcgctccggggcccagcgcgcaggcgccgcggttgggggccggaagcggaggcgttgcgcaggctcaatgtgccccgtgtgaaattcgggaccaggcgccgatcccactttcgaggacgttgccccgcaaaccttgtgcccacttccacgaaaccttccttgatctcgccctcgtcttagtttttcccccactgatgtatttcacatggctggaacagtgtctagcacaaaagagaagcttaacatttaatgaatccgtgaacccttggacagttcaaggaaattcggatcactttttagtttgcctgcacagcctatttattgagcatctactgtatgctaactacatgccgtgcacctgacttgcggaatccccaataagcactgttcgttcttagaggggcactgtcatctctgttgcacgaagtgagatggcttcagtgaggggaaggcacattttaaggagaggcggacagccaggctccacgccatcgggcgagccctttcgtgcaccgccccctagacacatacacacaaacacgggctttccgtatggctctttaaatctgtttggtgtacacccaactttcatttccttagctagtctgatcctccgccgtgggtgggaggtagtctaggtttttagaatctcagtaggctgctgagcgctgtttgaaatccgcgtcctgaaggcaggggacagggcttcagcagacttggggtagtcacttggagccatggctagaattcagatcgtctggcctaatgcatacctttatggctgttttaattgtctcacttgaggttaggaacccctttggtttaggccagggacctcctcccatacatccttgatgacccgtggtttactatttgaaagggagtttacaaaacccaggcgttgcctcatctgcctaccctcacccccagctaggacaggtgcctcttttaggcgcctagtgctccctttctcataaccccagcaccctggactgccattttctgtggtgggcaccagactcacagttcttgaattacctctaggttctgaatgtcctgcctataactttctccccaggcccgtacagaattcctacggaagaaagccagacatcagaactcactgcctgagcttgaagcagcagaggcgggagccccaggttctggccctgtggacctgtttcgggagctgctggaggaagggaaaggagtgatcagaggcaataaagagtacgaggaagaaaagcgacaggagaaagtaagctggcctcacccacttcatcagaggggccatgaatcgagttggagggagggggcactttagccattggttgtgaccaaggtcaaacaagagtgaacacacagaatttaggaccataccaaggcatgacactcaaaaagcgttggctattgccgtctgggcgcccacaggggttggaggtagatgctagaggtccccagctgctgggcaaaccgctcagttctccaaactggaggagtctcaaacctgatgggcttttaaaaatttaaatcagccggctgtggctcacgcctgtaatcccaccaccttgggaggctgaggcgggtggatcacctgaggtcaggagttcaagaccagcctggtcaacatggtatctctaaaaatacaaaaaaaattagccgggcatggtggtgcgcgcctgtaatcccagggaagctgaagcaggagaatcgcttgacccaggaggtggaagctgcagtaagccgagattgcgccactgcactccagcctgggtgacagagcgagaccccatctcaaaacaatcaaacaaaaagtgaatcaatcgcctcttgctttttggctaagatcaagtgtaaaaggtacatcagtggctgtgcatggtggctcacgcctgtaatcccagcactttgggaggccaacgtgggtggatcacctgaggtcagaagttcaagaccagcctggccaaacatggcaaaaccccgtctctactaaaaatacaaaaattagctgggcatggtggtgtgtgcctgtaatcccagctactcggggggctgaggtaggaggattgcttgaacctgggaagcagaggttgcagtgagccgagatcgtgccactgcactcgagtctgggcaacagagcgagactccatctcaaaaaaaagaggtacatcagctcttgtcatttatctgctgtctctggacttgctgaccccacccatcgctcctctgctttgcttgatcccttcaggcttctcttcaagtctctctgcaaagatgcctgcctctgaacactcaagtggctccacttgtcccctccttcccctgctgttactgtacctgctactgtccccccagggggagctttgcctctgtttgtcttccatccccagcacctggtccaactggttcataacaagccttagatacctgttcgcttagatacctgtgtcagggagacacacctgacaccttgaaagattatatcacatctcttgtatttcctggccccctcaggagaggcaagagaaagctctgggcatcctgacatacctgggccagagtgcagcggaggcacagactcaacccccttggtaccagctacccccagggcgagggggccccccgcccggcccagccccagatgagaagatcaagagccgtctggaccctctgcgggagatgcagaagcatctggggaagaagagacagcacggcggtgatgaaggcagtcgcagcagaaaggaaaaggaggggtctgagaagcagcgacccaaggagtaagaagaccccacctcggcagaccagggcccagaccttcagggcttggcagcagcccagcatgggcactgcagcgtctctggtcaggacagccagggactccgtgaagggctggctaggtggagaagtggttctcagcatgtggtccagggagccctaggggtcctgacaccctttcccggggtgctgtggtgtcaagcctattttcctgacactggtggacttttccactcgtgttctcaggcatgtagtgcaggtttccagaggctgtgtgatggggagacaccctcactctgatggccaatggcagatgcttgtgtccaaactttcttagttttcactaatgatttgcagcatattaagagaacccatttaaacaaaagctcttggggtccttggtttttaagagtataaaggggtcctgagaccaaagagtttgagagctgctgggttagagagtaaaagcaggcttctgtctccaggatgctgcacccctggtctagagggggtacactgcctgtagtcttctttcctctagaaagggaaactgagggccagggggctgctaagtgtgctttcttgacctggagaagcatcagattttaaagactggggaggaccaaagcccacagaagggaaggccagagacgtgcccatggcgtcccagcaccaagtggctgcttccagcaggcctaaggagctgaggctggggtgtgctggatgcagcggggcttccaggcggcagctccctctatgggagaggttgggggaatggcctcctaggggctaccagctttctgacctcactcctctccccacaggcctccatccctggaccagcttcgagctgaacgtctgcggagggaagcagctgagaggtctcgggcagaggccctgctggcccgggtccaaggccgggcactacaggagggtcagccggaagaagacgagacggatgaccggcggcggcggtacaactcccaattcaacccccagctggcccggcgcccccgccagcaggaccctcaccttactcactgactcctgagggggtacaggagaggccgctgctgccagccgtcatataaaactatttattcataaatattttccaaaatgaaaataggtttaccaaaaaatgtccctcactggggaggggaggagggggcagccctcgcccccgggcccccagggtggggctgagaggaaaacctcccggccccctccctgcttcctgggagagggggatgccccgtggcttggggcctccctccagtcttccagggcagggccctcacctgggcagggggatcagcatgcgggggaagggggtgggtagagggaggggccggtgtcactggaggtcccggtcctccaggtagcggtactcaaaggtgaagccttccttcttccgctggccccacttctcgtagtcaaagtagatgtaggtgccctggccgggggagaaggcggtcagtgagtggacgaggaggtggtctgggatctgggccggaccaacagacaaaggggacaattcttagggctgtggatgtgtcaggcaccgggccagctgccctgcacgcacacactctcatccatcctcacaaggttcttcttgggtaggaaatgttatcatgccacttcagcgaggaggaaacggagggggccgcagaggttccaccgaagccagctgccagaacggggccccagccccaggtgtgagtgcacagccttcgtttcctcgagggctgtggcttttgagcacctctcacgtgagtacaggatgcacagcctagcatttaatcttcacaaagacctcgaggcagtgggtactgtcacccttgttctagagaatggaacagtctcagagtctaaatccaagcactctgcagggacattttattggtgacggaagtggtgtgggaatttctgaatgactggatgccctgaaatgtactaacttggaggatggttttgggccaaaccaggaaaggacaggaagtctgtggttaacatctgaggacacaatgggagaggacctaggttctaaatgaatgtcttaagtgcttcaaagatggcaacctgggagaaccaggagaggggactgagttctctgaggacaaggaccttgtactacttcatccccatgaaggggctcggcatcagggaagtatttggtggaaaaaaacatcactgtagaacacaccaactgaaagtaatttgaaaaaaaaaatccatgacactgactatgtagcagtcaccattaagtacttacatgttattaactcatttaatcttcataacaactgcattaggtaggtggtcttccccccatttttacagataagttaattgagacacagaggttcgagtgacttgcctagagtcgcccagctggactgggctgaaacccaggtaggttggttccagagtgtttgcaagcagcaggaatttcccagtattagaacttgagaagcccattcaaaaaaaatagtttcggcactgagcccctgccctgctgagtgctgggacctggaggtgaagtgggggccatcaaggtccctcggcagcagagcccacagcctggtgcagggacacatactgggaaaatcccacaccccaagcgagtgtgcccagcactgcaaaggggaggcactgggctgggtggctccaggaaggtttctttgaggaagggacatttgggctgagacctacaggaggcctaggagctggccaagtggaggatgagagggcggtgttccaggctgagcagacagccagagggaggagtacttggtcaggctgagggactgcgccagctgaaaggtggaggcaagggagcagaggccagcaggggctgcctggagcctggggactctaccccaaccctagcagcgggaagagagggggcggggccctcacctgctcaaactcgtcagtgatggtcttgggctcctcgtgcctctggaaccacatcatgtacttggtgtggaatcgccatgactgcttctttagggccttggctgccagatactgtgccttagtgccctgggggaggaacagtggagagggggatcagggggcccccaaactgggtggggagccaggggaatggggcaggacatcagggctgaaccccggcccccgccacagaccacagttgggctggacaatcctcttggagatggggctgggggcacagaacataccaatgctgatcaggagaaggaaaatgagacaggaggtgaaaattgctttcagagaagctttgagaaggaagaaaaactaatgtgtgatgagagctgagagaggaggcaatttagaaaatttcccaagtggggatgagggtggaggtcactcatgactcactggggttgggagggggctggacagctccccagtggtctccagggaggcctgagaatgtgccgatgagcagagtggggtcggcctagactggggctgctggagcagggctggggaggggccgcgggtgagccagtgggcaactggaagcggggctgaggtgtgcctcagtggaccagcctcgctgtcaacccaagcagttctaacatctctgggctggaaggcggggacggggacaggtggatttggggcaggggcccaggagtgggaatagggagggggtgcggtcccagtggccgcagtggggcacccacctcacccctccagcccgaggggggacggcggcggtggcggcgaagccggggggcccgaggctgccccgggggccctgctgtacctccagatagtagaagatgaagaagagtgtctcggtcgacaggcgctggtagaattccacagtgtccgagtgtgggggtggcatctggtggtggtaggggggcgtcggacaggggttccgggggaggtactgcctgtgagagcaacaggaaggtcagtgccagctgcctactagtcctgtcgtgatcaaaagggtgctcagacatgcatccctgcggggggaggtggtacagaaagacccagggcggtgctgaccttcagtggagagcccaagtcaggggcctggtgctctacccacagcctcacaggttcagccactgcctcctccgtaagactcaagtcccagaccatcccccttccctgtggcccctcaccgaatacgctcagagtcagaggggtgaggcatgtggtgccaggcggcctcttccatggcctgctgatagagctgctccttggtgaggggcacagggcccagtggacagacacccagcgacagcggtatgttcacctctgacagctgcaggggcggctgggctgaggccggaggtgctgatgtactgctcaggatgatgtctgtggggagggtgggggtccggccccctcagtggtgaggatgggtcaggggcagcccctcctctttggcccgctgcttccccaccatcctgggtccctcacctcgctcggtcaggtgcagcgttggcacagggtcctcaatgccagagctgatggctgcccgttccgccatggacttcaaggagctcagaggctcaggggcctggggaggaaacaagaggcctggcctgagcacttgggctgcaggagcaagtgcagcctgacacaggccccagatgctctcacctgccctgtttgggggccgtggagggccaacgacccactccccacaatctacccatgacaggtaaaagcatcaaactgtagggaaacaatcggagaccacgacgcattcatcagcagaggaacgtctcgtgagtgggactctgcagcatggaatactacgccgagattttcaaaatacaagttcgtgacatactacagaagtaaacgccaacctgcagaatatgtacagtgcgctaccatttttgtcaaaggatgtgccaatagtacacgctccttcactagggacacctacacgctgggagagctcccgcctgtcttgaaggaggcaggaggtctacatgctcagctgtctgcctgtgactggcatggggtgactggaatcggggtgggcccagcccggctaggcttcagtctccttgctggaaacaggtaggttgggtctccagccccgcagccacagcctcgtttcctattacaaaggttacagcaggcttctgttccccaaagtcagggctggttcctcccatctcctccagccacgtgcagctgtcccaaaccccagccctgtgctggactctccacaacgagtcagtcgccaaggcttatccattctgtctcgctatatcgcccaggcaggtctcaaactcctgggctcaagctatcctcccgcctctgcctccctaagagctgggattacaggtgtgagccaccacgcccagctatccgtcctgcttctaaaccccactggatggctcccttccctgtcgtgccaccatgtcccacacagcccaggcctgtcctctcctgcccagaccaccctccctctatcctgtcctcaccagccccaggggacctttccaatgaagtcatgttgttccttctctactccaaaccttgccatggttcccgaccacccaccccagcgattcatttttgttgttggtggtgttaaaagatatggaccccttctgaaaatctcaaagctgctgtttccctttttccagaaaaatgcacgcactataaatatcctgtccacctacttctaaaatttgggccgggcacggtggctcacacctgtaatcccagcactttgggaggtcgaggtgggtggatcacctgaggttcggagttcaagacctgcctgaccaacatggcaaaaccccatctctattaaaaatataaaaattagcctggcgtggtggcaggcgcctgtaatcccagctactcagtaggctgcggcaggagaatcgcttgaacccaggaggcggatgttgcattcagctgagattgcaccactgcactccagcctgggtgacagagcaagactctgtctcaaaaaagaaaaaaaaaaaaaattaatgcttctgttgggccagaaactgttccaagagctttatgaggatgatttagtcttccaaataaccctacatagtaggtataatcgtgactattgccgtttcccagatgaaggcacagaaaggacaatgccaagacttggacctggacagcctgggcgcgcacactgcctcctggacagcctgggcgcgcacactgcctcctggacagcctgggcatacacactggtccccccatggaagctgcgctacagtatactggctcacaagccaagccccagctcctgaccctcgatgatcaggaccccaccgtcctatcctgctacacccactatctcagccctgcagctggtggcactgtctcctgcagagtggacacctctctcctctctgctgcatcctgcccagcttcctaagcacacaggcagatgcatgctcctcctaaagcacctcctgaagcccttcctgcagctgttagcccccctgcctggtccaggtctcagcttaaacatcaccccctctcagaccttcctgggcctgtctcccaggtcaggtcagatgcccctcggtgggcccaccgcaaccttccctgcagctgccccagcagggaagcttcctaaagggtggaaccaggctgcattcacccaaccagtctttctacttgtgcagaaagtacaccagtctatgccttgtgaggacaaacggggacagaaactgagggcctgcgggggggatgaagatggagacccagagagagcaagcaacaagtgcaaccaagagaaaggaaaagagacccagagaaacagagctttggagggaacaagagaggaggtatgagagcccccagagatcaaggtcacggggagggtggtacagaaagacctggagaaagagcaagtgtgagaaggggacagaaagccagagaaagagatccagaaagagggtgggggcagggggtgcagctagagacctggaggaaagaaacaacagagtcaggacacagaggctcgggggatgtccgaggagcccaccttgatttctggggcggtgctgaactgtggaggcccattgagcagggcaccggctgccttggcatcactgaagctgggcgttggggagctgggaggattcacaggcagtggcaccaggaggctgggtccccctgagttgttccctgagcctggggccacgcccccagcccccgttggggctgccgcactgggttccttcctggagagagagcatggaagagggggttgagaggagggtccctgagggtgggatgggcagagaggcctggctggagagaggggagactgcacagatcagatgggatctgagaggggcaggtgagggcagacagatgggagaaagaagtggttctctgggcaaacaaaggcagagcccaatctttggaatggtttctcatcagcagagcagagctgtgggggtgggggtgaggattctcgggtgctccaccaggccacaggctgatcaaaaccacttgccctgggcaggtgttcacagggcccactcccccttgggcaggccagctggagctggggtgagggggcaggaagcaggcctttcctttgtgcacactgatctttcttagggcattcttcgggaaacaggcagacccagtggaatggtctgagctaagatttgaaggagtggctgcagaggaataaggacttcgggacaattcactttgaaaagtgaaacagtgaccctccggtggcagtcaattggcctcaggcaggtaacagaaatggggaggaaagggtatggggctcttgagaaaacttccacttagatgagaacgtattttagaatgttctgaagggcaaagcagggaggctgatgtagtttccttgctggaaagaagtgggggtgtaacacccgagggagatggaggatagcgcttggccattcccagcagcaagggcggggggttcagaacccaccgatgcgggggtgaggcgcctgcgcctctctgtttcaaaaggctgccatcccaaccctgccgatggccgagacactcacgaggtgctgggaggtgggttgtgggggccggaaggggggcccaaggcctggctgctggcattgttgcccccactgctgctcaaagccacctctgccgggctgtctgccacaactgagctgtaacctgggaacaaagagtaaatggaaagggctgctgcctgctgcccagccccgcccacgccccccaccccgctgcctcctcactcactggtggcgccattctgcttgccagcccctccaccggcactgctgttactactgctgctgctccctccacctccgctgccgccgcctccgcctccgctaggctggacgctggggggccggggctgggtcgtgctgggcccactgggagctggtggggccacagcctgggcatagggagcaggggtgcccgagttgtggctgggagctggactggccttggggcccagggcacttgggggtgctgcgggggcggggaccccattgttgccaggagtggtgctcaaggcagaggcagcaggcggggggccggaggggtaggtgggcggcacagctggggactgagggtgctggttgctgtggacaggcttggagccgtttttggctggagactgcgggtgggagagagcagagggtcaggacccagtgggccagctggtctccctcaccacccccacctcaggctccatctttgtcccagcagcctcctctctggcctcgctgcccccacctgctcctgccctcttggggacctgggtgaccttactcaccctcatggcttcaatcaccttcatgcttaaaacactcacactgatttccagcctgcccagcttcccaagtcctgcctggacaccgccccatggacacccccacagggatctgacacacaacttaggttgtcagccagagaagatccatctgttggaagccagaggactagtgggaaacacttaagtgttctcaatatgagattagctggagccgcctaatgtccaagagtagaaggaaaaacagctggaaattggatagtaattctgaatgtcacctgaagggtcacagaagctactcacagggctggaagttaccagcactccagaaagtggtgggagggtaaatgtgctcatggtatccctaccgcaggcaatctgtggacagcactccggctgctgagcctaaccacctcctgggcttctttccagccaccccacaggcaccttgcgcttaccaagcgcccaacaggactgactacccacttctctcctgggcatcgctgcttggcagtgggggcctgggaaggtggcagagcccagcctggcccctggagtacctgcctcagtgtctctcctcatcacctcctggccctgttgcccgccctcactactacctgcgggtccccttagtctccacaccagcctcctcaatgcccactcagggtgtccccttggaaccatccatcccgttagcccacagaggggcctcaggcccatgctgctcctgcctaacattgttctgtagcagcgtttccgaaagcgtgctcctgtcctgggagatgttaaaggagttgaagaagcactgcccgccaccgtctcctctcagaaatttgcagtgtgtattatcagcacagcaaaggccccatcgcttcctaggcttattggactctggaggccactcaggtccacaaagcctgagcccctcagcctgacagtcccagtccctgtgctcacagttgggcccctggccctgcagacctggccagactcatctctcctcacttccaaactttctgtcacaacttgcccatgttactggctgccacctctccctgccaggcaaactcacctgactgtgaagcccagggcactccacagcagcatctcctgactgcctggccaggccaagggtgacctgtgtgctacccccttgaccacagcaccagtcacctgtccacttgccctgcccacctgccctcagggcagcactgatttctgagccacctgtgtccaccagcccagcacagtggccggcgctcaggcctcaagatgcctttgggaagcaacagaggagtgaatggcgtgcccacccggtccaggctcacacccacctggctgacttcactgtctgtggaacgtcccctcttcttatcatcttcagagttttcctgaggtaggggaggcagaatagaaacctgtgtgacctctggggctctgatggagaaccgccaatctctgaatgccccggggacctgggcccaattgactgccattgcggccccagagctggtcaaatggctgtccttaatctgcctggagaaaccatctcaattcaggctctccagtcttcttgttttctgggagccagcactgacccaccagcctcttaaggatctgggaacctgctctccacagggaagccaacccttggatccctgcccaaggtggccagctacccagcctcctcaggcagcccaggcaccggcccctcccacttcccagatccaggacctaaactggcgcgggatgcaccctattgctctttatgtcctttagggacccagatataggaccttagcgtgtgctccaagagcctagaccctggatacctagatctgtgtttcctcaattacgctcccatagccactttggagtgacccagatttgtctcctcgagtcctgccctgctggaaacacaaggtactagtgtcccgtggggcctcaccgtggtacagttggctgggctgggcgggatgggagagctggaggtggttgaggtgggcgtgctgctggactggttgaagatctcatcctccatgtggctgtggctgggaggggaggtggcgaccagcgcctgtgctgtgggggcagaagaagggcatgcttagctggctcacacagcccattctgggccctcacttcctgtgccacgatcagccccagggcctcacgaatgtcctcgaggtccaggtcatcgtagagaaactcgttctcctcgaagtcggggtcctgggatgagtcaacatagtactcaacgtcgtccttgatcttgcggatggcgtcaacgaggatggagtcattgtccagcatgcgcaggatggtctctagcatgcgcacgtggtagcggtgcttctcgatgtgccgcttcaagccctcaatccggtcctgcttctgctggcgagcccagggccaggctcaggggctgcagagcacctgcttggcccctcctgcccccacagaacctgtcctcagtccctgacccctgtggagacccaaagcctccacgccatccccttcggggtggggcagtatggggtccacccaccctctgagccctgtggggaccaatcttagccttgacatcttgggatcccactgctccctcctctccccacacctttctggctccaggagtccttggaaacctctaaaagacccagaggtccttgtgccatcccacgacttggcctccatctgcacctcacctgacagcccagatttctcaactgagcccgcccaccactgtgactgcctctggcatacagataccctccgacctgctccagcagtaacaatgataacccccatttgtgaggagcttgctgtttagaattgtgatatctgtcatcactaggcccccaaccctacccatttatccctgagagagcccagattcctaagcctcgctcctgccctcccctcaaggcccctttaggatttaacatcttagccttggttccaaatctctgctctgttcaaggacccatcatctccccgaaagcccctggttcccaaacccctcagagtctgacacccaaccctgtcatcttccacttcctgaccctctcccacccacagcttccctgaggacccggctctcccctccctgtctttctggtttcagcaagtctgtacagtttgtatccctttgaactcataccccacaatcccggattttagaacctgggaccccaacatccagctttgtcccagactcctgtcttccttcaggcctggttctctgccttctccatgttctgccttgtctctacccactgtgctctccctaggaccagggccctctgggtgccaggaggcctcttgccatgggtgtccttcaggtctcacttttactctgtggcccaagctcaacctgcactcaccttcccccaagtcgctcctcttcacaaaggccccacggtctacccagacacccaggggagcctgagattctgtctgacctccttcctgccccacgcgtgcagctgctaagccctcccaatcctgtctctcaaatccctaatcccggctgttggccctgtccgcctgaggaatccaggccccaactcccaggagcataaatgactggcctcctgctggccagcccattcccatgcccatccccatcccaaaggtgtcgggtctccctcactcacatccttgtcgcccttcttcttgcgtgtctgcactgacagtgactccacttcactctcaaactggtccacctgcatgttgagcgtgtcgatggtattctaggggagggagaggaagaggaagcccatcagctagggttccgcctacacccagggctcaggatcctcagagttcacctcctcttctctaccccaactcaccgtgagccactggccaacctcttccttctccttctgggcaggatctaccttctgggccaggcccaggccctctttgctgtaagctttggttttggtctctcgttccacaactttgaaccgttccatttgctgtagagagtgcagttggcaggggggctctcaaaggtgggaaaggagctgactaagggccagcagacactccgacctgagcctcgtgaccctactttctgagctctgagtccgctgcctcttcacttcccttaggtgcagaaaccttacttctcttgaggacctctggggtctggccgctctgcctccgccccttgggatctcaagaatctggtgaccttcccacctctctgggactcaggctctgggctcctaccgtctcaatgagcttgcggttgtctataagctgcctcttgtccttgatctcgttggacgctacccatgtcttgatttggtccctcagccgctgcagatgggaaaagcaagaaagtcagacctcaggacccaggaactggggcccacagctccttctccctgggacccagcagtccactctcccagttccctctaccctcaggacaaaggcgtccaggcccccagccccctcacttgtagcttcttaatctccttctttaggtcagcctcatacttttctttctggttcgcgttggctgcattgtggagctgagggatggagagaattgagaagtcagtgtgggaggggatgtcccagtacccactccagtgattcttccttatgctagggactcgaggaccccccccaacccctacccccaatccatcttagagctgattctcttaggtcctcagcatctgcatatgtagcccctcccgctggtcaacacccagaggtcctgagccgccttcctgtgccctcctctctgaagacccagattattagggtctcagcccctgtaccttctgccaaatatcttcaaactgctccacgccctcggacaccttcttgaggcagcgatcaatctcacctggccagggaggaacaaggctgtgagaatcctgcccaggtggcaggtatctaaagagcagtcctcagaagagggagcatgtggctacaggtgcagcaggaagtcagtctagtaccttggagtttgcgcttgtccgccatcttccctgccctacagacgcactctcttcatactctcttggagacggacgctgctaggagagattggagaggaattaacacgtattccctggctggtaaaaacccagagacatggacctagtcagcatagtgaggtaggtgggactggtaaagagaagaagcatttgctatctgacaagagaccagccccagttctcctgatgctcgcttgactgcccagcatagtgtctggccaacaggggaccccataagtttgttgaaacaagaaaagttacatacttttttgtgtgcctctgactcaggaagtggaaaattcctagagcatggagtaccttctccccagaatacactcaaaaaggtttttcagagcaggacagtcatgctgcacacagctgatgactgggatggaggcattagccctggaaatcacacttcctactcagaggggctgggcagaggtggctaggagaggtcatccctcagacaagtcaggagacaaatgaaactggcagctcacagagaagggcgtgtgtgtgtgtgtgtgtgtgtgtgtgtgtgtgtgtgtaagctgtaggtaggagaagaaagattgggggtgggggaaaacgacggcgagcagagatgccgaaagctgtgaagagctgaacccgctcatgcagacagggctgaatgccaagtagaagggactcaaaccaccaagacatttattccagagcaggatccttaaaccaaaaggaaataacactcctaacccaaagaagctaataccaagaaggcttagagatttgggggcagaaggcagtacccaagagagacctgggagaagacagaaatcttactaagataagagggtgcaaaggtaccgcagctgtgagggagccgatctgcactcatggaggaatcccatagcaagtggattggtaatttagagtcagggagacatagaccatcagggcaggaacccaaaacttcaagagaggagcgtctttattttaaaggaagttacctggaacccagagaagactgaggtcaaaagggagttccaaggagctttagtccaagggaagacataccttagggcctgacagcgagaccaggggagccctgggaagagaggcttatgcctcagaagaagacttctgagataccagcggagattgccctcttcccctccagggagggggcctacaatgaaaagcacagttccctgggatccacgggccgctcccactctacgtgtgcagggcagggaaccctggagtagtcacttactgtaaagacagaaacagccccatactgaggaacaagagcctcaatacagagggaagtcacaccaaaagagtcctcacccacaaagaagggaacatctggcaaacagtgctatccaacagaactttgcaatgctggaaacactctatttgcgcatatctgttggccactgaacatctgaaatgtggcaagtgtaatggaggaactgaatttttcatttttaactagttactaatcaccacatgtgactagcagcaaccatatgggacggatatgctttagaacaagaagcccataaaggacagggctggtaccttacccccagggagaattttcccaacaccgcagggacccattctgggtgataataggtaggggtgctaccttacacttgagggaatttaaatctcctcagtaaaaggcccaacctaaagaaagccgcagcagcccccgcccaggtcagctatcacgccctacctggggaatctctaagaaggcaaagcaaccaacaaaaggacccaggagaaggtgccacagtggggattcaggctgaggaggggaaagcccctttgacccagggagctcacacaaggcaagggcctggacaccagagctcaggtgtgcagggatcctcaccaaagtccaacaccccaacacagaaaagcctcttactgcatagggggaacaagaatgtgaaacgagagtttacactccctctttccatcccaagaacccaacagagggtcatgggcaggtgctccagcccagagagagaagaggtctcatggtctacacccctaaacaaggcaatcaacaccttaggcaggtgacgccctccctgtgtctccacacggaaaggactggtatcctagtgcagaggaagaatacccacagagaggagaccacactgtggcagcaagagaaggaagtcctggaggggtcacaagccagaaggaggggaacaagagcgctaacccagggaggtgatgtttcagacagaacagtgtgacatcgaagtcggctacagctgagacccagtgaggaggcagctcctccacagagaaggggcaagtgccagaggcccagggtacttgtcccctagagaggctggagccttagccacagtagagacaacaccttccccgctaagaaaatccttatatcatgagggtatctgtacctctggtccccccagcaaaggaccagagagaagggaagctggagcctgagtctcgaagcagagacgccgccagagaagaaagagccccatttgctgtagtcaggggggcatccaccaagatcctccaaggaaggtggtgatcgcaggtccactctcaggcgtgaagaacctgtgctccagcagcaaaggctctccaagagcactgaggaatctgggaacctcggcccaggaggagacttacccaagaggaacacacatccccacagggaagggacccacaaggcgggtggcggggcggggggaggtgagcaggacaccagcctcacaggagccaacacgctaaaatcagagccaaaaccagtaaagaagagccccccagacttcatctcagggaagatgataccaccacacaaagactcgaggagggaggggcaggaggtcagccctgggaaactaacaccgggtggtccttaaccttgggggccgtcatgtgcccacagagtggtctttgtcatgaggcacctttgatctgggagagcttccgcctctgcagcaaggagctctgagaagtgatgttgaagggtgatccttaacccaggtggctgctgacgtggccacacagaggctctgagactccagaagaaggatgcgttagggcctggggtagaggtagtcatctccactgagatgccccatgccaagggtggggggctggaatctcccaccttggaaagtctacaccagagaagtctctggtcccagggacagggtctacagtggagtctcccgcttgagactcaggtatcttacatccacacagccaggaaactatgccttaccccatacagtgacaaatcaagagggggttttggaagcatgagccgggggcacctgcatccgagaggggtcctcagccttacggtggggacacatgcagaggcgtggacacctcaaatccagaaaagcagccataccaataccaaggatggcaagaaccttatccctgggggaggtgacaccaagaaagggtccttaccctggagagaaggcacagccccagagggaagagcccccacctcgcagtacaggaacccgggtctaggaagcttcctactctcatggggtaccagcagcggggccagaaggcgaaacccttgttctccaactgctgacacccagcgtaagggtagatgggaagtcaacaaacccacagtgtgggatctgatgcaaatatcaagggcagtgggcttcttggtccttggagagctgacaccctaaaggaggagactggtgtgaagatggaagaagcctcatactcaggcaggggtgaagggagggaggggagacatcaaaacccctcaccaaaaggacaggagagctcaccccggggtgggtggccgccctgcactgagaggcagggactgctcagaaagaggggctggtgctgcccgcagtgggagctcactaacatggacagcgtggcggcttagtgtctttcaccaggcacctgagcgccaggggatcccagcagcccccagcaacaagaccacagtggtcctgatatcactgggagacgcccacacccagaaggtcggagagtcacgatgcaggggagttcaaggctgcaaagccaggggcagacgccaggatcaaagaagtgtgagagctgagaccagacgtgggccacactgaggacggtcctgtaccccaggtgggggaaagccaaactcccccaaaaaggcaggcgcccagtgcagcgggatggcgaggctggagccacccagggcgctactcgctatgagagggaagagctgcagactacagaggtggaaacttcggcaaaggctccaactaacggggagtttctcctccactcctctcccaagaggctcccatccgatacagacgggcagctggaactgagatccaggggcgaggctgccgcgtcccgggacgccagtgaggagggatgcggaggcgcctcggtcctgggaagggtgactcccccacccagctggggtcctcgtcccgaccaccaccccccctccccgccaccgtcgagggagaagccccggcgcggagctgccccacaacgcgaaggaccgaggccgaggggggcaggcacctgagccccgagagggcgggcacctgggaccaggggcgcctccatccttccagccaggagccataccgacgcggagaggggcgggcacctcgcgcccgggaggcttcgcaccctcacacccctaccggggggcccgacgcgatgccacgcggggaggcggcggcgggcggggcccggggctccgggctcgcggaaggacccccgggaggcgctgaggaacgtgaaagaggcgcaggaacgggagggcgagagggagggagccgccccccgccgggagccccgcgctgcagaggcggcggcagggggcaggcgaggggaggccatgtcgcgacagacggcggtgtcgccagggcgggaggcggcggggagggcggacgatggcgccggggggaggaagggaaggggtccggcccagtcgagcctgacgctctcaccacaggagctggcgccgccgctgaggagcgtatcgcgacaggcgggggaggcgagcgcccgccgcctttttctcgcgccccgggcccgggcgctatcgcgatagcggcgcgtatgtcggatagtgggtttgtttgattgggcccggggttgttctgacgacgggggtcggggctcaagggaggccgcggcgtctgccgatggctccgcggaagctgaccgggccc

SEQ ID NO: 530 - DNA, 13994 bp, Homo sapiens
  misc_feature (156)..(156): n equals a,t,g, or c
  misc_feature (10132)..(10132): n equals a,t,g, or c
  misc_feature (11830)..(11830): n equals a,t,g, or c
ggaagtgcaaagaggcgggcgtgccagtccctggacagctacgacgccatgaatatcttgcccaagaagagctggcacgtccggaacaaggacaatgtcgcccgcgtgcgacgtgacgaggcccaggcccgggaggaggagaaggagcgtgagatngggtgctgctggctcagcaagaggtaagctcggaagccggcaggcggcgctccggggcccagcgcgcaggcggcggttgggggccggaagcggaggctttgcgcaggctcaatgtgccccgtgtgaaattcgggaccaggcgccgatcccactttcgaggacgttgccccgcaaaccttgtgcccacttccacgaaaccttccttgatctcgccctcgtcttagtttttcccacactgatgtatttcacatggctggaacagtgtctagcacaagagagaagcttaacatttaatgaatccgtgaccccttagacagttcaaggaaattcggatcactttttagtttgcctgcacagcctatttattgagcatctactgtatgctaactacatgccgtgcacctgacttgcggaatccccaataagcactgttcgttcttagaggggcactgtcatctctgttgcacgaagtgagatggcttcagtgaggggaaggcacattttaaggagaggcggacagccagctccacgccatcggggagccctttcgtgcaccgccccctagacacatacacacaaacacgggctttccgtatggctctttaaatctgtttggtgtacacccaactttcatttccttagctagtctgatcctccgccgtgggtgggaggtagtctaggtttttagaatctcagtaggctgctgagcgctgtttgaaatccgcgtcctgaaggcaggggacagggcttcagcagacttggggtagtcacttggagccatggctagaattcagatcgtctggcctaatgcatacctttatggctgttttaattgtctcacttgaggttaggaacccctttggtttaggccagggacctcctcccatacatccttgatgacccgtggtttactatttgaaagggagtttacaaaacccaggcgttgcctcatctgcctaccctcacccccagctaggacaggtgcctcttttaggcgcctagtgctccctttctcataaccccagcaccctggactgccattttctgtggtgggcaccagactcacagttcttgaattacctctaggttctgaatgtcctgcctataactttctccccaggcccgtacagaattcctacggaagaaagccagacatcagaactcactgcctgagcttgaagcagcagaggcgggagccccaggttctggccctgtggacctgtttcgggagctgctggaggaagggaaaggagtgatcagaggcaataaagagtacgaggaagaaaagcgacaggagaaagtaagctggcctcacccacttcatcagaggggccatgaatcgagttggagggagggggcactttagccattggttgtgaccaaggtcaaacaagagtgaacacacagaatttaggaccataccaaggcatgacactcaaaaagcgttggctattgccgtctgggcgcccacaggggttggaggtagatgctagaggtccccagctgctgggcaaaccgctcagttctccaaactggaggagtctcaaacctgatgggcttttaaaaatttaaatcagccggctgtggctcacgcctgtaatcccaccaccttgggaggctgaggcgggtggatcacctgaggtcaggagttcaagaccagcctggtcaacatggtatctctaaaaatacaaaaaaaattagccgggcatggtggtgcgcgcctgtaatcccagggaggctgaagcaggagaatcgcttgacccaggaggtggaagctgcagtaagccgagattgcgccactgcactccagcctgggtgacagagcgagaccccatctcaaaacaatcaaacaaaaagtgaatcaatcgcctcttgctttttggctaagatcaagtgtaaaaggtacatcagtggctgtgcatggtggctcacgcctgtaatcccagcactttgggaggccaacgtgggtggatcacctgaggtcagaagttcaagaccagcctggccaaacatggcaaaaccccgtctctactaaaaatacaaaaattagctgggcatggtggtgtgtgcctgtaatcccagctactcggggggctgaggtaggaggattgcttgaacctgggaagcagaggttgcagtgagccgagatcgtgccactgcactcgagtctgggcaacagagcgagactccatctcaaaaaaaagaggtacatcagctcttgtcatttatctgctgtctctggacttgctgaccccacccatcgctcctctgctttgcttgatcccttcaggcttctcttcaagtctctctgcaaagatgcctgcctctgaacactcaagtggctccacttgtcccctccttcccctgctgttactgtacctgctactgtcccccagggggagctttgcctctgtttgtcttccatccccagcacctggtccaactggttcataacaagccttagatacctgttcgcttagatacctgtgtcagggagacacacctgacaccttgaaagattatatcacatctcttgtatttcctggccccctcaggagaggcaagagaaagctctgggcatcctgacatacctgggccagagtgcagcggaggcacagactcaacccccttggtaccagctacccccagggcgagggggccccccgcccggcccagccccagatgagaagatcaagagccgtctggaccctctgcgggagatgcagaagcatctggggaagaagagacagcacggcggtgatgaaggcagtcgcagcagaaaggaaaaggaggggtctgagaagcagcgacccaaggagtaagaagaccccacctcggcagaccagggcccagaccttcagggcttggcagcagccagcatgggcactgcagcgtctctggtcaggacagccagggactccgtgaagggctggctaggtggagaagtggttctcagcatgtggtccagggagccctaggggtcctgacaccctttcccggggtgctgtggtgtcaagcctattttcctgacactggtggacttttccactcgtgttctcaggcatgtagtgcaggtttccagaggctgtgtgatggggagacaccctcactctgatggccaatggcagatgcttgtgtccaaactttcttagttttcactaatgatttgcagcatattaagagaacccatttaaacaaaagctcttggggtccttggtttttaagagtataaaggggtcctgagaccaaagagtttgagagctgctgggttagagagtaaaagcaggcttctgtctccaggatgctgcacccctggtctagagggggtacactgcctgtagtcttctttcctctagaaagggaaactgagggccagggggctgctaagtgtgctttcttgacctggagaagcatcagattttaaagactggggaggaccaaagcccacagaagggaaggccagagacgtgcccatggcgtcccagcaccaagtggctgcttccagcaggcctaaggagctgaggctggggtgtgctggatgcagcggggcttccaggcggcagctccctctatgggagaggttgggggaatggcctcctaggggctaccagctttctgacctcactcctctccccacaggcctccatccctggaccagcttcgagctgaacgtctgcggagggaagcagctgagaggtctcgggcagaggccctgctggcccgggtccaaggccgggcactacaggagggtcagccggaagaagacgagacggatgaccggcggcggcggtacaactcccaattcaacccccagctggcccggcgcccccgccagcaggaccctcaccttactcactgactcctgagggggtacaggagaggccgctgctgccagccgtcatataaaactatttattcataaatattttccaaaatgaaaataggtttaccaaaaaatgtccctcactggggaggggaggagggggcagccctcgcccccgagcccccagggtggggctgagaggaaaacctcccggccccctccctgcttcctgggagagggggatgccccgtggcttggggcctccctccagtcttccagggcagggccctcacctgggcagggggatcagcatgcgggggaagggggtgggtagagggaggggccggtgtcactggaggtcccggtcctccaggtagcggtactcaaaggtgaagccttccttcttccgctggccccacttctcgtagtcaaagtagatgtaggtgccctggccgggggagaaggcggtcagtgagtggacgaggaggtggtctgggatctgggccggaccaacagacaaaggggacaattcttagggctgtggatgtgtcaggcaccgggccagctgccctgcacgcacacactctcatccatcctcacaaggttcttcttgggtaggaaatgttatcatgccacttcagcgaggaggaaacggagggggccgcagaggttccaccgaagccagctgccagaatcgtccccagccccaggtgtgagtgcacagccttcgtttcctcgagggctgtggcttttgagcacctctcacgtgagtacaggatgcacagcctagcatttaatcttcacaaagacctcgaggcagtgggtactgtcacccttgttctagagaatggaacagtctcagagtctaaatccaagcactctgcagggacattttattggtgacgaagtggtgtgggaatttctgaatgactggatgccctgaaatgtactaacttggaggatggttttgggccaaaccaggaaaggacaggaagtctgtggttaacatctgaggacacaatgggagaggacctaggttctaaatgaatgtcttaagtgcttcaaagatggcaacctgggagaaccaggagaggggactgagttctctgaggacaaggaccttgtactacttcatccccatgaaggggctcggcatcagggaagtatttggtggaaaaaaacatcactgtagaacacaccaactgaaagtaatttgaaaaaaaaaatccatgacactgactatgtagcagtcaccattaagtacttacatgttattaactcatttaatcttcataacaactgcattaggtaggtggtcttccccccatttttacagataagttaattgagacacagaggttcgagtgacttgcctagagtcgcccagctggactgggctgaaacccaggtaggttggttccagagtgtttgcaagcagcaggaatttcccagtattagaacttgagaagcccattcaaaaaaaatagtttcggcactgagcccctgccctgctgagtgctgggacctggaggtgaagtgggggccatcaaggtccctcggcagcagagcccacagcctggtgcagggacacatactgggaaaatcccacaccccaagcgagtgtgcccagcactgcaaaggggaggcactgggctgggtggctccaggaaggtttctttgaggaagggacatttgggctgagacctacaggaggcctaggagctggccaagtggaggatgagagggcggtgttccaggctgagcagacagccagagggaggagtacttggtcaggctgagggactgcgccagctgaaaggtggaggcaagggagcagaggccagcaggggctgcctggagcctggggactctaccccaaccctagcagcgggaagagagggcggggccctcacctgctcaaactcgtcagtgatggtcttgggctcctcgtgcctctggaaccacatcatgtacttggtgtggaatcgccatgactgcttctttagggccttggctgccagatactgtgccttagtgccctgggggaggaacagtggagagggggatcagggggccccaaactgggtggggagccaggggaatggggcaggacatcagggctgaaccccggcccccgccacagaccacagttgggctggacaatcctcttggagatggggctgggggcacagaacataccaatgctgatcaggagaaggaaaatgagacaggaggtgaaaattgctttcagagaagctttgagaaggaagaaaaactaatgtgtgatgagagctgagagaggaggcatttagaaaattcccaagtgggaatgagggtggaggtcactcatgactcactgggggttgggagggggctggacaggctccccagtggtctccagggaggcctgagaatgtgccaatgagcagagtggggtcggcctagactggggctgctggagcagggctggggaggagccgcgggtgagccagtgggcaactggaagcggggctgaggtgtgcctcagtagaccagcctcgctgtcaacccaagcagttctaacatctctgggctggaaggcggggacggggacaggtggatttgggacagggcccagggagtgggaatagggagggggtgcggtcccagtgccgcagtgggggacccacctcacccctccagcccgaggggggacggcggcggtggcggcgaagccgggggcccgaggctgccccgggggccctgctgtacctccagatagtagaagatgaagaagagtgtctcggtcgacaggcgctggtagaattccacagtgtccgagtgtgggggtggcatctggtggtggtaggggggcgtcggacaggggttccgggggaggtactgcctgtgagagcaacaggaaggtcagtgccagctgcctactagtcctgtcgtgatcaaaagggtgctcagacatgcatccctgcggggggaggtggtacagaaagacccagggcggtgctgaccttcagtggagagcccaagtcaggggcctggtgctctacccacagcctcacaggttcagccactgcctcctccgtaagactcaagtcccagaccatcccccttccctgtggcccctcaccgaatacgctcagagtcagaggggtgaggcatgtggtgccaggcggcctcttccatggcctgctgatagagctgctccttggtgagggcacagggcccagtggacagacacccagcgacagcggtatgttcacctctgacagctgcaggggcggctgggctgaggccggaggtgctgatgtactgctcaggatgatgtctgtggggagggtgggggtccggccccctcagtggtgaggatgggtcaggggcagcccctcctctttggcccgctgcttccccaccatcctgggtccctcacctcgctcggtcaggtgcagcgttggcacagggtcctcaatgccagagctgatggctgcccgttccgccatggacttcaaggagctcagaggctcaggggcctggggaggaaacaagaggcctggcctgagcacttgggctgcaggagcaagtgcagcctgacacaggccccagatgctctcacctgccctgtttgggggccgtggagggccaacgacccactccccacaatctacccatgacaggtaaaagcatcaaactgtagggaaacaatcggagaccacgacgcattcatcagcagaggaacgtctcgtgagtgggactctgcagcatggaatactacgccgagattttcaaaatacaagttcgtgacatactacagaagtaaacgccaacctgcagaatatgtacagtgcgctaccatttttgtcaaaggatgtgccaatagtacacgctccttcactagggacacctacacgctgggagagctcccgcctgtcttgaaggaggcaggaggtctacatgctcagctgtctgcctgtgactggcatggggtgactggaatcggggtgggcccagcccggctaggcttcagtctccttgctggaaacaggtaggttgggtctccagccccgcagccacagcctcgtttcctattacaaaggttacagcaggcttctgttccccaaagtcagggctggttcctcccatctcctccagccacgtgcagctgtcccaaaccccagccctgtgctggactctccacaacgagtcagtcgccaaggcttatccatcctgtctcgctatatcgcccaggcaggtctcaaactcctgggctcaagctatcctcccgcctctgcctccctaagagctgggattacaggtgtgagccaccacgcccagctatccgtcctgcttctaaaccccactggatggctcccttccctgtcgtgccaccatgtcccacacagcccaggcctgtcctctcctgcccagaccaccctccctctatcctgtcctcaccagccccaggggacctttccaatgaagtcatgttgttccttctctactccaaaccttgccatggttcccgaccacccaccccagcgattcatttttgttgttggtggtgttaaaagatatggaccccttctgaaaatctcaaagctgctgtttccctttttccagaaaaatgcacgcactataaatatcctgtccacctacttctaaaatttgggccgggcacggtggctcacacctgtaatcccagcactttgggaggtcaaggtgggtggatcacctgaggttcggagttcaagacctgcctgaccaacatggcaaaaccccatctctattaaaaatataaaaattagcctggcgtggtggcaggcgcctgtaatcccagctactcagtaggctgcggcaggagaatcgcttgaacccaggaggcggatgttgcattcagctgagattgcaccactgcactccagcctgggtgacagagcaagactctgtctcaaaaaagaaaaaaaaaaaaaattaatgcttctgttgggccagaaactgttccaagagctttatgaggatgatttagtcttccaaataaccctacatagtaggtataatcgtgactattgccgtttcccagatgaaggcacagaaaggacaatgccaagacttggacctggacagcctgggcgcgcacactgcctcctggacagcctgggcgcgcacactgcctcctggacagcctgggcatacacactggtccccccatggaagctgcgctacagtatactggctcacaagccaagccccagctcctgaccctcgatgatcaggaccccaccgtcctatcctgctacacccactatctcagccctgcagctggtggcactgtctcctgcagagtggacacctctctcctctctgctgcatcctgcccagcttcctaagcacacaggcagatgcatgctcctcctaaagcacctcctgaagcccttcctgcagctgttagcccccctgcctggtccaggtctcagcttaaacatcaccccctctcagaccttcctgggcctgtctcccaggtcaggtcagatgcccctcggtgggcccaccgcaaccttccctgcagctgccccagcagggaagcttcctaaagggtggaaccaggctgcattcacccaaccagtctttctacttgtgcagaaagtacaccagtctatgccttgtgaggacaaacggggacagaaactgagggcctgcgggggggatgaagatggagacccagagagagcaagcaacaagtgcaaccaagagaaaggaaaagagacccagagaaacagagctttggagggaacaagagaggaggtatgagagcccccagagatcaaggtcacggggagggtggtacagaaagacctggagaaagagcaagtgtgagaaggggacagaaagccagagagagatccagaaagagggtgggggcaaggggtgcagctagagacctggaggaaagaaacaacagagtcaggacacagaggctcgggggatgtccgaggagcccaccttgatttctggggcggtgctgaactgtggaggcccattgagcagggcaccggctgccttggcatcactgaagctgggcgttggggagctgggaggattcacaggcagtggcaccaggaggctggtccccctgagttgttccctgagcctggccacgcctcnccgcccgttggtgctgccgcactgggttccttcctggagagagagcatggaagagggggttgagaggagggtccctgagggtgggatgggcagagaggcctggctggagagaggggagactgcacagatcagatgggatctgagaggggcaggtgagggcagacagatgggagaaagaagtggttctctgggcaaacaaacgcagagcccaatctttggaatggtttctcatcagcagagcagagctgtgggggtgggggtgaggattctcgggtgctccaccaggccacaggctgatcaaaaccacttgccctgggcaggtgttcacagggcccactcccccttgggcaggccagctggagctggggtgagggggcaggaagcaggcctttcctttgtgcacactgatctttcttagggcattcttcgggaaacaggcagacccagtggaatggtctgagctaagatttgaaggagtggctgcagaggaataaggacttcgggacaattcactttgaaaagtgaaacagtgaccctccggtggcagtcaattggcctcaggcaggtaacagaaatggggaggaaagggtatggggctcttgagaaaacttccacttagatgagaacgtattttagaatgttctgaagggcaaagcagggaggctgatgtagtttccttgctggaaagaagtgggggtgtaacacccgatggagatggaggatagcgcttggccattcccagcagcaagggcggggggttcagaacccaccgatgcgggggtgaggcgcctgcgcctctctgtttcaaaaggctgccatcccaaccctgccgatggccgagacactcacgaggtgctgggaggtgggttgtgggggccggaaggggggcccaaggcctggctgctggcattgttgcccccactgctgctcaaagccacctctgccgggctgtctgccacaactgagctgtaacctgggaacaaagagtaaatggaaagggctgctgcctgctgcccagccccgcccacgccccccaccccgctgcctcctcactcactggtggcgccattctgcttgccagcccctccaccggcactgctgttactactgctgctgctccctccgcctccgctgccgccgcctccgcctccgctaggctggacgctggggggccggggctgggtcgtgctgggcccactgggagctggtggggcacagcctgggcatagggagcaggggtgcccgagttgtggctgggagctggactggccttggggccagggcacttgggggtgctgcgggggcggggaaacattgttgccaggagtggtgctcaaggcagaggcagcaggcggggggccggagaggtaggtgggcggcacagctggggactgagggtgctggttgctgtggacaggcttggagccgtttttgctggagactgcgggtggagagagcagagggtcaggaccagctgggccagctggtctccctcaccacccccacctcaggctccatctttgtcccagcagcctcctctctggcctcgctgcccccacctgctcctgccctcttggggacctgggtgaccttactcaccctcatggcttcaatcaccttcatgcttaaaacactcacactgatttccagcctgcccagcttcccaagtcctgcctggacaccgccccatggacaccnccacagggatctgacacacaacttaggttgtcagccagagaagatccatctgttggaagccagaggactagtgggaaacacttaagtgttctcaatatgagattagctgagcccgcctaatgtcccaagagtaagaaggaaaaacagctggaaattggatagtaattctgaatgtcacctgaagggtcacagaagctactcacagggctggaagttaccagcactccagaaagtggtgggagggtaaatgtgctcatggtatccctaccgcaggcaatctgcggacagcactcgggctgctgagcctaaccacctcctgggcttctttccagccaccccacaggcaccttgcgcttaccaagcgcccaacaggactgactacccacttctctcctgggcatcgctgcttggcagtgggggcctgggaaggtggcagagcccagcctggcccctggagtacctgcctcagtgtctctcctcatcacctcctggccctgttgcccgccctcactactacctgcgggtccccttagtctccacaccagcctcctcaatgcccactcagggtgtccccttggaaccatccatcccgttagcccacagaggggcctcaggcccatgctgctcctgcctaacattgttctgtagcagcgtttccgaaagcgtgctcctgtcctgggagatgtcaaaggagttgaagaagcactgcccgccaccgtctcctctcagaaatttgcagtgtgtattatcagcacagcaaaggccccatcgcttcctaggcttattggactctggaggccactcaggtccacaaagcctgagcccctcagcctgacagtcccagtccctgtgctcacagttgggcccctggccctgcagacctggccagactcatctctcctcacttccaaactttctgtcacaacttgcccatgttactggctgccacctctccctgccaggcaaactcacctgactgtgaagcccagggcactccacagcagcatctcctgactgcctggccaggccaagggtgacctgtgtgctacccccttgaccacagcaccagtcacctgtccacttgccctgcccacctgccctcagggcagcactgatttctgagccacctgtgtccaccagcccagcacagtggccggcgctcaggcctcaagatgcctttgggaagcaacagaggagtgaatggcgtgcccacccggtccaggctcacacccacctggctgacttcactgtctgtggaacgtcccctcttcttatcatcttcagagttttcctgaggtaggggaggcagaatagaaacctgtgtgacctctggggctctgatggagaaccgccaatctctgaatgccccggggacctgggcccaattgactgccattgcggccccagagctggtcaaatggctgtccttaatctgcctggagaaaccatctcaattcaggctctccagtcttcttgttttctgggagccagcactgacccaccagcctcttaaggatctgggaacctgctctccacagggaagccaacccttggatccctgcccaaggtggccagctacccagcctcctcaggcagcccaggcaccggcccctcccacttcccagatccaggacctaaactggcgcgggatgcaccctattgctctttatgtcctttagggacccagatataggaccttagcgtgtgctccaagagcctagaccctggatacctagatctgtgtttcctcaattacgctcccatagccactttggagtgacccagatttgtctcctcgagtcctgccctgctggaaacacaaggtactagtgtcccgtggggcctcaccgtggtacagttggctgggctgggcgggatgggagagctggaggtggttgaggtgggcgtgctgctggactggttgaagatctcatcctccatgtggctgtggctggggggggaggtggcgaccagcgcctgtgctgtgggggcagaagaagggcatgcttagctggctcacacagcccattctgggccctcacttcctgtgccacgatcagccccagggcctcacgaatgtcctcgaggtccaggtcatcgtagagaaactcgttctcctcgaagtcggggtcctgggatgagtcaacatagtactcaacgtcgt

SEQ ID NO: 531 - DNA, 5365 bp, Homo sapiens
gtccacgtgcggctgcgccagcgcatcatcttgtacgaattaaaggtgcgattagggagcggggtctgcaactgggtagggaccagacaggaccgggctgagataacgcacagggcctaactcggtgatggggcctccggagagatgctaagcagctccttctccaagaaaggcaggtcctggggaatgagaaggttgagaggaggccgagatagggctgcccgagctccaagcgtgtaggaaaaggatgcgccagggctgggatcggtggctaatgcttgtaaccccagcactttgggagaccgagacaggtggatcgcttcagtctaggagttcgagaccagcctgggcaacatagggaggctccctctctaccaaaaaaaaaaaaaaaaagtttgtttttttttaagtaagcacaagaagcgggcggggcctaaggcaatttggttcaaagttaagtgatgggagcggccagcagggcgtcttgatacagctgaactggaacttcaggccaggaataaagcgcagggccacctgggggcggagcctctgatgggcagggctgaccaggggcgggtcttgggatgctgggcggagcctcaggggcggggcctggggtgctgagattgaccgcggagggatgggggcttgggttgctggatccggccgcgaaggggcggggctgtaaagggccgctggtttcctggagcgggtggaaccaggactgcagaggttgttagcgggtggggagacggctgcatcagttcacgttaaggaggatctctggagagccagacctggggaaccgggaggcccgcgccttgggaaatggagtccaagcgggcatctctcctgccttcaggtggagctggaggagacagtggtgcggcgccaggctgcggtgcggacgctgggccagcaagccagggtttggttggtgcgggtgctgctcaacctgctggtggtcgcgctcctgggggcagccttctatggcgtctactgggctacggggtgcaccgtggagctgcaggtgcggacggtcttggaagaggaagccagggggtcctggaacctacatttccaacggtggagggaggggacggaagtttgggatgccagagatcttagagaggaagtatgggagagggtatgttcggaccctggacttagggattttaaaggaaaaagagaggctgggcgcggtggcttacacctgtaatcccagcactttgggaggctgaggcgggcggatcacgatgtcaggagttccagaccagcctgaccaacatggtgaaaaacagtctctactaaaaatacaaaaattagacgggcgtggtggtgggcgcctgtaatcccagctactcaggaggctgaggcaggagaatcacttgaacccgggaggcagaggttgcagcgagccgagatcgcaccgctgcattctaggctgggcaacagagcgagactctgtctcaaaaaaaaaaaaaaaaagaagaagaagaagaagaggccggggggaggaccttaagcttggctcctccaggaccccaagcctctactcatggtccatcccgctcccaggagatgccccttgtccaggagttgccactgctgaagcttggggtgaattaccttccgtccatcttcatcgctggggtcaattttgtgctgccgcccgtgttcaagctcattgctccactggagggctacactcggagtcgccagatcgtttttatcctgctcaggttccagcctcacggggatggctgggaatgatgaagggtgggggcggtcagagggatgttggcgctgacaggtaagacacggaaatcctgctgataccgaatccagggattcaaatcctgactctgttggccaggtgcagtggctcacacctgtaatcccagcactttgggaggccgaggctgaggtcaggagttcgagaccagcctgacaaacatgatgaaaccccgtctgtagtaaaaatacgaatattagcccggcggtagtggcttctgtagtcccagctactcgggaggctgaggcaggagaatggctcgagcctgggaggtggaggttgcagtgagctgagatcgcgccactgcactccagtccgggtgacagagtgagaccctgtctcaaaaaaaaaaaaaaaaaaagaaagaaagaaagaaagaaatcctgattctgtcactgggcctcagcttcatctgtgagatgggttgaatgcgggcgcgttccactgagaagggaactgccacatggtgggtaccgggtcagggcccattctctgccttccccccttcaggaccgtgtttcttcgcctcgcctccctggtggtcctgctcttctctctctggaatcagatcacttgtgggggcgactccgaggctgaggactgcaaaacctgtggctacaattacaaacaacttccggtgagaacggcatgggtgtgcgtgggactcttgggtccctgaaggaaagatggagctgggtgggtccagactcttggtttgggcggagaggggagcttggggtgctggaacactctcccaagggtatgaaagtttgaaaaacgaggacccccagagaaagtattgacagggtctcataggcttgcgatgtggagactcggacgcgtgggcctccaggtgcccgggtcccgagttctttctgatatatttcttccttcttcagtgctgggagactgtcctgggccaggaaatgtacaaacttctgctctttgatctgctgactgtcttggcagtcgcgctgctcatccagtttcctagaaagtgagagccccgccccttgctgtggccccgcccctctaggacgaggccgtgccccatcgcgctgttcttttcaccgcgcacctttttaccattcccgcctctgcctgctccctttgcttgccctaggtccgcagatctccccgctccccgcccttgttttagtgggttacttccctctggccccgacggcggcgacatctgggtcccttctagtcctcaggacccgccctctggacacaccccctccacgtggagtcctgaaagtcccgcccccccccccccaaccaatacgcatgcttcctattggcgggcggggcggtggaggcggggaaactccaggccgccactcccctgactccggcccggccccgccccgtccttcaggctcctctgtggcctctgtcctggggcgctgggtcgtctggcggggacccaggagttccaggtgcccgacgaggtgctggggctcatctacgcgcagacggtggtctgggtggggagttttttctgccctttactgcccctgcttaacacggtcaagttcctgctgcttttctacctgaagaaggtaaggggtaggggggacccttgggtctgaggcaggaggtattggggcccgcactcctgggtcaagggcaaggaagatcctgggggcctggattactcggtcctgagagaggagggggttggaggacagactactgcatctgagaggaggggtctagggcattctgacttatatgtctgaggatctggggactcagactccggggtcctagatgaggaaggggctcagactcctggttcggaaaaaaggagaggcaggtaggccgggtgcagtggctcacgcctgtaatcccagcacttcgggagactaaggcgggtggatcacctgaggtcaggagtttgagaccagcctggctaacatggcaaaaccccgtctctactaaaaatacaaaaaaaattagccgggcttagtggcaggcgcctgtaatcccagctactcaggaggctgaggcaggggaattgcttgaaccagggaggtgaaggtcgaagtgagccaagatcgtgccactgcactccagcctgggcgacagagcgagactccgtctcaaaaagagaaaacaaacaaacaacaacaacagcaaaacaaattagccgggagtggtggtgcacacctgtaatcccagctactcgggaggctgagacacgagaatagcttgaacccgggaggggaggctgcagtgagagccactgcactccagcctgggcgacagagcgagactctgtctcaaaaaaaaaagcctgggcgacagagcgagactctgtctcaaaaaaaaaaaaaaaaaaaatggaggcacagactcttgtgtttcagagcccttttctccgtgccttcccccaccagcttaccctcttctccacctgctccccggctgcccgcaccttccgggcctccgcggcgaatttctttttccccttggtccttctcctgggtctggccatctccagcgttcccctgctttacagcatcttcctgtaagtgcgagaggctcccgcctctctccctccctctctccccattcagtgttcagactcctggcactatgtgagcccagcctgtcttgacttcaggatcccgccttctaagctttgtggtccattccgggggcagtcgtccatctgggcccagatccctgagtctatttccagcctccctgagaccacccagaatttcctcttcttcctggggacccaggcttttgctgtgccccttctgctgatctccaggtgagacggcccagacttctgggtctgggtttgaatgcgtgtgatctgggggccaccacctgcgtccaagagaggagaggcttgggcgtgggagcaggcaacgtactgagtctgagggaggaggcctaggctcctggactgctgggtccgaaggaggaggtgggcgggacgtaggactcctggatctgaaggcggaggggctgggagactgaactccttgagcccagacgaggaggggcttaggcgtccacatccctggcttcgaaggagccagacgtttggatataatggaagagcgtgtcaggagtggcttccgttcctgtctccttcagcatcctgatggcgtacactgtggctctggctaactcctacggacgcctcatctctgagctcaaacgtcagagacagacggtgagccaggcgggtccctgagagggcccctggggaacatggaaaggggttggggaagaggattgtctcacctccacctctctttgccccaggaggcgcagaataaagtcttcctggcacggcgcgctgtggcgctgacctccaccaaaccggctctttgacccccgcagcccacgtcccgctttcagaccccaggcccattgtaagcctaggtcacaacatctgtaaactaggagaactggagaagactccacgcccttccagctttggtatctggagatttccagggcccctcgccgccacgtcctgactctcgggtgatcttccttgtatcaataaatacagccgaggttgctgagcgcgctttgaaa

SEQ ID NO: 532 - DNA, 5360 bp, Homo sapiens
gtccacgtgcggctgcgccagcgcatcatcttgtacgaattaaaggtgcgattagggagcggggtctgcaactgggtagggaccagacaggaccgggctgagataacgcacagggcctaactcggtgatggggcctccggagagatgctaagcagctccttctccaagaaaggcaggtcctggggaatgagaaggttgagaggaggccgagatagggctccccgagctccaagcgtgtaggaaaaggatgcgccagggctgggatcggtggctaatgcttgtaaccccagcactttgggagcccgagacaggtggatcgcttcagtctaggagttcgagaccagcctgggcaacataggggggctccctctctcccaaaaaaaaaaaaaaaaagtttgtttttttttaagtaagcacaagaagcgggcggggcctaaggcaatttggttcaaagttaagtgatgggagcggccagcagggcgtcttgatacagctgaactggaacttcaggccaggaataaagcgcagggccacctgggggcggactctgatgggcagggctgaccaggggcgggtcttgggatgctgggcggactcaggggcggggcctggggtgctgagattgaccgcggagggatgggggcttgggttgctggatccggccgcgaaggggcggggctgtaaagggccgctggtttcctggagcaggtggaaccaggactgcagaggttgttagcgggtggggagacggctgcatcagttcacgttaaggaggatctctggagagccagacctggggaaccgggaggcccgcgccttgggaaatggagtccaagcgggcatctctcctgccttcaggtggagctggaggagacagtggtgcggcgccaggctgcggtgcggacgctgggccagcaagccagggtttggttggtgcgggtgctgctcaacctgctggtggtcgcgctcctgggggcagccttctatggcgtctactgggctacggggtgcaccgtggagctgcaggtgcggacggtcttggaagaggaagccagggggtcctggaacctacatttccaacggtggagggaggggacggaagtttgggatgccagagatcttagagaggaagtatgggagagggtatgttcggaccctggacttagggattttaaaggaaaaagagaggctgggcgcggtggcttacacctgtaatcccagcactttgggaggctgaggcgggcggatcacgatgtcaggagttccagaccagcctgaccaacatggtgaaaaacagtctctactaaaaatacaaaaattagacgggcgtggtggtgggcgcctgtaatcccagctactcaggaggctgaggcaggagaatcacttgaacccgggaggcagaggttgcagcgagccgagatcgcaccgctgcattctaggctgggtaacagagcgagactctgtctcaaaaaaaaaaaaaaagaagaagaagaagaagaggccggggggaggaccttaagcttggctcctccaggaccccaagcctctactcatggtccatcccgctcccaggagatgccccttgtccaggagttgccactgctgaagcttggggtgaattaccttccgtccatcttcatcgctggggtcaattttgtgctgccgcccgtgttcaagctcattgctccactggagggctacactcggagtcgccagatcgtttttatcctgctcaggttccagcctcacggggatggctgggaatgatgaagggtgggggcggtcagagggatgttggcgctgacaggtaagacacggaaatcctgctgataccgaatccagggattcaaatcctgactctgttggccaggtgcagtggctcacacctgtaatcccagcactttgggaggccgaggctgaggtcaggagttcgagaccagcctgacaaacatgatgaaaccccgtctgtagtaaaaatacgaatattagcccggcggtagtggcttctgtagtcccagctactcgggaggctgaggcaggagaatggctcgagcctgggaggtggaggttgcagtgagctgagatcgcgccactgcactccagtccgggtgacagagtgagaccctgtctcaaaaaaaaaaaaaaaaaaagaaagaaagaaagaaagaaatcctgattctgtcactgggcctcagcttcatctgtgagatgggttgaatgcgggcgcgttccactgagaagggaactgccacatggtgggtaccgggtcagggcccattctctgccttccccccttcaggaccgtgtttcttcgcctcgcctccctggtggtcctgctcttctctctctggaatcagatcacttgtgggggcgactccgaggctgaggactgcaaaacctgtggctacaattacaaacaacttccggtgagaacggcatgggtgtgcgtgggactcttgggtccctgaaggaaagatggagctgggtgggtccagactcttggtttgggcggagaggggagcttggggtgctggaacactctcccaagggtatgaaagtttgaaaaacgaggacccccagagaaagtattgacagggtctcataggcttgcgatgtggagactcggacgcgtgggcctccaggtgcccgggtcccgagttctttctgatatatttcttccttcttcagtgctgggagactgtcctgggccaggaaatgtacaaacttctgctctttgatctgctgactgtcttggcagtcgcgctgctcatccagtttcctagaaagtgagagccccgccccttgctgtggccccgcccctctaggacgaggccgtgccccatcgcgctgttcttttcaccgcgcacctttttaccattcccgcctctgcctgctccctttgcttgccctaggtccgcagatctccccgctccccgcccttgttttagtgggttacttccctctggccccgacggcggcgacatctgggtcccttctagtcctcaggacccgccctctggacacaccccctccacgtggagtcctgaaagtcccgcccccccccccccaccaccaatacgcatgcttcctattggcgggcggggcggtggaggcgtggaaatccaggccgccactcccctgactccggcccgccccgccccgtccttcaggctcctctgtggcctctgtcctggggcgctgggtcgtctggcggggacccaagagttccaggtgcccgacgaggtgctggggctcatctacgcgcagacggtggtctgggtggggagttttttctgccctttactgcccctgcttaacacggtcaagttcctgctgcttttctacctgaagaaggtaaggggtaggggggacccttgggtctgaggcaggaggtattggggcccgcactcctgggtcaagggcaaggaagatcctgggggcctggattactcggtcctgagagaggagggggttggaggacagactactgcatctgagaggaggggtctagggcattctgacttatatgtctgaggatctggggactcagactccggggtcctagatgaggaaggggctcagactcctggttcggaaaaaaggagaggcaggtaggccgggtgcagtcgtcacgcctgtaatcccagcacttcgggagactaaggcgggtggatcacctgaggtcaggagtttgagaccagcctggctaacatggcaaaaccccgtctctactaaaaatacaaaaaaaattagccgggcttagtggcaggcgcctgtaatcccagctactcaggaggctgaggcaggggaattgcttgaaccagggaggtgaaggtcgaagtgagccaagatcgtgccactgcactccagcctgggcgacagagcgagactccgtctcaaaaagagaaaacaaacaaacaacaacaacagcaaaacaaattagccgggagtggtggtgcacacctgtaatcccagctactcgggaggctgagacacgagaatagcttgaacccgggaggggaggctgcagtgagagccactgcactccagcctgggcgacagagcgagactctgtctcaaaaaaaaaagcctgggcgacagagcgagactctgtctcaaaaaaaaaaaaaaaaaaaaatggaggcacagactcttgtgtttcagagcccttttctccgtgccttcccccaccagcttaccctcttctccacctgctccccggctgcccgcaccttccgggcctccgcggcgaatttctttttccccttggtccttctcctgggtctggccatctccagcgttcccctgctttacagcatcttcctgtaagtgcgagaggctcccgcctctctccctccctctctccccattcagtgttcagactcctggcactatgtgagcccagcctgtcttgacttcaggatcccgccttctaagctgtgtggtccattccgggggcagtcgtccatctgggcccagatccctgagtctatttccagcctccctgagaccacccagaatttcctcttcttcctggggacccaggcttttgctgtgccccttctgctgatctccaggtgagacggcccagacttctgggtctgggtttgaatgcgtgtgatctgggggccaccacctgcgtccaagagaggagaggcttgggcgtgggagcaggcaacgtactgagtctgagggaggaggcctaggctcctggactgctgggtccgaaggaggaggtgggcgggacgtaggactcctggatctgaaggcggaggggctgggagactgaactccttgagcccagacgaggaggggcttaggcgtccacatccctggcttcgaaggagccagacgtttggatataatggaagagcgtgtcaggagtggcttccgttcctgtctccttcagcatcctgatggcgtacactgtggctctggctaactcctacggacgcctcatctctgagctcaaacgtcagagagagacggtgagccaggcgggtccctgagagggcccctggggaacatggaaaggggttggggaagaggattgtctcacctccacctctctttgccccaggaggcgcagaataaagtcttcctggcacggcgcgctgtggcgctgacctccaccaaaccggctctttgacccccgcagcccacgtcccgctttcagaccccaggcccattgtaagcctaggtcacaacatctgtaaactaggagaactggagaagactccacgcccttccagctttggtatctggagatttccagggcccctcgccgccacgtccctgactctcgggtgatcttccttgtatcaataaatacagccgaggttgctgagcgcgctttgaaa

SEQ ID NO: 533 - DNA, 1918 bp, Homo sapiens
aggacctccacaaaaagtactcgtacatccgcaagaccaggcctgacggcaactgtttctatcgggctttcggattctcccacttggaggcactgctggatgacagcaaggagttgcagcggtgagaagggtgggcactgggcaccgaggcaggtgggtgtctacctcctccccgggcgagtaggatgtgtctcgagtagggtgtctccctccttcccgggcgatgggctggactctggccttgcaggcggggcagtgctgtctcggccctggcgtctgggctggtcgaggagcccatgctggcccacctttccatcccacccccaggttcaaggctgtgtctgccaagagcaaggaagacctggtgtcccagggcttcactgaattcacaattgaggatttccacaacacggtgagccctggtgcctgtcttgggctgggccatgggggaggggttcacctggtgaggaccacccatctcctccctgtcatcttgccctttctccctccgtggctgcagttcatggacctgattgagcaggtggagaagcagacctctgtcgccgacctgctggcctccttcaatgaccagagcacctccgactaccttgtggtctacctgcggctgctcacctcgggctacctgcagcgcgagagcaagttcttcgagcacttcatcgagggtggacggactgtcaaggagttctgccagcaggtgccgtccccctcccctttactctcggccgggggagtgcagtgggccacagggcctggggcggggtgcggagaccagggcctgaccggcacctgtgccacaggaggtggagcccatgtgcaaggagagcgaccacatccacatcattgcgctggcccaggccctcagcgtgtccatccaggtggagtacatggaccgcggcgagggcggcaccaccaatccgcacatcttccctgagggctccgagcccaaggtctaccttctctaccggcctggacactacgatatcctctacaaatagggctggctccagcccgctgctgccctgctgcccccctctgccaggcgctagacatgtacagaggtttttctgtggttgtaaatggtcctatttcacccccttcttcctgtcacatgaccccccccccatgttttattaaagggggtgctggtggtgagccgtgtgtgcgtgtccctgctctgctgcccgcctggctgctctgtctgctgccccctccccccaggtgggtccccctgcttttcacctatctactcctgagcttccccaacaggagcaggtttgaggggccaggcctcttggaggcccctcctgcttcgttgggttctgcttccttcccttcttagctggctcaggggcttctatgggatcctggaagttccttagggacttgcccagggtcccagggccacccacacttcatctgctccctcataggccccacctccacgtcccggctgggccccagaccccagcttcctgccctccaccgggagtctgcatggttgggagtcctgggtggaggggcctttgtgaggctggacccggctcagggcaggtggaggagctgggcctcccacagggtgcccgggcagtgccatcctggtgggggagggcagccttcaaacgtgtggggtctacagtcctcaggtctaggcagggctgccggttctccacctccccatccgccccaggccccctgcctgtgcctgccttgcaccccctctgcttgggccacggtgtctctgcattgcctgcctttttgccttcacctcttttcttccccgccccctgcacattcggggtctcagcccccaggctgtgagctccttgggggcaggccctcaataaatgtgaactgctgctgccgcctctgccgtccgcctgtgcctctgcccgcctgg

SEQ ID NO: 534 - DNA, 1920 bp, Homo sapiens
aggacctccacaaaaagtactcgtacatccgcaagaccaggcctgacggcaactgtttctatcgggctttcggattctcccacttggaggcactgctggatgacagcaaggagttgcagcggtgagaagggtgggcactgggcaccgaggcaggtgggtgtctacctcctccccgggcgagtaggatgtgtctcgagtagggtgtctccctccttcccgggcgatgggctggactctggccttgccaggcggggcagtgctgtctcggccctggcgtctgggctggtcgaggagcccatgctgggcccgcctttccatcccacccccaggttcaaggctgtgtctgccaagagcaaggaagacctggtgtcccagggcttcactgaattcacaattgaggatttccacaacacggtgagccctggtgcctgtcttgggctgggccatgggggaggggttcacctggtgaggaccacccatctcctccccgtcatcttgccctttctccctccgtggctgcagttcatggacctgattgagcaggtggagaagcagacctctgtcgccgacctgctggcctccttcaatgaccagagcacctccgactaccttgtggtctacctgcggctgctcacctcgggctacctgcagcgcgagagcaagttcttcgagcacttcatcgagggtggacggactgtcaaggagttctgccagcaggtgccgtccccctcccctttactctcggccgggggagtgcagtgggcccacagggcctggggcggggtgcggagaccagggcctgaccggcacctgtgccacaggaggtggagcccatgtgcaaggagagcgaccacatccacatcattgcgctggcccaggccctcagcgtgtccatccaggtggagtacatggaccgcggcgagggcggcaccaccaatccgcacatcttccctgagggctccgagcccaaggtctaccttctctaccggcctggacactacgatatcctctacaaatagggctggctccagcccgctgctgccctgctgcccccctctgccaggcgctagacatgtacagaggtttttctgtggttgtaaatggtcctatttcacccccttcttcctgtcacatgacccccccccatgttttattaaagggggtgctggtggtgagccgtgtgtgcgtgtccctgctctgctgcccgcctggctgctctgtctgctgccccctccccccaggtgggtccccctgcttttcacctatctactcctgagcttccccaacaggagcaggtttgaggggccaggcctcttggaggcccctcctgcttcgttgggttctgcttccttcccttcttagctggctcaggggcttctatgggatcctggaagttccttagggacttgcccagggtcccagggccacccacacttcatctgctccctcataggccccacctccacgtcccggctgggccccagaccccagcttcctgccctccaccgggagtctgcatggttgggagtcctgggtggaggggcctttgtgaggctggacccggctcagggcaggtggaggagctgggcctcccacagggtgcccgggcagtgccatcctggtgggggagggcagccttcaaacgtgtggggtctacagtcctcaggtctaggcagggctgccggttctccacctccccatccgccccaggccccctgcctgtgcctgccttgcaccccctctgcttgggccacggtgtctctgcattgcctgcctttttgccttcacctcttttcttccccgccccctgcacattcggggtctcagcccccaggctgtgagctccttgggggcaggccctcaataaatgtgaactgctgctgccgcctctgccgtccgcctgtgcctctgcccgcctgg

SEQ ID NO: 535 - DNA, 1836 bp, Homo sapiens
gctccatccaacacctgggccgccttccttccccccagtcagagctcagacagtaggagctgccacaacgagatctttattaggctcctcgggggcggggcgcggagggaaagaaggggtggccaggcccaggccaggctgcaggctttggcgacctctcagagctgggagcggggtcccgaaggcgggtctgagggcagagcagagtcagaggtgtctatgggcgtccccgacctcccaggctgccccgtggtttcccgccctgcttgggggtgagcgggggttagtgggcgggttagtctagggccggggccgccgcacggggcgaggccctgcttaccagtcccggtcagggtgggctgcgggagcctcaggctggaaggcagaggacagtgagagcccgcccccagggtggaccggggcaggggcgggccgtggggcggcgcggggcacgtacccacggggaagtagtgggggagccggctccggtagatgtcctcgtccttctcgaggaacacgcagatgatcagccggtccacctgcgccaggggctgctcagcctgggccgagctgccacgcctggccccaggatcctgtgactgcctgccctggtgcaggctttcacctgcctggccctgcgcccttcacggaggctcacggctgtgtgccatcacccccatctcgccaccgccagcgcccttgcgcaggagaaacagggaaggaaggggcgggcctggccctgcgctctgcaccctgactccctgggcgatgatgggggctggtcactctggccaggatgcggaccccaccctcgcccgggcccaggactcaccttgtccttgtgctgctccagccactctcgcagcgtggccagcacgatctcggcggccgcctcacaggggtagcctgaggcgggtggggcgggagtgagtcctaggctctggccccgcccactcccctgtccgccccggcccctcccggcgtctgggtccaccgcccactcctggtccttgcctttcttccagactcaccaaacacgccggtggagatgcaggggaacgcctgggcggggaggggtgagagggggttggaacattgtcactgcgccccgcctcccgccctcccccgcgggccgtccctcaccaccgagcggagccggtgctccagcagcaggtccagactgctcaggtagcagctgcggagctcggcagcctggctggcgctgggctccccgtaggcgatgggccccactgtgtggatgacgtctacggggggcgacggggtcagaccggcgggggtctacgcggtcctcagctccctcgcttccccctgccggcctgggcagaagggggcaggaaacacctttccccccaagcgctgagcctcctccgcgaaggcccccacccctgtgggccccctcgagcccgaatccgcacgcgcacagagccccgcgccccctccccacatctgtatgggcccggctgagacccgagcgcgagtgtgggcgcgaaggcgttgccccccagctccatcctcagcctccacgcacggtctcccccatgtgcttcctggggtgtgcggggtgggggccgggtcttggcccttaaggttaagaagggccccctgaggagttccccagcactcctgtgggggccgcagccctgatgtcccagtgacacacgggcgccctgtctgcgccccacagctgggggcgcgtcggggactcacacttggccgggagccgatagccgccggtgatcttggccttgccagtcttacagctctgcagggtccggcactcgtcggtaagcagggggccggcggcccgatgaatgc

SEQ ID NO: 536 - DNA, 1837 bp, Homo sapiens
gctccatccaacacctgggccgccttccttccccccagtcagagctcagacagtaggagctgccacaacgagatctttattaggctcctcgggggcggggcgcggagggaaagaaggggtggccaggcccaggccaggctgcaggctttggcgacctctcagagctgggagcggggtcccgaaggcgggtctgagggcagagcagagtcagaggtgtctatgggcgtccccgacctcccaggctgccccgtggtttcccgccctgcttgggggtgagcgggggttagtgggcgggttagtctagggccggggccgccgcacggggcgaggccctgcttaccagtcccggtcagggtgggctgcgggagcctcaggctggaaggcagaggacagtgagagcccgcccccagggtggaccggggcaggggcgggccgtggggcggcgcggggcacgtacccacggggaagtagtgggggagccggctccggtagatgtcctcgtccttctcgaggaacacgcagatgatcagccggtccacctgcgccaggggctgctcagcctgggccgagctgccacgcctggccccaggatcctgtgactgcctgccctggtgcaggctttcacctgcctggccctgcgcccttcacggaggctcacggctgtgtgccatcacccccatctcgccaccgccaggcgcccttgcgcaggagaaacagggaaggaaggggcgggcctggccctgcgctctgcaccctgactccctgggcgatgatgggggctggtcactctggccgggatgcggaccccaccctcgcccgggcccaggactcaccttgtccttgtgctgctccagccactctcgcagcgtggccagcacgatctcggcggccgcctcacaggggtagcctgaggcgggtggggcgggagtgagtcctaggctctggccccgcccactcccctgtccgccccggcccctcccggcgtctgggtccaccgcccactcctggtccttgcctttcttccagactcaccaaacacgccggtggagatgcaggggaacgcctgggcggggaggggtgagagggggttggaacattgtcactgcgccccgcctcccgccctcccccgcgggccgtccctcaccaccgagcggagccggtgctccagcagcaggtccagactgctcaggtagcagctgcggagctcggcagcctggctggcgctgggctccccgtaggcgatgggccccactgtgtggatgacgtctacggggggcgacggggtcagaccggcgggggtctacgcggtcctcagctccctcgcttccccctgccggcctgggcagaagggggcaggaaacacctttccccccaagcgctgagcctcctccgcgaaggcccccacccctgtgggccccctcgagcccgaatccgcacgcgcacagagccccgcgccccctccccacatctgtatgggcccggctgagacccgagcgcgagtgtgggcgcgaaggcgttgccccccagctccatcctcagcctccacgcacggtctcccccatgtgcttcctggggtgtgcggggtgggggccgggtcttggcccttaaggttaagaagggccccctgaggagttccccagcactcctgtgggggccgcacccctgatgtcccagtgacacacgggcgccctgtctgcgccccacagctgggggcgcgtcggggactcacacttggccgggagccgatagccgccggtgatcttggccttgccagtcttacagctctgcagggtccggcactcgtcggtaagcagggggccggcggcccgatgaatgc

SEQ ID NO: 537 - DNA, 2811 bp, Homo sapiens
gttcaccttgtcatcaaaagccagaaccgacctcagggccagtccacgcagcctagcaatgccgcgggaactaacactacctcggcgtcgactcccaggagtaactccacacctatttccacaaatagcaacccgtttgggttggggagcctgggaggacttgcaggccttagcagcctgggcttgagctcgaccaacttctctgagctccagagccagatgcagcagcagcttatggccagccctgagatgatgatccaaataatggaaaatccctttgttcagagcatgctttcgaatcccgatctgatgaggcagctcattatggctaatccacagatgcagcaattgattcagagaaacccagaaatcagtcacctgctcaacaacccagacataatgaggcagacactcgaaattgccaggaatccagccatgatgcaagagatgatgagaaatcaagacctggctcttagcaatctagaaagcatcccaggtggctataatgctttacggcgcatgtacactgacattcaagagccgatgctgaatgccgcacaagagcagtttgggggtaatccatttgcctccgtggggagtagttcctcctctggggaaggtacgcagccttcccgcacagaaaatcgcgatccactacccaatccatgggcaccaccgccagctacccagagttctgcaactaccagcacgaccacaagcactggtagtgggtctggcaatagttccagcaatgctactgggaacaccgttgctgccgctaattatgtcgccagcatctttagtaccccaggcatgcagagcctgctgcaacagataactgaaaacccccagctgattcagaatatgctgtcggcgccctacatgagaagcatgatgcagtcgctgagccagaatccagatttggctgcacagatgatgctgaatagcccgctgtttactgcaaatcctcagctgcaggagcagatgcggccacagctcccagccttcctgcagcagatgcagaatccagacacactatcagccatgtcaaacccaagagcaatgcaggctttaatgcagatccagcaggggctacagacattagccactgaagcacctggcctgattccgagcttcactccaggtgtgggggtgggggtgctgggaaccgctataggccctgtaggcccagtcacccccataggccccataggccctatagtcccttttacccccataggccccattgggcccataggacccactggccctgcagccccccctggctccaccggctctggtggccccacggggcctactgtgtccagcgctgcacctagtgaaaccacgagtcctacatcagaatctggacccaaccagcagttcattcagcaaatggtgcaggccctggctggagcaaatgctccacagctgccgaatccagaagtcagatttcagcaacaactggaacagctcaacgcaatggggttcttaaaccgtgaagcaaacttgcaggccctaatagcaacaggaggcgacatcaatgcagccattgaaaggctgctgggctcccagccatcgtaatcacatttctgtacctggaaaaaaaatgtatcttatttttgataatggctcttaaatctttaaacacacacacaaaatcgttctttactttcattttgattcttttaaatctgtctagttgtaagtctaatatgatgcattttaagatggagtccctccctcctacttccctcactccctttctcctttgcttatttttcctaccttcccttcctcttgtctccccactccctccctctttgtttccttccttccttatttcctttagtttccttccttagccgttttgagtggtgggaatcaatgctgtttcactcaaaagtgttgcatgcaaacacttctctttattctgcatttattgtgatttttggaaacaggtatcaaccttcacagttgggtgaacaagtgttgtcctacagatgtccaatttatttgcatttttaaacattagcctatgatagtaatttaatgtagaatgaagatattaaaaacagaagcaaattatttgaagctctctaatttgtggtacgatattgcttattgtgactttggcatgtatttttgctagcaaaatgctgtaagatttataccattgatcttttttgctatatttgtatacagtacagtaagcacaattggcactgtacatctaaaaatattacagtagaatctgagtgtaatatgtgtaaccaaaatgagaaagaatacaagaaatgtttctggagctagttatgtctcacaattttgtagaatcttacagcatctttgataaacttctcagtgaaaatgttggctaggcaagttcagttaaaatatagtagaaatgtttatcctggtatctctaagtatacatttaattgtacagaaaatttacagtgtaacattgtgtcaacatttgcagattgactgtatatgaccttaatctttgtgcagcctgaaggatcagtgtagtaatgccaggaaagtgctttttacctaagacttccttctcagcttctcccataaagagaccctaatatgcattttgatttgtaattggaaatgtaactttcactgaaagtgtcatgtgatgtttgcattacttttaactgctatgtataaaggaaagtgtgtcttttgacttcatcagttatttctcttgtgcacagagaaaaatgcattaaaaatgactaaaaaaataaaaaataaaaaatggataaatcttttctttttgcctttttgccctag

SEQ ID NO: 538 - DNA, 4723 bp, Homo sapiens
gggatctgttcgattcaggctttcacccttttactgccttacagattgctaatatacattctccattggtcttttaatgtcgtttacagaagctgactctctaccgcctccttctctccgtctcaccctctctgcctcgcctgctctgtactgttctgttctcttctctctctccctttgtttctctctctcccttttttcttttcagtgcagaagtttttaattttgaccgagccaaatctatcaatctaggcctggcgccgcgtcagcagagggggcggggaggcgagcgcggaactgggggaggggaaggggcggggatcagcaggcggagcggctgccagagttgctgggagtgcgcgcggtcggatcacaaggcggcggcggaggaggcccagagaccggagcgcggagacctcagccagcggcctacgcccaggcctttctccaccggaggaccagggaaccgcagtcttcatcacagaggtaccgtgctccgcgctccccgcctgacccggcccagcccgctgcggcggtgcctccttccttcctccttccctcgcgctctctctttcgcccgcccgcgccttccctgcccgcctgcgtcaccgcggccgccatggctgagaatggcgagagcagcggccccccgcgcccctcccgcggccctgctgcggcccaaggctcggctgctgccccggctgagcctaaaatcatcaaagtcacggtgaagactcccaaagagaaagaggagttcgcggtgcccgagaacagctcggttcagcagtttaaggaagcgatttcgaaacgcttcaaatcccaaaccgatcagctagtgctgatttttgccggaaaaatcttaaaagatcaagataccttgatccagcatggcatccatgatgggctgactgttcaccttgtcatcaaaagccagaaccgacctcagggccagtccacgcagcctagcaatgccgcgggaactaacactacctcggcgtcgactcccaggagtaactccacacctatttccacaaatagcaacccgtttgggttggggagcctgggaggacttgcaggccttagcagcctgggcttgagctcgaccaacttctctgagctccagagccagatgcagcagcagcttatggccagccctgagatgatgatccaaataatggaaaatccctttgttcagagcatgctttcgaatcccgatctgatgaggcagctcattatggctaatccacagatgcagcaattgattcagagaaacccagaaatcagtcacctgctcaacaacccagacataatgaggcagacactcgaaattgccaggaatccagccatgatgcaagagatgatgagaaatcaagacctggctcttagcaatctagaaagcatcccaggtggctataatgctttacggcgcatgtacactgacattcaagagccgatgctgaatgccgcacaagagcagtttgggggtaatccatttgcctccgtggggagtagttcctcctctggggaaggtacgcagccttcccgcacagaaaatcgcgatccactacccaatccatgggcaccaccgccagctacccagagttctgcaactaccagcacgaccacaagcactggtagtgggtctggcaatagttccagcaatgctactgggaacaccgttgctgccgctaattatgtcgccagcatctttagtaccccaggcatgcagagcctgctgcaacagataactgaaaacccccagctgattcagaatatgctgtcggcgccctacatgagaagcatgatgcagtcgctgagccagaatccagatttggctgcacagatgatgctgaatagcccgctgtttactgcaaatcctcagctgcaggagcagatgcggccacagctcccagccttcctgcagcagatgcagaatccagacacactatcagccatgtcaaacccaagagcaatgcaggctttaatgcagatccagcaggggctacagacattagccactgaagcacctggcctgattccgagcttcactccaggtgtgggggtgggggtgctgggaaccgctataggccctgtaggcccagtcacccccataggccccataggccctatagtcccttttacccccataggccccattgggcccataggacccactggccctgcagccccccctggctccaccggctctggtggccccacggggcctactgtgtccagcgctgcacctagtgaaaccacgagtcctacatcagaatctggacccaaccagcagttcattcagcaaatggtgcaggccctggctggagcaaatgctccacagctgccgaatccagaagtcagatttcagcaacaactggaacagctcaacgcaatggggttcttaaaccgtgaagcaaacttgcaggccctaatagcaacaggaggcgacatcaatgcagccattgaaaggctgctgggctcccagccatcgtaatcacatttctgtacctggaaaaaaaatgtatcttatttttgataatggctcttaaatctttaaacacacacacaaaatcgttctttactttcattttgattcttttaaatctgtctagttgtaagtctaatatgatgcattttaagatggagtccctccctcctacttccctcactccctttctcctttgcttatttttcctaccttcccttcctcttgtctccccactccctccctctttgtttccttccttccttatttcctttagtttccttccttagccgttttgagtggtgggaatcaatgctgtttcactcaaaagtgttgcatgcaaacacttctctttattctgcatttattgtgatttttggaaacaggtatcaaccttcacagttgggtgaacaagtgttgtcctacagatgtccaatttatttgcatttttaaacattagcctatgatagtaatttaatgtagaatgaagatattaaaaacagaagcaaattatttgaagctctctaatttgtggtacgatattgcttattgtgactttggcatgtatttttgctagcaaaatgctgtaagatttataccattgatcttttttgctatatttgtatacagtacagtaagcacaattggcactgtacatctaaaaatattacagtagaatctgagtgtaatatgtgtaaccaaaatgagaaagaatacaagaaatgtttctggagctagttatgtctcacaattttgtagaatcttacagcatctttgataaacttctcagtgaaaatgttggctaggcaagttcagttaaaatatagtagaaatgtttatcctggtatctctaagtatacatttaattgtacagaaaatttacagtgtaacattgtgtcaacatttgcagattgactgtatatgaccttaatctttgtgcagcctgaaggatcagtgtagtaatgccaggaaagtgctttttacctaagacttccttctcagcttctcccataaagagaccctaatatgcattttgatttgtaattggaaatgtaactttcactgaaagtgtcatgtgatgtttgcattacttttaactgctatgtataaaggaaagtgtgtcttttgacttcatcagttatttctcttgtgcacagagaaaaatgcattaaaaatgactaaaaaaaataaaaaattaaaaaatggataaatcttttctttttgccttttggccctaggatcgtgtttaggaggattatcccaccccgagattatataaatcttatcctatatttctctaacttatatggttttatttagaaaatgttttgtcctgtctggaattatcttgatgtatggatttaggtattctaacttttttgccccaaagggttagccagttgttaacatatttaccttttcccccaacatatgaaatgtcatacatgtatatactttattctgtgtttggattccctttagttccattgaacattgtggcaccagtacaccagcctgtagatgagttagaaatgggactttgtatcttttaatgtgagacctcctcttgatcttttttattttttacaatattctgacgattctgacatgtttattttaccagatgaattttacagttaatagattcttcccccaaaaatatattgagaatttggttgggattctcttaaattgatatgactgtgaggactacagaattgcattgctttccagaaacatgttgccttgtttctgaaaaactttatatatccttcaagagagttttacttaaatcctatataatttgtaataaatatgttcctaggtaatacagacatacagggaacacgttgatactgcttattggagcttttaatatgttacctatgtggtcatttttgctatataggagaagaatttatttgcatcgattattttaaattggcaatttattgaaatctattaattttagagatattcatttgatccttttgagtttttccaggtgagaaatcctatcaattatgttataattatatgttttccttttcaaaatttataacataatttctgactgcatgggttaaacattttcataacagtgctaaataataaaggtggcaggggcatttttgtcttgtttctcattttagccagaatgtgtttgctacagcaattccaaattgtgttttgtgaaaaaaaaatattcttctgggagacaaggaaatacatttgcaa

SEQ ID NO: 539 - DNA, 4045 bp, Homo sapiens
cggcccaaggctcggctgctgccccggctgagcctaaaatcatcaaagtcacggtgaagactcccaaagagaaagaggagttcgcggtgcccgagaacagctcggttcagcagtttaaggaagcgatttcgaaacgcttcaaatcccaaaccgatcagctagtgctgatttttgccggaaaaatcttaaaagatcaagataccttgatccagcatggcatccatgatgggctgactgttcaccttgtcatcaaaagccagaaccgacctcagggccagtccacgcagcctagcaatgccgcgggaactaacactacctcggcgtcgactcccaggagtaactccacacctatttccacaaatagcaacccgtttgggttggggagcctgggaggacttgcaggccttagcagcctgggcttgagctcgaccaacttctctgagctccagagccagatgcagcagcagcttatggccagccctgagatgatgatccaaataatggaaaatccctttgttcagagcatgctttcgaatcccgatctgatgaggcagctcattatggctaatccacagatgcagcaattgattcagagaaacccagaaatcagtcacctgctcaacaacccagacataatgaggcagacactcgaaattgccaggaatccagccatgatgcaagagatgatgagaaatcaagacctggctcttagcaatctagaaagcatcccaggtggctataatgctttacggcgcatgtacactgacattcaagagccgatgctgaatgccgcacaagagcagtttgggggtaatccatttgcctccgtggggagtagttcctcctctggggaaggtacgcagccttcccgcacagaaaatcgcgatccactacccaatccatgggcaccaccgccagctacccagagttctgcaactaccagcacgaccacaagcactggtagtgggtctggcaatagttccagcaatgctactgggaacaccgttgctgccgctaattatgtcgccagcatctttagtaccccaggcatgcagagcctgctgcaacagataactgaaaacccccagctgattcagaatatgctgtcggcgccctacatgagaagcatgatgcagtcgctgagccagaatccagatttggctgcacagatgatgctgaatagcccgctgtttactgcaaatcctcagctgcaggagcagatgcggccacagctcccagccttcctgcagcagatgcagaatccagacacactatcagccatgtcaaacccaagagcaatgcaggctttaatgcagatccagcaggggctacagacattagccactgaagcacctggcctgattccgagcttcactccaggtgtgggggtgggggtgctgggaaccgctataggccctgtaggcccagtcacccccataggccccataggccctatagtcccttttacccccataggccccattgggcccataggacccactggccctgcagccccccctggctccaccggctctggtggccccacggggcctactgtgtccagcgctgcacctagtgaaaccacgagtcctacatcagaatctggacccaaccagcagttcattcagcaaatggtgcaggccctggctggagcaaatgctccacagctgccgaatccagaagtcagatttcagcaacaactggaacagctcaacgcaatggggttcttaaaccgtgaagcaaacttgcaggccctaatagcaacaggaggcgacatcaatgcagccattgaaaggctgctgggctcccagccatcgtaatcacatttctgtacctggaaaaaaaatgtatcttatttttgataatggctcttaaatctttaaacacacacacaaaatcgttctttactttcattttgattcttttaaatctgtctagttgtaagtctaatatgatgcattttaagatggagtccctccctcctacttccctcactccctttctcctttgcttatttttcctaccttcccttcctcttgtctccccactccctccctctttgtttccttccttccttatttcctttagtttccttccttagccgttttgagtggtgggaatcaatgctgtttcactcaaaagtgttgcatgcaaacacttctctttattctgcatttattgtgatttttggaaacaggtatcaaccttcacagttgggtgaacaagtgttgtcctacagatgtccaatttatttgcatttttaaacattagcctatgatagtaatttaatgtagaatgaagatattaaaaacagaagcaaattatttgaagctctctaatttgtggtacgatattgcttattgtgactttggcatgtatttttgctagcaaaatgctgtaagatttataccattgatcttttttgctatatttgtatacagtacagtaagcacaattggcactgtacatctaaaaatattacagtagaatctgagtgtaatatgtgtaaccaaaatgagaaagaatacaagaaatgtttctggagctagttatgtctcacaattttgtagaatcttacagcatctttgataaacttctcagtgaaaatgttggctaggcaagttcagttaaaatatagtagaaatgtttatcctggtatctctaagtatacatttaattgtacagaaaatttacagtgtaacattgtgtcaacatttgcagattgactgtatatgaccttaatctttgtgcagcctgaaggatcagtgtagtaatgccaggaaagtgctttttacctaagacttccttctcagcttctcccataaagagaccctaatatgcattttgatttgtaattggaaatgtaactttcactgaaagtgtcatgtgatgtttgcattacttttaactgctatgtataaaggaaagtgtgtcttttgacttcatcagttatttctcttgtgcacagagaaaaatgcattaaaaatgactaaaaaaaataaaaaattaaaaaatggataatcttttctttttgcttttggcctaggatcgtgttaggaggattatcccacccgacgataatataaatcttatcctatatttctctaacttatattgttttatttagaaaatgttttgtcctgtctggaattatcttgatgtatggatttaggtattctaacttttttgccccaaagggttagccagttgttaacatatttaccttttcccccaacatatgaaatgtcatacatgtatatactttattctgtgtttggattccctttagttccattgaacattgtggcaccagtacaccagcctgtagatgagttagaaatgggactttgtatcttttaatgtgagacctcctcttgatcttttttattttttacaatattctgacgattctgacatgtttattttaccagatgaattttacagttaatagattcttcccccaaaaatatattgagaatttggttgggattctcttaaattgatatgactgtgaggactacagaattgcattgctttccagaaacatgttgccttgtttctgaaaaactttatatatccttcaagagagttttacttaaatcctatataatttgtaataaatatgttcctaggtaatacagacatacagggaacacgttgatactgcttattggagcttttaatatgttacctatgtggtcatttttgctatataggagaagaatttatttgcatcgattattttaaattggcaatttattgaaatctattaattttagagatattcatttgatccttttgagtttttccaggtgagaaatcctatcaattatgttataattatatgttttccttttcaaaatttataacataatttctgactgcatgggttaaacattttcataacagtgctaaataataaaggtggcagtggcatttttgtcttgtttctcattttagccagaatgtgtttgctacagcaattccaaattgtgttttgtgaaaaaaaaatattcttctgggagacaaggaaatacatttgcaa

SEQ ID NO: 540 - DNA, 11138 bp, Homo sapiens
cggaggcagagtaagaagactcagtaccgggaataccttgacttcattaaagaagtgggcttcacctgtgggtttcacgtggacgaagactgcctcaggattccttcaaccaaaagagtatgtctgattctcatgttgttctaggcggtgtgtcggtgttcagatggagagctcagggctctgccacagagccatgaaccatgctgtaacgttcaaaatgttctagaacgtgccggtgctgatttctgtgcctctgtcactgatgaggcccagaggcttgttctgtcccatggtgccctccttaaaggcacccggtgctccctcctccaggcctgcaggagtcctcgccaagccctccttgcctctccagaagctctgagtggccccaggggacctgcccagaggaggcctcagtgtggcctgtggctgacctccctgtggaaagttcctgctccttcaagtcgcagataattggctgcgattgaagtgtgtttcagaagttcacagtgatttcccattttctcattaaaggcctagttcattcagattcacctgaaatgtcatttgggcagaagttggcccgggggctttctgtaagcagtgggactgtgcctctgacctttgtgtggacagggcagacttatgccctcttgccgctccaaaggcttgaccttttgaaagtaccgtggaagtgtttacagcagctcacctatgtctctggtaactttatttgacaagactgtggctggcagacagtgtgcttttaaaaaataaccccgtcgtgtccaggccacagaatttgatggctgccttagcaagaaagggcccagctgatctgagtgaagcctcggctctgctgctgcccgtggtgcactcgggctgatcgcggagctccgctaagcctgtcctcacctgtgagaccaggaggaggctgcccgggtctctgtgggggctggacaggatgatgtcttcagagcccacagcggggagggcatgttgtgggcactcgctggccggctgccgtcatagccgtgcaccaggagcagcgttggcttgtggcacaggcctcagggccgctggcgctgtcactgccctgctaccgtgggaagttaccttaggactcgctgctgaaccgtcccgtcatcctctgtgtcctctgtttttggcaagtcttggtcttctgagttcagaattgatttggggaaactgctaaagtttgggtcctctaggcgggtccgaggagcccgtggctttgatttttgcacttgcttctccattactaattggtagagaccgtggactgtcgcttcatctctctgagcttcagttttcttatcactggcaggtttggggatcgaatgtaagagtggatgtgaacgtgctttgtcatttttaaagcagttcacacacagcacatgtctggtggggactgggtgtgtgacaggcactgagaatttaaaatcccgctggaagagctggggagcagaggtgtggctgtcacgtagtgaggaggtcggcttccttatcacccgcgcctggccttgtagttgatgcctggagaggaagcccagaaatgaggtgcccttgctggggctgggcagggcctggttgtccggaggggactgtctgaagggcaccctccatcggggtgtgcggcaaagggaggcaagcacgcatggagcacctctatggctccaggccctctgcgcagcccccgtatgcactcgctggctctggcaaggtggggacaaagctgcctcccttcccagcccctggggcactctgcaactctgcagcgttaccatcagcatgtgcccccgccgggcggccgaggggtggaatgaggggcggcagcgggaaactaggacggtgcggctgccgggcccaggagtgtggactcttgagtttaggcgcctttgttagatcttgtgaaggtccaagatctaacaatgatgagagggaaccatgggctcttactgtttttttaatttttaagttacttatattggtgtcagtttttattttgtatttatttttattgatttatttattttgagatggagtttttgctcttgtcacccaggctggagtgcattggcacaatcttggctcactggcctctgcctcctgggttcaaatgatcctcctgcctcagcctcctgagtagctgggactacaggtgagggccaccacgcccggctaatttttgtatttgtagtagagacgggattttgccatgttggccaggctggtctgaaactcaagtgatccgcctgccttgggctcccaaaatgctaggatgataggagtgagccaccgtacctggctggtgtcagttttttaaatcaggattttttcatgatagacattgaaaacttgtgatttgtactccaggatgagagaattccatggagaacgttgaaatagactagccagctaaaatacttgctttgctttcttcaaacgcaggtctgtctcgttggaaaatccagaacatacccttcctccagagaagcttccgtggatgaaaagaggactcagtacattaagagcaggcggggctgccctgtaagcccacctggctgggagctttccccttctccacgctgggttgctgctggcagtgctggtcactgtgacggtcagcaagctctggacgccagggtcgggtgtgtaaccagggcctgggccgctgagcatggagcagggccccaggctgaaggaccctggctacctggatttcatcccagagaaaaggctgagcgtgtgaggaactgtgccgccctgccacgagattttattgaccaagtggttttgcaagtagcgaatttactgttaggtggaaagcaattaaacacaagaagttctcgaaatgggagtttgaagacctggaatgggggaggtaagctgtccaccatcttagggaggggctagcacgctcccaggcttgagggcaggaattcacgtcttcagaaccgacatgaaatggtgtggccctgtgactacacactttgaaaaagccattgatggtgggtgcataggctctcttcaagcaaattctttaaaattttccaaatagctcttataaacataaaggactttgttatttccagggagtgacagagtttggacccttaattaacttttaccaaacatgcaggtttaggggctagaactactcattttcaatctagaaattatccaaagagaaaacaggttactgagtgcaagcaaaatgcactgtccccttgagtatgtggtaagatttggagctgttgtgattcgataatttaattctctttgaaatccccaaaacacaacaatcatccatggcaaaaggagaaaattacatcgattgttctcatggggtgagtggtgtgctgaaattatgttctcaggtgagtggtgtgttgaaattaacggcattcagagagccagccagggctgtaaggacctcgcctccttccgggcagggatgctgcttggccgccagagggtggtgtagagctgcagccaacgcctggcttctcttgcagttttgggaactggagaagagcacggagccccatcccctcccggcccctccgtcggtgacttctgcctggctgcgcatttgagggaaacccttcttctccaggctttgctttcctcacctatgaatgttgggacaaaatcatacccgtttccttcttcatcctttgtcctcttgtaccatgtgtacgtgggatgggaccgggccatggagcatagacggcccctccagaaatcattcgaacctgatggtacctggtcagcagagcctctagccatctggcgagagtggccctggctcagtggctgatggggccgactagctgcaaaccaccaggcaccgtggggcctctgggttggccctgctgactaaaggcaccctgctgtggtggggctggagcacagaggaagaaggctgaggctggcagagcatggagcccaccacaggcaactgggacccagagccccagggacatcagtgtggtctgaaagttcccacgtgcagtaaacagtgacagttcttgagtgcagtttgacctttaaattcccaggagatgacgggcacacagatgtcagctgtgcctgggatggacggctttcggtgggtgaggaggaaggaggaacagacctggagatggagagcggggatgggtgagcggtgggctcagtcctgcctgcgccttggaacttgggaatcagggcacctaacaggctctggacccccgtcccctccagatgggtgtccgtgggtctggggcttgttagggactctccacgtggccttggcctctcagcccactgcctccctcccgcccacaggcggccttcagggcctttggtcgcccccacccagcctgtcctcaggcaggcacctctgcgtttctgtgcctgtgggccatgtgtggctctgtctccaggacctcacccatcctagctcggcgtctgtccctgtgggacactgctgagaaatagggtaggaaagggccctgccctcaagaggctccaagtcctgcctggctaggagtcaagaccgcacacgtcaaaggatgagaaaccaagaggccggatatgccaggccaggaggcacccatggctgagtgtgagattccctgttatggagtccatgctgggccagagccggggcaacagggaaggctgactgggacaatatgtgatcttttttaaaacactcccgctcctctcagaatggatttgagacagccgagaggtggactcagaaggttggccaggctgggtgggcaggattctcgcagcagctgcgacagcggctgccagcaccaggctcctgggtcaggagtgtggtgtcctgatccgtaggggtctgacaggctcagctgcatacagacaggcgccgtctcctccgctctcctgcagcttgggagggtgtggataagatgtgaggtgcagcacctggcagataggaagttcctggcaaatacatgcaggaaaaccagctttcattcatatccaatttgatgttttggtaataaatgactttaatgtcaccaggttttctgattagagcattttgaaatacctgcaggctctcaaagcagaaattcgaatgggaaagagaccatcactgtggtgtctgtgctgttcctttttttagtgcctagcatggccttgctggccaccctagagccggtagcgccagggctggctgccccatggttggagcagccactgggaaggctcaggccccaggcttgccagcttggccttccttctttagtctgagaaaccctggctccaaacagccaccccccttcatgggtcaccagtgagaagagcttgaggtgaccacccagagcaggcagcatcacctgacgcctggccctgtgcgggcatggggcatgtgtggggctgcgtcttgtcaggctgtgccaccttagctgggtggggacgccacggccctcacggtttggtgcggtgtggtgtgggttaggtgagatggaatcgtccttcgtgctggagtgcataacgcgtgtgagtgtatggaactgaaatggactgtttctgcctgtgtgacaggttcgtaatattttgctgttgttttggggaaaaaaaaaacccgtttttccacagagagcctatctctggcagaagtagccaacgagctggacacggagaccctgcggaggctgaagcgggagtgtgggggcctgcagacgctgctccggaacagccaccaggtgttccaaggtacggagtccgcctctcccccgccgttctttccttctttttcccccttttttcagttaaataatgttttattttagagtggtttagactcactgaagaatctgacagaagcagcaagttccgcggtgccccacccagctctgacgtgggtggcatttgacctcagggtgggacgtgggtcaccccgttccctccttgctcctctggacctcgtcccatgcgatgtccccaggctggtctctctccccctatgctgtgcttgctgacgcctcagctccacttgctccacgcaggacagagcaagtcgggtagccgctggccggtcccctgttggctgggggtcattgtttggcgtcatctttagctgctgcaaactgaaagcatcctgagccacagagccagggtggggagtgggaagagtgagccctgccccacaggcggaggcctggactcctgtggccctcgccccacgggcctgggcaggcggaggtcctggtacccagttcccctgctccccaacgccctgtgactccaggactgccagggtatggggaggcaggagggccctccacccgcttgtccattcactcagcccgcaaagcaaggcagacacatccctggccttctggagccggtggtgcagtgagggaggggggagatgtagcaggtgctcacccaggtgccagtggtgtacacacttccatcatctgcagcttccaggtgtgcacagagggggcaggaacagggcagggagccatggtttaccagcgccagcggctggggagtttgccataacttgctttgtggcgctttttttttttttttcctctttctgtaagtattttaaagcaaattctagctagcatgctatttcacccctaagtacttccacgtgcatctttaagaatagtaggtgtcttcttgtgtcaccaccatgccctaagcacacatttctgtgagttgtgatgtgcagggagaactggcctggcccgagtgggctcaggagggctttacttaggaaatgacacttgagctgggcctggaaggaaaagaggagtcaggaacagagaacagctttaggcagagcgaacagcatttgcaaagagccagggttgggaggagtaagagtgggagctggtcgggttacagccgccatgaccaggaaaaggactgggcctctgatgggtagggatgacaccgaagtcacagtgggaaggagtggcctggcttacaccctagcttctgggtcccctgcccatgaagtagccgtggggatcaggtgcagtacagtgtctggctctctgggtgtgtgagagagcacaggtgtgtgtgccattcctcatgtgtacacaagagtgcaagcgtgtgggtttgtgcacacacacacactgcctttgtgtgcctgcctgctcctggagagctgaacttggctttcagctgaactggcctctctaggtgagagctgctgttgggtggggggccggtgagcatggttggagcctgtgtttctcggggcaggcgcagaagcgtgtccctgaggctgcccccagagtagacactgggcctgcagtgctggctgggctgggcctgctggctgggctgggcctgctgcctggagtctgctcttccttgcatagagctttaggcagttagaatacttcccacctccacggggcctctttctgtctttcccaacacttgtttttgttggtttcctgaaatactgtctttttcacccatgatgagtctgcttgtatgtcagtgtttttctgtgcaggtcaccctgggggggcaaacttgtttttggaaacgcttctgagtaggaggcctgggaattgggttccaaataaacattctcctccagtcatgcgaaaactatgctctgaagctgggtcttatctctgtatgaggtttaggttttgttttaagctaacgtggctagtctcagaaaatgtttatgagagtgaggaattggaaatgtttccagatggcttcaggtcagccagccctgagcatgacccatgagggccacaagggccagccctgcctctgtccctgccccttcctgaggccgccaaggggcggcacgctgcatccatgctggctggtatggagcctggcaccgtgctgccgggtacacgcggggcctcatctcatcctgcactcatggcagagcaggcctttcctccttgaacatgtagacaagtctcagagaggtcagtgcgccggcccgatgtctcccagtgagtggagaggccacgccacagtccgggccaggtctgacccagcactggcacccctgagcctatggcatcatccgaggactgtaatcctcaacccgttcctcagagcaacttggtgaaagggagtgtctgtctgctgtcagaagcagtggtggagatggcggctcctgtgctgaggtagagtcccaggggatgcgcacggtaaggagggaggaggcggcaggaacttgggtggagcagactgtggctctgtggttccatttcaaaatgaggagcacatttccagaggaggagagtctttctagctgttggttgtctttctagctggctagagcaagtgcctctggaaggccgccccttctggcacctggccagatgggggctcaggtgttaagaggggcggccgggagctacctgccatgtccagggttgtagacacggggagtgggtcagtgaggctgggccagcctggagcctgcctgcgccgttcgggagcctcatctctatcatcagcgcccgctcctcagtccttagacaccctgcaggtcctgcttccaaaacatggttgggtgtgctcttaactccggagccgcgtgggagggcctgccgccagctggcctgtcacgttgtggtggggaagggggtgccgaggctggctctgaggggaatctgtactcagcctttggcctcagtgatcccccaccccccattctcttgacaggtcagggcatcaggccagaggcccctcactgtttgggatcatggggagttggggggaagctctggcccctggggctcctcctgagcaccctttagagggttccaggtccctcagtggccaggatgtgcccttctgtgctgcgccaggaggtgctgctgtggggacatgggcagagtgtcgcgggactgccttaacaggagacttcaggttaagaaacctcagctccaatgttgggaggcgagacagagaggcagccgtgggagggcaaacagggtcaggcctggccttggcggtgcttccagccaggctgtgagggtgagcccccaactgtggcgccgttctctgggctcatttctctagtttcaggggaaactgtaaaacatcagtctgtcaaaagcacacaggctcgttattgccacacacaaggtgatttgaaggcagaattcgagctttaattcctacactttcaagttctctttggaagtcggtgagccagacttcctcactgaggctcctttattcccccgagccttctgtcgtgagcggtttcctagcttccagcgagaaccaggaaggaggtggttgctttggccatgtttcacggggagttgttggattcccacaaggaaacggccaaatgggagcgtaggggggtatctcggcccaatttgggcggcggggtcaggaggcagcctagaggaggcctgcgaggcctgggacccaggtgacgagcgggcccacagcagccctctcctggccccaccccactctgatgtccctccagctccccagtttggagatcagccctggccattgggtcccagtggcactttcagagggggtatctaaactactgcacataggcaggtcccccttcgtgttcctgttccagagctcattggcctctgttactccacacttgcacctggaggggctccggttgggaggcgcatgtaaacccagtgcaccgggacggcaccaaggagcagaggctgccctgcaccagccccgtccttagactgcgtggagggacctgcgccttgcccctctttctgcccgtaatgctgacacagtcctcagaggtcggggctgcagcacagatgttttctcgtgtttcggctctcacaccgtggtccctccttcctccactcaagtgatccttctaaaatggtggctctgcaggacctgcctctcagccagagggaaggtcggtggcctcaatgatgaggccacaagggacccagctctgtcctctgccctcccctctggctgtccctcgaatgtggccagtcctggtgcagtctgtcctgggacactcgggtttgctgctgctttgcctaaaatgctcttcctgggtctgcgcagggctgccgctcacttcccgcagggctcaccttccccggccttgcctgaagacacatcccatacctcagtcactcccactggaggcagactcactgtgaccagcaggaactctaggctgtgttccggttgtatccctgaccctggattggcacctcccgtggcgtgggagctaaagagaggctggtgaattaaggaactttcaggtttacttctcagtgtgtcttctctgttccaaaccacagttgtgaatgggagagttcacatccgcgactggcgagaggagacactgtggaagacaaagcaaccggaagcgaaacagagactgctctctgaagcctgcaaaacccgcctctgctggttcttcatgcatcaccctgatggctgcgctctgtccacggactgctgcccgtttgcccatgggcctgcggagctgcggccaccccggaccaccccgaggaagaagatttcatgagctgcatccttgccagccgaggcctggttggggaggccaaaccaaggagagcttccccagcagtcgtcagtgctgtggtctctgctctggctgtgtttcagcccacctcctcccagctttctccacatcctcacagtgatgaaccgtatttcataaacatcacacgccagagaagccacagttactcggaagcccccagctgactgcctggcttgtttcagatgcagccgcttgaaacgtgcgcagcatcttcatatcataaagattgtgcacggatccttacaatgtctcctgggggagagcggctgaggctgccttgcacaggcccttcccagggcgctgtccgacgcctgccccaccatgtccacatctgtgaagaggatggggctcctcgagaagtaagaccgtatctgccagcgtttctcaccacactggagagcagctgctctggagcagggatccaccagattggtatttttaaaaaaggtgtcaggcttgctatgttgaggttgtttttagagttacagagaataaaaacactcataatttcctgacatgggccactctaagtggcatgaaa

SEQ ID NO: 541 - DNA, 8571 bp, Homo sapiens
ccctgtaagcccacctggctgggagctttccccttctccacgctgggttgctgctggcagtgctggtcactgtgacggtcagcaagctctggacgccagggtcgggtgtgtaacagggcctgggccgctgagcatggagcagggccccaggctgaaggaccctggctacctggatttcatcccagagaaaaggctgagcgtgtgaggaactgtgccgccctgccacgagattttattgaccaagtggttttgcaagtagcgaatttactgttaggtggaaagcaattaaacacaagaagttctcgaaatgggagtttgaagacctggaatgggggaggtaagctgtccaccatcttagggaggggctagcacgctcccaggcttgagggcaggaattcacgtcttcagaaccgacatgaaatggtgtggccctgtgactacacactttgaaaaagccattgatggtgggtgcataggctctcttcaagcaaattctttaaaattttccaaatagctcttataaacataaaggactttgttatttccagggagtgacagagtttggacccttaattaacttttaccaaacatgcaggtttaggggctagaactactcattttcaatctagaaattatccaaagagaaaacaggttactgagtgcaagcaaaatgcactgtccccttgagtatgtggtaagatttggagctgttgtgattcgataatttaattctctttgaaatccccaaaacacaacaatcatccatggcaaaaggagaaaattacatcgattgttctcatggggtgagtggtgtgctgaaattatgttctcaggtgagtggtgtgttgaaattaacggcattcagagagccagccagggctgtaaggacctcgcctccttccgggcagggatgctgcttggccgccagagggtggtgtagagctgcagccaacgcctggcttctcttgcagttttgggaactggagaagagcacggagccccatcccctcccggcccctccgtcggtgacttctgcctggctgcgcatttgagggaaacccttcttctccaggctttgctttcctcacctatgaatgttgggacaaaatcatacccgtttccttcttcatcctttgtcctcttgtaccatgtgtacgtgggatgggaccgggccatggagcatagacggcccctccagaaatcattcgaacctgatggtacctggtcagcagagcctctagccatctggcgagagtggccctggctcagtggctgatggggccgactagctgcaaaccaccaggcaccgtggggcctctgggttggccctgctgactaaaggcaccctgctgtggtggggctggagcacagaggaagaaggctgaggctggcagagcatggagcccaccacaggcaactgggacccagagccccagggacatcagtgtggtctgaaagttcccacgtgcagtaaacagtgacagttcttgagtgcagtttgacctttaaattcccaggagatgacgggcacacagatgtcagctgtgcctgggatggacggctttcggtgggtgaggaggaaggaggaacagacctggagatggagagcggggatgggtgagcggtgggctcagtcctgcctgcgccttggaacttgggaatcagggcacctaacaggctctggacccccgtcccctccagatgggtgtccgtgggtctggggcttgttagggactctccacgtggccttggcctctcagcccactgcctccctcccgcccacaggcgccttcagggcctttggtcgcccccacccagcctgtcctcaggcaggcacctctgcgtttctgtgcctgtgggccatgtgtggctctgtctccaggacctcacccatcctagctcggcgtctgtccctgtgggacactgctgagaaatagggtaggaaagggccctgccctcaagaggctccaagtcctgcctggctaggagtcaagaccgcacacgtcaaaggatgagaaaccaagaggccggatatgccaggccaggaggcacccatggctgagtgtgagattccctgttatggagtccatgctgggccagagccggggcaacagggaaggctgactgggacaatatgtgatcttttttaaaacactcccgctcctctcagaatggatttgagacagccgagaggtggactcagaaggttggccaggctgggtgggcaggattctcgcagcagctgcgacagcggctgccagcaccaggctcctgggtcaggagtgtggtgtcctgatccgtaggggtctgacaggctcagctgcatacagacaggcgccgtctcctccgctctcctgcagcttgggagggtgtggataagatgtgaggtgcagcacctggcagataggaagttcctggcaaatacatgcaggaaaaccagctttcattcatatccaatttgatgttttggtaataaatgactttaatgtcaccaggttttctgattagagcattttgaaatacctgcaggctctcaaagcagaaattcgaatgggaaagagaccatcactgtggtgtctgtgctgttcctttttttagtgcctagcatggccttgctggccaccctagagccggtagcgccaggctggctgccccatggttggagcagccactgggaaggctcaggccccaggcttgccagcttggccttccttctttagtctgagaaaccctggctccaaacagccaccccccttcatgggtcaccagtgagaagagcttgaggtgaccacccagagcaggcagcatcacctgacgcctggccctgtgcgggcatggggcatgtgtggggctgcgtcttgtcaggctgtgccaccttagctgggtggggacgccacggccctcacggtttggtgcggtgtggtgtgggttaggtgagatggaatcgtccttcgtgctggagtgcataacgcgtgtgagtgtatggaactgaaatggactgtttctgcctgtgtgacaggttcgtaatattttgctgttgttttggggaaaaaaaaaacccgtttttccacagagagcctatctctggcagaagtagccaacgagctggacacggagaccctgcggaggctgaagcgggagtgtgggggcctgcagacgctgctccggaacagccaccaggtgttccaaggtacggagtccgcctctcccccgccgttctttccttctttttcccccttttttcagttaaataatgttttattttagagtggtttagactcactgaagaatctgacagaagcagcaagttccgcggtgccccacccagctctgacgtgggtggcatttgacctcagggtgggacgtgggtcaccccgttccctccttgctcctctggacctcgtcccatgcgatgtccccaggctggtctctctccccctatgctgtgcttgctgacgcctcagctccacttgctccacgcaggacagagcaagtcgggtagccgctggccggtcccctgttggctgggggtcattgtttggcgtcatctttagctgctgcaaactgaaagcatcctgagccacagagccagggtggggagtgggaagagtgagccctgccccacaggcggaggcctggactcctgtggccctcgccccacgggcctgggcaggcggaggtcctggtacccagttcccctgctccccaacgccctgtgactccaggactgccagggtatggggaggcaggagggccctccacccgcttgtccattcactcagcccgcaaagcaaggcagacacatccctggccttctggagccggtggtgcagtgagggaggggggagatgtagcaggtgctcacccaggtgccagtggtgtacacacttccatcatctgcagcttccaggtgtgcacagagggggcaggaacagggcagggagccatggtttaccagcgccagcggctggggagtttgccataacttgctttgtggcgctttttttttttttttcctctttctgtaagtattttaaagcaaattctagctagcatgctatttcacccctaagtacttccacgtgcatctttaagaatagtaggtgtcttcttgtgtcaccaccatgccctaagcacacatttctgtgagttgtgatgtgcagggagaactggcctggcccgagtgggctcaggagggctttacttaggaaatgacacttgagctgggcctggaaggaaaagaggagtcaggaacagagaacagctttaggcagagcgaacagcatttgcaaagagccagggttgggaggagtaagagtgggagctggtcgggttacagccgccatgaccaggaaaaggactgggcctctgatgggtagggatgacaccgaagtcacagtgggaaggagtggcctggcttacaccctagcttctgggtcccctgcccatgaagtagccgtggggatcaggtgcagtacagtgtctggctctctgggtgtgtgagagagcacaggtgtgtgtgccattcctcatgtgtacacaagagtgcaagcgtgtgggtttgtgcacacacacacactgcctttgtgtgcctgcctgctcctggagagctgaacttggctttcagctgaactggcctctctaggtgagagctgctgttgggtggggggccggtgagcatggttggagcctgtgtttctcggggcaggcgcagaagcgtgtccctgaggctgcccccagagtagacactgggcctgcagtgctggctgggctgggcctgctggctgggctgggcctgctgcctggagtctgctcttccttgcatagagctttaggcagttagaatacttcccacctccacggggcctctttctgtctttcccaacacttgtttttgttggtttcctgaaatactgtctttttcacccatgatgagtctgcttgtatgtcagtgtttttctgtgcaggtcaccctgggggggcaaacttgtttttggaaacgcttctgagtaggaggcctgggaattgggttccaaataaacattctcctccagtcatgcgaaaactatgctctgaagctgggtcttatctctgtatgaggtttaggttttgttttaagctaacgtggctagtctcagaaaatgtttatgagagtgaggaattggaaatgtttccagatggcttcaggtcagccagccctgagcatgacccatgagggccacaagggccagccctgcctctgtccctgccccttcctgaggccgccaaggggcggcacgctgcatccatgctggctggtatggagcctggcaccgtgctgccgggtacacgcggggcctcatctcatcctgcactcatggcagagcaggcctttcctccttgaacatgtagacaagtctcagagaggtcagtgcgccggcccgatgtctcccagtgagtggagaggccacgccacagtccgggccaggtctgacccagcactggcacccctgagcctatggcatcatccgaggactgtaatcctcaacccgttcctcagagcaacttggtgaaagggagtgtctgtctgctgtcagaagcagtggtggagatggcggctcctgtgctgaggtagagtcccaggggatgcgcacggtaaggagggaggaggcggcaggaacttgggtggagcagactgtggctctgtggttccatttcaaaatgaggagcacatttccagaggaggagagtctttctagctgttggttgtctttctagctggctagagcaagtgcctctggaaggccgccccttctggcacctggccagatgggggctcaggtgttaagaggggcggccgggagctacctgccatgtccagggttgtagacacggggagtgggtcagtgaggctgggccagcctggagcctgcctgcgccgttcgggagcctcatctctatcatcagcgcccgctcctcagtccttagacaccctgcaggtcctgcttccaaaacatggttgggtgtgctcttaactccggagccgcgtgggagggcctgccgccagctggcctgtcacgttgtggtggggaagggggtgccgaggctggctctgaggggaatctgtactcagcctttggcctcagtgatcccccaccccccattctcttgacaggtcagggcatcaggccagaggcccctcactgtttgggatcatggggagttggggggaagctctggcccctggggctcctcctgagcaccctttagagggttccaggtccctcagtggccaggatgtgcccttctgtgctgcgccaggaggtgctgctgtggggacatgggcagagtgtcgcgggactgccttaacaggagacttcaggttaagaaacctcagctccaatgttgggaggcgagacagagaggcagccgtgggagggcaaacagggtcaggcctggccttggcggtgcttccagccaggctgtgagggtgagcccccaactgtggcgccgttctctgggctcatttctctagtttcaggggaaactgtaaaacatcagtctgtcaaaagcacacaggctcgttattgccacacacaaggtgatttgaaggcagaattcgagctttaattcctacactttcaagttctctttggaagtcggtgagccagacttcctcactgaggctcctttattcccccgagccttctgtcgtgagcggtttcctagcttccagcgagaaccaggaaggaggtggttgctttggccatgtttcacggggagttgttggattcccacaaggaaacggccaaatgggagcgtaggggggtatctcggcccaatttgggcggcggggtcaggaggcagcctagaggaggcctgcgaggcctgggacccaggtgacgagcgggcccacagcagccctctcctggccccaccccactctgatgtccctccagctccccagtttggagatcagccctggccattgggtcccagtggcactttcagagggggtatctaaactactgcacataggcaggtcccccttcgtgttcctgttccagagctcattggcctctgttactccacacttgcacctggaggggctccggttgggaggcgcatgtaaacccagtgcaccgggacggcaccaaggagcagaggctgccctgcaccagccccgtccttagactgcgtggagggacctgcgccttgcccctctttctgcccgtaatgctgacacagtcctcagaggtcggggctgcagcacagatgttttctcgtgtttcggctctcacaccgtggtccctccttcctccactcaagtgatccttctaaaatggtggctctgcaggacctgcctctcagccagagggaaggtcggtggcctcaatgatgaggccacaagggacccagctctgtcctctgccctcccctctggctgtccctcgaatgtggccagtcctggtgcagtctgtcctgggacactcgggtttgctgctgctttgcctaaaatgctcttcctgggtctgcgcagggctgccgctcacttcccgcagggctcaccttccccggccttgcctgaagacacatcccatacctcagtcactcccactggaggcagactcactgtgaccagcaggaactctaggctgtgttccggttgtatccctgaccctggattggcacctcccgtggcgtgggagctaaagagaggctggtgaattaaggaactttcaggtttacttctcagtgtgtcttctctgttccaaaccacagttgtgaatgggagagttcacatccgcgactggcgagaggagacactgtggaagacaaagcaaccggaagcgaaacagagactgctctctgaagcctgcaaaacccgcctctgctggttcttcatgcatcaccctgatggctgcgctctgtccacggactgctgcccgtttgcccatgggcctgcggagctgcggccaccccggaccaccccgaggaagaagatttcatgagctgcatccttgccagccgaggcctggttggggaggccaaaccaaggagagcttccccagcagtcgtcagtgctgtggtctctgctctggctgtgtttcagcccacctcctcccagctttctccacatcctcacagtgatgaaccgtatttcataaacatcacacgccagagaagccacagttactcggaagcccccagctgactgcctggcttgtttcagatgcagccgcttgaaacgtgcgcagcatcttcatatcataaagattgtgcacggatccttacaatgtctcctgggggagagcggctgaggctgccttgcacaggcccttcccagggcgctgtccgacgcctgccccaccatgtccacatctgtgaagaggatggggctcctcgagaagtaagaccgtatctgccagcgtttctcaccacactggagagcagctgctctggagcagggatccaccagattggtatttttaaaaaaggtgtcaggcttgctatgttgaggttgtttttagagttacagagaataaaaacactcataatttcctgacatgggccactctaagtggcatgaaa

SEQ ID NO: 542 - DNA, 453 bp, Homo sapiens
agccatccttctgcctcagcctgtcaagtgactgggactgtagatgcacgccaccatgcctggccaacttttaaaattttagaggcggggtctcgctatgttgcccaggctggccttgaactcttgggttcatgcagtcctcccacctcagcctcccaaagtgctggcatgacagctgcgagccatggcgtctgacccccgatgtttctatttaaagttatttctatggttttatacaaaaggtcacatgcagtccacactgttctgccgttgactttctgcagtgtaccctggtgcctctccattgggtatatctgcctgattattggcagcagccgtgtggcattccgtggcagcgccgcactcatcacacctgagcagtgagaataaatgggcatcttctctgaaggcacctcagctctgcagcaccacggggcggcgctgccacgggcc

SEQ ID NO: 543 - DNA, 453 bp, Homo sapiens; identical to SEQ ID NO: 542

SEQ ID NO: 544 - DNA, 780 bp, Homo sapiens
ctttcaagacaatggatgtggatatggccgaggaacatgccagggcccagatgagggctagatgaatatcggggatgaagcgctgattggacggtggagctgggatgacatacaagtcgagctcctgacctgggatgaggacggagattttggcgatgcctgggccaggatcccctttgctttctgggccagataccatcagtacattctgaatagcaaccgtgccaacaggagggccacgtggagagctggcgtcacgagtggcaccaatggaggggccagcaccagcgtcctagatggccccagcaccagctccaccatccggaccagaaatgctgccagagctggcgccacgttcttctcctggatccagtaagagtttcggtagagaaatgagactctgcaggagggctgcggaggggggtgagatgtcagagggagggccggggtgggggcgctgggggcaacggcaacagcatggacggacacttattttgttacgtacacccctccctggttcgcgtgtgtccacggatgttgtcactttggtttcttgtgcttttataggcaccgttgacgaactgcagcgatcttactggccaagccagagcgcctcctctcagattccttctcgacacagcaccctaggcggcttcttcctgtcagtcggaggtggcatgcaagatgaagctctctttgctcttcctgctttcattttgtgcttttccttgtgttttcatgttttgggtatcagtgttacattaaagttgcaaaattaat

SEQ ID NO: 545 - DNA, 1262 bp, Homo sapiens
  misc_feature (395)..(395): n equals a,t,g, or c
gtacctggaatacaagaagatccccaacagcaacccacctgagtatgaattcctctggggcctgcgagccgccatgagaccagcaagatgagggtcctgagattcatcgcccaggtaagggagcgcctctgttgggtgcccggcacgggggtggtgctctccacaccttgcttgtttcttggtcgaggcctccttcccattaccccgtattccagtgagggtacaaacactcacagaggcacctgagcaccctacacaaggtcacagatggggcaaaatcccaggtctggcacaggagagtaggagccccaatccctgtggtcctgatttttgccatcattgcacaaagcacacgggagggggtgaggcgggcgcgggtgctcagccagtgtggngtagctctgtgtctatgcctgccctttttctcctcagaatcagaaccgagacccccgggaatggaaggctcatttcttggaggctgtggatgatgctttcaagacaatggatgtggatatggccgaggaacatgccagggcccagatgagggccagatgaatatcggggatgaagcgctgattggacggtggagctgggatgacatacaagtcgagctcctgacctgggatgaggacggagattttggcgatgcctgggccaggatcccctttgctttctgggccagataccatcagtacattctgaatagcaaccgtgccaacaggagggccacgtggagagctggcgtcagcagtggcaccaatggaggggccagcaccagcgtcctagatggccccagcaccagctccaccatccggaccagaaatgctgccagagctggcgccagcttcttctcctggatccagtaagagtttcggtagagaaatgagactctgcaggagggctgcggaggggggtgagatgtcagagggagggccggggtgggggcgctgggggcaacggcaacagcatggacggacacttattttgttacgtacacccctccctggttcgcgtgtgtccacggatgttgtcactttggtttcttgtgcttttataggcaccgttgacgaactgcagcgatcttactgggcaagccagagcgcctcctctcagattccttctcgacacagcaccctaggcggcttcttcctgtcagtcggaggtggcatgcaagatgaagctctctttgctcttcctgctttcattttgtgcttttccttgtgttttcatgttttgggtatcagtgttacattaaagttgca

SEQ ID NO: 546 - DNA, 24079 bp, Homo sapiens
ggagatttaacatgagaatgctcgtccctggaaggcctgtaaaagatgctaccccaccaccggtgcctgcagaaagaccatcttacaaagaaaaatttattcctcccgaacttagtatgtgggattattttgttgcaaaggtaaggagtgtgaggaatgcaagctttaagagaagtctatcatctattttattaactcttgcatgtgtctcacataggaatgatggggtagcttttggattgaatcaccatagtttagacgtttaatttattaagtccagaaactgaatagtcatagtaaattcgaggatgatcagttacctgatgatgtaggagacaaattaaaatcacatgggagttatgtataaattagaagtcagcttattacataatcagcaccatctttttcgagtgactggaatacttgtatctaccacctagacacccctcttctaattatcagtggctcccttggtaagcatggaattagaatagaaggagatggatggacatttggcggttttatcaggccatgatgaggccccatgatacatctctgttttcccagcgcaaaggaaacttctcaggggatcagaatactcatggtgactagatctggtatagccccatttcataccatgctgggtgcatgctaatgtttgcttttctgcactttgctcttttgagctcatgattctccttctgttggtatgtttccctctttacatgtgttaactctgttgttaccttgctgtgcatacacatgagggaatacatctccagagtcatgcctcttcccatttttagatttttattagatctcagagttattgaggcgctgatcccgctccgtttttttgtatgctaagctgatccttaaaaagtctttcaacatgagtttggaagctttgttttgttatctaaagactctgaggccaggtgcagtggctcatacctgtaacctcagcactttgggaggttgaggtggaaggattgcttacatccaggagtttgagaccagcctggacaacatagaccatgtctctgccaaaaaaattttaaaacgtaggtgcagtgctgtttgcctgtagttctagctgcttgaaaggctgaggtgagaggattgcttgagtccaggaggtcagcgtggcagtgagccatgattgtgccactgcacaccagcctgggtgtcggactgagacagtgtctcaaaaaaaaagactttggttacgtcagtggttctcaaagtgtggtctcagaaccggcagcatcggcattccttgggaacttgtttgaaatgcagattcttgggtcttccctcagacccctcaatcagaaactctgggagtgagaaccaacaatctatgtcttaacaagctctccagatggttctaatgtgtgctgaagtttgagaactatgagcttaggcacattgtgagtgcagatttccaggtttacactctatcagggtccgagttatacttccagagtcattctggcctatcccttaaggctgccaattgagttgcacttagttgtatttagctaataaaccagggaaataataaagtactcttaaaaatgtataggcagttcccactcctacctttttaaaatttttatttgccacgaatgaaagctcattgcatcattaatgtgagtgataacaacattaagatttgtaaatggtaatgtgctaaatttttgtttttcaaaaatgtttcctcctgatatatgttctgaaaatttggaaaatgcaaaatattataaagaagggaaatagcactcatctgtgcaacaaagataactgttaccattgtggccaatttactattaatcttttttcctcagattaaaaaaatgtataattggatcagtatatgtagttttttttctgttaacattaacaaggtaaacagtttttatgccattaaaaacttatatagctgtcattttaaaaacttcagtgtagaaaacttccaacatacacaaaaggagagataatagcatatgaatcttttatctaccatcatgtagcttcaaaaattatctactcatggacagtcttgtttcatttatacctctccccactactttgtttggaagcaaatccaaacatcatgaaatttcattcaaaaatatttcattatttatttttgaaaaaaaaaaaggattttaaatagatctacattagtgttacacccacagaagcacacccacaattctttaatattatcacatattcagacagtattcacatttcaccagttgcatcttaaatgtttttatatagttgatttgttcaaatcaggatctaaaatatgattcataccttgcaagtggttgctatatcttcagtctcttttaatctataggctccacctctctctctctctctctctctttttttaacttaactcccacctttttcgtttgccctgaaagaattttgacctttagaatttttcaatggattttgctgatggcatcaccatattttgttcctctgaatcttgtcaagtgaaaattaaatccaatttcattctgattggataggaagagggagtacaggattaacttcataggtggttttgtatatttctgtcaggaagctttttatgattttagttgatctttgcctacatttattatttcagtgaaagttttaaattatgataatataatcctgtcattcatttttcatgtatttgctggaatgtctcttcatcaacctattcaattaccctgaagtacattttgagtcggaaagacaggataaatgctttattcttttgcttttgtgtaccagttttcaaaatgatgagttggttcccaagcatccttcagaggaggccagtgagttttgttttgctttcagctttgttatgaacttatagatttaaacatattttatatgttttaatctattgcagttatttttttctcatggggactcagattatccatctttgccagtgagagcctcttccacaattggctccgaatctttttgagattattccactagtgtttgagtttgcctgctttctagttttattctaggctaatcatgtatatttcctgcccgtgactgagaacaatcacttttttgaaataacctggttcctttttgtgagaaattatatttagaaactacagacagatgctggggtgctcgctcttacttggttgatcattgtttctagataagcatcaattatagtgaccatgtaacttttcactttgttagtgatttgatgtttaaaatgccaagaatagtatcttttaaaatatgtcttgttcatgagcagattatttccttaagaagtactaggtcaggcccggcatggtggctcacgcctgtaatcccagcactttgggaggccaaggtgggcagatcatgaggtcaggagattgggaccatcctggctaacacggtgaaaccccgtctctactaaaaatacaaaaaattagccgggcgtggtggcaggtgcctgtagtcccagctactcgggaggctgaggcaggagaatggcgtgaacccgggaggcggagcttgcagtgagccaagatcgtgccactgcgctctagcctgggcaacagagtgagactccgtctcaaaaaaaaaaaaaaagaagtactaggtccaaggctataaacttaaataaggcttttaatacatattgccagattattttccacattactaatttgtactctcttgagaatagtgagaggatgcatctaactttacccccttattagcattaagtattcctttttcatttttgttaatttgatagattaaatgatttttattttctgttagtgacattaaaattttaatgatcttattgccatttgattttccagtttgaggtattgactgttcatattcttacctaaattatctgttgagattatggtatttttcctttttctggatactttatctagagatattattaatttatcttgttaagctttttctagtttatttgctttaaaattttgtttattatgcatttgaagttttaaaaagtttatcatgcacagaaattttaaaaagtttaaaaattagatctatccatacatttccttattgattacattgtttttcagcagaagtcttttccactaataaatgtgtacatttattttaccttccttctctgtttcctcctgttctttttctttctcctcctccttaacttttaattctcttatttatctagaataaagtgaggaacagactggatcagacttcatctcccattcccacacttagctaactagttgttccattattatttattaaataatctttctttttctcccactgacttaagatgttacctttgtcagattaacttcttatacgtgtatgatttttgtattatatttttgcatcaatctagactacatttttcttacttagtttaatatccactaaaaaaaatgggattttttttatttaaaaaaaattccccagctaatctcatctattttttcttctctacgaacttcagaatcattttaaagttccaaaacaggaagagaaattcacagggagatttttattgaaattacttaaagcctgtgtaaattaacttataaagaattacagtttttacacatttcagtccttcccttcatataattttataaagatttataatttccttcacaatagctctctcacagctttcatagtttgtccttttgtatttctttagacttttctaactatttattgctgatctataagaagaaaactattgattaaaaaaaatttcacatctagctattcagttattgaatatgagagttttaccttgtcatcttgacttttgtagatgtagcattatctgcaaaagaaaatttttacttatgctgacaccatttaaaatgtttacttttatgttagaacaaaaataattatatactaaaaatattttctatattaaatatataatacatgttatataaaatatattttatatgtttatgaaattataatctttaaaaaaataattttaccttttattgcagccatttcttcctttgtctgatagtggtgttatatatgattctgatgaaagcattcatagtgatgaagaagatgatgcctttttttcagatacacaaatacaggagcaccaagatccaaattcctataggtaaataagacttttctttctctcattttttttttggcttttctttttgtagaaaatatcaatgttattaattttaaataacattattatcctgaatttatataagaaatgacttatgtttccaggttacaaattctacacctttgaggtcaatgtctacatagtgttttctccacctccaaagactagcttttatggagagtgcaaacacaagcatctttagtgaggaaaaaatatgtaactcatggatatactattagagtttaatatataaattattggtatactattaggtttcatgtgactatgtggttaatctttttccacgaggtaattttcagcaagtgtaatatagtattgcaagttttttgtattcagtgaccacagaggtgccatttttgcatagtaaatttcaatgacagctttttttctgggttggagagtgggctaaacagttggcagggaacaccactctgtttctcccatgattttatttttcacttaaagactctttttgcccctccttgaacagctgggctcttctacatttgacaatggttaaactagcacttcacaatgtcaagaatttctttcctattgctggactggaattctctggtgagtttggaatttaaaaattaatgttattaagtataataaattgccgtcaagtttctctttacaaaatctatatataaggtcatttggtacttaaaaaatagtgcattagatattttataaagtcttgtttattttaggctccaatctgtgactttatttttatttttttagatagagtctcgctctgttgcccagactgtagtgcagtggtgtgatcagagctcactgcaaactccgcctcgtaggctcaagccatcctcccacctcagtctcctgagtagctgggactatagatgtgctaccatgctgggctaatttttgtattttttgtaagagacaaagttacatcatgttacccaggctggtcttgaactcctgggctcaaacgatccacctgccttggcctcctaaagtgctgagattacaagtgtgagccaccacacctggcttcagtctaatactttagtttatatcaagaatcactctctacacagaagattgagaaagagcagaaacccacttctgttttgttgaaagcattaagaatctaaactgtattacattaacatttgcagatttatttgtattttcagaagtattatctctgagaattcagattctataaatatttgggtgatgatcgatattttttattaaaataaataacatattctgtcaccttgtagagctgcctgtaacatcaccattaggtattgctgtgattaaaaacttggagaactgggaacagatcttgcaagagaaaatggatcagtttgaaggtccaccccctaactatatcaacacatatccaactgacctttcagtgggagctggaccagctattcttcgaaataaagcaatgctagaacctgaaaataccccattcaagtaagaaagctcttataatgctgataaagagcgtagcttaacttttctggaagacagtttggctaaatatgccaatatactttaaaacattcataattttgaacctgcagtcctatttttagcagaatacgcttaagaaaaatatcagaaatttgaatagaatttttcccagtattatctgtaattcatagacattccatttacataaaggaaaaagtctttattgtattaatttccggtgtggtgttttttgtttgtttgtttgtttgagacaagagacaaggtctcactctgtcacccaggatggagagcagtggtgcaatctcagctcactgcagcctcaacctcctgggctcaacccatctttttcacctctgcctcctgagtagctggaacaacaggcgagcgccatcggctaattttttttgtattttttgtagagacagggtttcaccatgttgcccacactggtctcaaactcctaggctcaagcagtccctggtcttggcctcccaaagtgctgggattacaggcatgtgccactgcgtatggcatatttatgttcttattgtcagaactcttacagaatttttttctaacaatctatatatgcaaataaggtgcttctgacttttgtcagtaatttaacagtaaacacattacaggtttttaactgatgttttgatcttttacctgccaatctaggtcccttttgataagcagcatgcttttttttttgaggtagtggaccctgattaatagtttttactattaaaataagcttgaaagaacaaagctttttagcttgttaggctgttagaatcggtatctatgacttgtattcattgttgatatgctttaaccaagagaaccaatataaagtataatttaaaaagagaataataagagattcatttgactctcagcttaactggttcattcagtgtaattagagaattagttgctagatgaaatgatttttaggagaactaaaaattaaaagtaaactgtacagttttgttgagcttaatgctgtgtcttctttgcaatagattatgaaggttttaaaaataaatatctttgcaatagattgtgaaggttttaaaaataaatatctgcaaatataaacatattttctatagactaaagtagtgtgatatgttaattttttttaataggtcccgggattcttctgcatttccagtcaaacgactttggcatttccttgttaaacaagaggtccttcaagagacatttattagatatattttcactaagaaaagaaagcagagtgaggtattttgagaaaaatattttctattgtaatttttctttagttttctttaacatttctaaggaaatcagtgcttgatttattctgaaattttctttctggttgggtaatagtcaaagttcactaaactaccgtgaactacttttaagataaaaccttataattttcatttcatagcaatgaaacaacataggtactttgataaattacatatattcaagtgaaagttggtactttacagtatttgtcattaggtttttacacataataaacattgtgatggatggcttgaggaatttaatatataagcttactctataatattctccaaatatgtacttaaaatataaaatagccctttaaaagcattttctttacttagcacttagaaatgaacagaatgatgatttgaagcaacaaattcaggatacttttgtgagagaataaactacagaaatagcaaatacaagatgaaggaagattgctcttacaaagcaagacagaggttctgcattgcatggttatttttaagctaatacaattagtaatgtaatagcagacatggttcaagaagaattagcagtttgggagattggcaagtgacctcttccttataaaagtgggaccttttatatgagcatttcagtctgtttggctatttagtgaggtaattagtgagggaatgagcagtttgaagagtattcagagttgagcgtctgatgtaattaaagatttggcaaacatggccgggcacggtggctcacacctgtaatcccagcactttgggaggccgaggcgggcagatcacctgaagtcaggagttcatgaccagcctgaccaacatggagaaaccccatctctactaaaaatacaaaagattagccgggcgtggtggcgcatgtctgtaatcccagctgctcgggaggttgaggtaagagaattgcttgaacccgagaggcagaggttgcagtaagccaagattgtgccattgcactccagcctgggcaacaagagcgaaactctgtctcaaaaaaaataaagatttggcaaacacaatcaatgagaagagaagaaatgaattatatttcgcttagaaaagtgaaaacagagagagtccatacggctcaatttcccgagataaagtataaaattgcttctcagtttttcctcatgcccagggcagtggaacctaccatacttgttctttttcccactcacccacttacctgaatggtaattgtggtcagcccttatgaacagtcatttgttttctctatggatttaaaaattatatacttaaatgaggaagtagaagaatgaactgtagagaccttttgagtcctagttataagctttttcataacaaaagacccttatggcattgaaattattgatgtgactttgttagggaaatcagaggcaaattatttgcctctgtcatttaaaccactgtgtatagcatttcctatagtgatgctgagtccaaattccataaactaaaatataggaatctaagatagtgatttaaaataaaagattttagccaggcatagtggctcacacctgtaatcctagcactaggtgggggatctcctgagctcaggggtttgagaccagcttggcaacatggtgaaaccccgtctctacaaaagatacaaaacaattatccaggtgtgatggtgtatgcttgtaatcccagctacttgcagggctgaggcaggaggattgcttgagcccaggaggtggaggttgtagtgagctgagatcacacaccactgcactccatcctgggtaacaaagtgagaccctgtcttaatcaataagatttctggtcaattaggggctctgttattcacagaaaaccagttcattgagtgatcaattttctgagtgttttgttcttcaaattattaaaattaatgatttatcacaagtatgttttaagtattggtaaggttgatagcagcttgactggttgacttgtcagagtgtagagtgctgtgggaagccaggtgtctgggtttcttggaccctcccattctcgtcttgcccttccccacgagtttgcttcttccttaactaattctccccctctccgccccttagtctcccttccattatgcccctcagtctctgtgtgttctatttttcttccagcagtgggtccccatgaacagggaagtaggacagagataaacggaatgtttcttaaagtgctatataagcatcagttggctccaaggaagggaagtacatggctgggagttaggatggaagaatttttatcatgtacccttttaattttaaaacattgaatggaattactgtcttgtccagtactgtcccatagaactttctgtgatgatggaaatctgtatctgcatagtccaacatagtagtcaccagccacatgtggttactgagtacttgaaatgtggctagcatgattgagaaactgaattttaattttaattgatctaaatttaaatagttacatatggttagtgattgctgttttgaatagctcagatctgaaaaaaaaggtgttttattaagaaaaaaattatgaataaaacattaaggctgttaggacaaaataaaaactcgtcgttaggctcagaaatatgcaaaacttactaaaactctacccaatccagtaagagtgcttacatctttaaaattgtcaaataggattttggtaatcactaaatttggcaaattcagaaaattgaccaataaaattggcaggctaatcctaaaaatgctgggtgcatttaaaaaaaatccctgagaaatgctgaagttatatatttataagaataagatcttttattcactgaagatattacaggaaaatatttcacaaaacaagtttttgggaaacagattggtgaattcagctagttaagacaaatagattcttcagcagtttggccttcactgagttagctgtgccacacattgaccattccttggaagttttcttggatgcatctttatcagctgcagcagccataggggagtccctggaggcatgggcagaaaatttgaatggcccttcgtgatgaaaggaaggcagtcacctgaaaaggtatgaggaagagtttgtttctctgatcaaaccttcagagtttccacagcagagcagaaatataacttctgattgcagccatccttaggaccctgcatcaacccgggagcaaattactgagttatttctttttccgtgcctgattttattaaacatttatttacttagagaaaaatcatcatattccttataagagtgaaataattatcaatattttgaatctatgtttagaaataaatattttaatttgtattttaaatcaacccctatagggcaggaatttatgtagcatcttctgcatctgcttatacaaatgggctttaattttatagattaccagttatgtaacttagatttcttaaaactgtatacagataactaatttttattttgaaatagcttttatgttcttgtgtttatgtaatagtcacattaattttgctcttttggctttgtgttgtgtttatttgatgactgttttattcggtttaattttttcttgattttgcaaattcatttttatcatctttaagtggtggagtggccatttcagcttgaaatatttcactgtctttataatttcattccatgcatgtgttttgtgtttgtgacggtgtggtggtatttagtctatagaagaacatgtggagcaggtcaaccaaaactgcatagcagaagattgccacatcaaggtagtattccaagatcttgtatttagctcattctttaaagttcaaggagctaacgcctcatctctgatactaaccatgacctgcccaactggctaactactcagagaactcatagtactcccataccacttcagtggcacaggggaggagatgcttcactgtatctggcttgctctgtcttgcccttggttcttctctttcttgctccctgtcccatcttcacttgtcactttttctgttttaagcatggctgtttcatcttcttgattctgccttttctttccttcccatcaccaaccctaagccattgcatcttcctctcatcagtctcttttattcctttcgaagtatccctctttacaacttttccttatttctgtctcaccacccttacttcaaagggtggtttctttgcggttttctatggctttttactccactctgtgcctcttaatgtatacacattcttattgcagaatatttatgcacttttggaagagctaagagagacatactactgtataaattactaataaaaatatattagccatgttttataattaatcagtatcttaccatcacagtggaaattggggtgattacaggacatcagagaatttaagcaaattttccaaagctagttttcaacacattaaagttactcttacccttttttcttgctgctgctgctgctgctgctgctacattttcttcttatcctacatttaaatcttatgggatgtgcataactctaaatagagctgtgctgcagcaactaaaactgctgatgaatgttttctaggttgaagctgatctgggctatccaggtggaaaggcgaaagtcatccataaggaatctgatatgatcatggcattttctgttaataaggtaaaagctctcatcattatacacagtgtatttctccttagtgaaattgcttaaatcatcgattctgcctttgctttataggcaaattgtaatgaaattgttttggcttcaacacatgatgttcaagaacttgatgttacttctctactggcctgtcagtcatacatatggatcggagaagaatatgacagagaatccaaaaggtttgtctcatagtcacttttacatatagttttctgtaagaagtacccaccaaatggttatgcacatgatttgaattatttcaaaaggtatacgtgtatctccttcatttgggtaggtgacaaatataattggtttagctgccagtgaaagtctttgtctacattaactgaatgaattacacttccattaaaccctacactattgataatatttcaataaggataatccctaacacttggcttcatgatattcagtaaattaatctgatctggataattaaaacagtagacacaaatatgttaattacactgagtcacatttaccgagtaattttgcagtgtttcttcttatcacctgataagcataccttttcttaaacataaaaatgtagacggctttacttttcattgaagctatggacactgcaccaagagtgttttgccattcttacctattttgaggtttcttctttgtggtttgccttccctcctgcttttctccagactcttagaaattgttcatgcttgaggatggtgccatgatagtttctctcctcattttgttgaattcttttttttgttagtatgtgatataactaggatttaatatcacatttcagagtagatataaccatgtactatgatacaatccatcccaacaattactttcacattttatatgtcttactccaagaaatctttaaactcaaatttctttaaacgtgttaatttgatactgagctatctgtacttgaagagaacataatatttttccatagataacaacaaacttttgtttcaacttgtgcagcaataaagttgtccccaaacaacattagactaaatttacattttgccaaaagggaaaaaagttaaccagtattaacattggcgattaggacttgtacctaagtttttctcatggctacttagtttttaaaataaagattgtcctatgggtacataagaagatttttagttggaatttgtgttaagagaaaagggaatgttcacagtaacacatgaatgtttttcacagttcagatgatgttgattatcgtggttccactacaactctttatcaacccagtgcaacatcctattcagcaagtcaggtgcatccaccttcatctctgccatggctgggcactggacagactagcactggagctagtgtggtatgttatttacttataggtatcatttctggatttggactctgaaaaatcagttggaatctctttgacataggaatgatcctaaatttcagggacaaacaccagtagataggccatgataatgacagctgacatttattgtggcttttttatttggtgacagggtctggctctgtcgcgcaggctggagtgcagtggtgcaatttcggctcactgcagccttgacctcctgggctcaattgatccttccatctcaacctcccaagtagctgggactacaggtgcatgccagcgtgcctggctaatttttgtattttttgtagggatggggtttcaccacgctgcccaggctgttctcgaactcctgggctcaagtgatctacccgcttcagcctcccaaggtgctaggattacaggcatgagccaccacactggcctcatatgactttcttagtgtcagatacatgctttttctcacaacaatcctaggtggtaggtgctattattaccctccattatcattttacagatgaataaacagatacaaaatggtaaagcaaagttaaaggggaattcatgtctacttctaagtgcttgaaagcatgtcagtaacattcttgtcactgtagctggaggggtcccattcttatgttctgctctgaagcatctggaggtgctcctgaatatcctcagggaggggcacttgaagaagagttcctttattatgagatgaagctccttggtaacctcacaggccagggctataccagcaagtgactgtgcttcctcaccctcttcagacaagtgttctatgtagtggttcagaacatccataacaggctttatctcagtaataagcaaggtgtaagagaataaatgtcagaatttatcctgaagcatatccttcctcatcttttctgcatacacaaaataaaatttttaaaattttcttttaaagcttatgaaaaggaatctacataatgttaagagaatgacttcacacccagtccatcaatactgtaagtatttatgacctaataattgtaagtgtcctcatttggaggttgatttatagaatagaaaatattggaactctttaatttcttatttcctgctttttctcttgtgtttcagatcttacaggtgctcaggacggcagtgtacgaatgtttgaatggacgcggcctcagcaacttgtctgctttcgtcaagctggcaatgcaagagttactagattatattttaattcacaaggcaacaaggttagtttctgggggctactgctgaattcatctgaaaatagttgtggatatttaggagtaagtgataaaagtgcatcgaaaaatgaattcagtgaccctggatttaaactgagtagacagtttgttggagtctattcatacactctcttttcttccaatagaagcaaaaatctacaaaatttagtatggattaatcatctatttaaagatactaaatatactgtgagagtaaaaaaactgcctgtgttgagtgtgttggtgattcctgtaagcacagtaaagttcttgagagaaacctagtttcttactaaatttcatcagtaagaggttagaggaaaacagtgaaacaggtaagcagttaagaagtaatggaagggccagtcacagtggttcacacctgtaattacaacactttaggagcccaaggcaggaggattgcttgaactccagcatttgagacaacctgaacaacaaagggagaccacatccctacaaaaatttttttaaaaagcccaggcatgtgcctctagtcctagctactcagaaggttgaggctggaggatcccttgaacccaggagtttgaggttatagtaagttataattgcactactgcactccagcctgggtaacagaatgagaccctgtctctaaaaaaatttaaaaaaaaagtgacagggaattttttagcacttggactttttgggaatgacagcaacagaaacatagttagaggcagaatgtttatttagtagggccttagtgaatcttccttccatgtttttacctttgctgtggatgctaagaacatgtgtttagtagttatactgttcttacagtgtggtgttgcggatggagagggttttctgagtatctggcaagttaaccaaactgcatcaaatcctaaaccttatatggtaagtatcactaaatgttcccagggcgcatatacacaacactttgttcatgaagtgtctgtttcagacagtgaatctcattggtggtcctattgggaaaaggatgatttttttcagcaatcccagcctgacagcagcacccatccttaccctagttttagactgaaatgacctgaaaaacaaaaagccttgcttttcaccttgaagtacagtttatattttaaaaattttgggggctttccctgtgtgtggtacaacttgggttttttttcattattattatactttcatccattttgaaaactctatcttcttaatatacacatgataaaattctgtcattaagaatcaggttctgccgggcacggtggctcacgcctgtaatcccagcactttgggaggccgaggcgggcagatcacaaggtcaggagttcgagaccagcctgaccaacctggtgaaaccccctctctactaaaaatacaaaaattagccaggcatggtgacacgtgcatgaagtcccagctactcgggaggctgaggcaggagaatcgcttgaacccaggaggcggaggttgcagtgagctgagattgtgccactgcgctctagcttgggcaacagagtgagacttcgtctcagaaaaaaaaagaatcaggttccaaacatctgttccaatttgttccagaattgtgcttaccagattataaaataaccaatcccaatgagccaccttaatccaaattggattacaaaatagttggtgatgaagataagtagatctttacctgatggagatatggtgggggaaaggaacatgggggagggtggaaggtgatgctgtcctgtgtgaaacttcaggcttcacatatatggagggaggttcagaacgccttgaacctcctgggaccagatagattacccaaatactttttaaaatttttctaaactatacatatgttcttaattatgtgtataagataattctcttaaattaggacactatagactgtaccttgtctatgcagaaatggaagtaatcttgaatttatacttttgtcttcagtcagatctgtaccactataattccagacagaaaaacatgcattatattttaaaataccttgacatcctaagactagttgggtctgtaagcatttcctttgtgactgttaaagtttattacatgtatttgagatcattagcactaaaattgacgggtcttaggtaggttcatgtactttgatgtcctattcttacataatctgaaaaacatgacctttaattctgtttttaccaactccagttattaaaaattattggacagtagccaaataatatacacatgacagttaagcctcatactatcacttattcttttatcctagaccgagtttttaaaaactatttttagctcatgcatatagtatgttattagcagacatgtatgttggtactgtatcaaattttatccaatggtaaaataacatcagttgcactttgtttttcgtagagttggcagtgccacagtaaagccacaagtgactttgcatttattacctcttcaagtctagttgccacatctggacactccaatgacaataggtaggttgacagaaaagcaaagtaagaaatataaaaacgttagaaatccatacctttagcaagaatacttttctattagtagggtttttccactctaggcattaaaaaaaaaaactttgttacataattcttatttcagagtgttttttcttaccaaaaagagaaaagcaaaaatgaaagttattcctaatatatgtaatttttattttaaagctattcagtcttttttaaactactactgttaacactgttagtttctctaggactaacaggcatctgatattgtctccatcattctcaacatttttattttattgcagtaggtttgggggaataggtagtgtttggttacatggataagttctttagtggtgattgctgagattttggtgcacccatcacctgagcagtgtacactgtacccagtgtgtagtcttttattcttcaccctcctcccacccctcccaagcccccagagtccattatatatcattctgatcctttgcatcctcatagcttagctcccacttacaagtgagaacatacgacatatgattttctactcctgagttacttcacttagaataatggcctctaactccatctgggttgctgcaaaatgtgattatctcattcctttttatgaagtattccatggtgtatatgtaccacattttctttatccatttgttggttgatggacatttaggttggttccatagttttgcaattgtgaattgtgctgctctaaacaggcatgtgcaagtgtctttttcatataatgacttcttttcctctgggtagatacccagtagtgggattgctggattgaatggtagttctgcttatagttctttaaggaatctccgtatactgtttttcatggtggttttactagtttacattcccaccagcagtgaggtgtccccttttcaccacctccatgccagcgtctattgttttttggttttttaattatggccattcttgcaggaataaggtggtatcgtattggagttttaatttgcattttcctggtaattagtggttttgagcattttttcctgtttgttggccatttgtattttgagaattatctgttcatgtcctttgctcgcttttgatgggattgttttttcttgttaagttccttgtagattctagatataagtcccttgtcagatatatacattgtattttctcccactctgcaggttgcctttttactcttgctgtgcagaagtgttttagtttaattaggtcccatttatttatttttgttgcatttgcctttgggttcttggtcatgaattctttaagtcaatgtctagagtagttttttttgatgttatcttctagaatttttatggtttcaagtgttagatttaagtttgacccatcttgagttaatttttgtataaggtgagagatgaggattcagggactaacaggtatttgacactgtccccatcattctcaacatttattttgacctcacatggttttcattagcaacacatgcccatgaataacatcttgtttccctgcagtggctaccacctggggatataaaagcattccttatactcaggaagtcatatcagtttcctggagtggcaatggaaaggagatggggtagaggatgcagagacgggcaggaccatgtgagatggaactgtgtagtttgaccctacccccatcctagttgggaatcactactctctataggtgtgagtgaacaaaaaagataagaatgaataagcaaaatatttgactgaaagacaggttgtccctgatgacgacttataacaatcatttatgatgtatttttgttattgtgtttctttaaaagaaatgtttgcctctgggacacattaatatcacccggaaacagcctcattcatggtgagttaaggtctatgatttttaaaaatataccatgaaggaataatacaccatgaaggaatgctttcttggttttaattagtgaatccagtgagtgtttattgacaggttgaaaatggagaaatatttagaatgaatgactaaaaatttggaaagttaattagcatatctggcttccttgctgagttaaagatatatggtctcagaaatccaaaatagtctttatattctattcagaaaatatggtatggatagtggtactactaacaaggctatttaagaaattagttgcaaagtattcattgagcttaatagaaaataacatattttaaagaattaaacctcatcataaaatactttttgtctttttttcctttttgtggagatcaaggtcatgctgtattgctcaggcaggtctcaagctcctagggtcaagctatcctcccacctctacctccctaagtactgggattacaagcatgagccaccacacctggccctaaccataaaataaaacaaaggttaaccttattataatgactagaaatgtaaacagtgccatttaaatattattccttttaagacaatacttgccaaattagtgtcctaactctgtcttccacatagtaccacccaaaaagtgctccatgctcaagtaagtttggttaaatgaagtagattgtcagaaagacagaaagattctcagtcttttaatacactgatatgcattttgaaatatgtagttaattctcaattttattgcagaattctgcaaacagtggttaacattgcttacagattttctgcatgttaatttgaatctttaatcatattaaaatgcaaatactcctgggaaggataatgaacttcttaacttgtaactgaaaacattcacacattttctcatagtgtcgttgtttcaattacttacctgaaaagaactttttgtacggtacagcacttggctgggttaatactcaccaactttgagaaggttggtctctgctcttctgtatactttttatgaggcagtatcacttagggcttaaggtttaaactttctttttctctctgtgttcatttcatattgagattatggataaaaagtttgttctgacattgcttaacatttttctttaatcatgtgattacagaaattcaatgacttacaaaacaataaatgtaccttagaatgaaaaatgcatcagtaaggtctgtatttaaatgtggatgtagacatcataattaccaagacaagaaattgttttgagaaattctctgatgtttttcttcttcaggtttcacgtgccacgatcatggtgccacggtactgcagtatgcacccaaacagcaactcctaatctcggggggtaggaaaggacacgtctgcatttttgacatcaggcaaaggcagctcattcacacgttccaggcccatgactcagctattaaggctctggccttggatccctatgaggaatattttaccacaggttcagcagaaggtaacataaaggtgagtcagtacaagaggttggaatgtgctaaagactgattggaaagagaaaaaacaaaaactccacattctttgaaataaagcttcactttatttcacttgggctactgcatggagatactgcatatctcaacactctgccgcctccccatgctcctgtatggttctttctaaactgttatggtcaatgagattatcaaactcattggactcaggccattagaaagctttaaagcattctattttgagtaaagtgtatgagtttaatgcatgaaattttttgatgacattagtttggctccttagaagcttctcccctctccctcagtactcttgtgtgtggtggaggtgacgtttccagtaagtgagctagtgcagatgctccttgactttatggtgggattatgtcccaacaaacccattataagttaaaaatattgttaaagttgaaaaacatactttcaacttaatattttcaacttactatgagtttattgagactaacctcaggataagccaaggagcgtgctgaatgcgtattgctttcacactgtcataaagtcaaaaagtcttgtcaaaccatcgtaagtaggggactgtctgtaccacactacttttacatagccttaggacctagctcagcatgaggaacacatttaactgaattaactcaaatagttaattgaattagagatgggctacatatggttaatatgaagccacaagaggatgtgaaggaaaatatggaaggaggacagtaaatgaatcgtgggagtggtgttatcatttcccacttagataagctcttaggaaagaggcagtgggtgggaaggttgggctttagtgagatcacttgggccaagggagcagaagggccatgtttttgcttttggtcttttcgtaatatatttttaactccttttgttttgcactaggtttggagattgacaggccatggcctaattcattcatttaaaagtgaacatgctaagcagtccatatttcgaaacattggggctggagtcatgcagattgacatcatccagggcaatcggctcttctcctgtggtgcagatggcacgctgaaaaccagggttttgcccaatgcttttaacatccctaacagaattcttgacattctataaagattggggttttatttttatatacatttcagttaaaaggcacactacagtcatcactaggcaattctgctttctaagcagttgtattgaaaacagagaatctctgtgtagaatttgaatatgacccaagctgagtattatctaaacaggttggtggaatgaatgcgcatgtaccttattatgctgacatactaaaaaaaataaaacctagtattgtatgaaggatagctattctttacagcatttagcaaacctgattcagaaaacatttgagattagcaaattagtaacttgaaataatgaaaaggacgtttataccaaattaaggaagaaaatgttgctgatttgggtttttcttcctgttcttaccactgactgaagcatgcctgcagtctcctcctctgttgaatgaaggataatcataaggtgtttgttaggagcgctagaccacctggaaaactttcttagctgtggagcagtgcgcagtgaccagttctctgctgtgagaggccgtttccattctttcctgctgaatatttttcctgttagtgtttatactgagctagtactgtaacttgcaaatgagtgcaaatttaaatgcaatgttttactcacaatttgcacattcacattttttggactgctagtttttctatttaaatatttgccttcatgttaggaatgtactatgtgaacatgacatatttgtagttaaccaaacacaccttcttagtccagtttagtactttttcttttcgtgtattcaaggttaaacacccaaacatttaaggatatgttgaaactacaccaatagagcatttcatatcataattaaaatgaatgttaggcttcttgtggccagttaatagttgatgagattggtgacattatttattgccacagcctattgtataaactatgcagagttaaatatttgcttgtaaaatattagccaatgttgtcattattttgatgtatttccttggttatgaccaaaaatatgttgagatactgaaactaatgtctgtgtgtttaaatgtttaccagcaaattgtcttatcatgttaatgagaatgttcaatgcctgtgtggtaaatagtaaatacaatggcataaaagtaactttctctgaagatgtgatgttcaggctgtgaaatatatatgtaaaagaaaaataaatgttatttgttagagtttttagtttgatactgtttttgaccattgagatttttaatttgataaaatgtttaactgttagagaatttgcaagctatttggcagtctattcattcataagtaagtatttactgaataccttctataccaaaagccattctaggaaatgggatacagtggagagccagacagagaaagcacacaatgttgagatttagcggggcaagagctaacctcactataccttctccagacagatttgaagtttattgaatgaagtactaacctcgtacccaaaactcaaatctgagtcttggctatttgcttgctcctaagtaagtaagggaagtcagaatatgcccactgataagaagagccaggaaaataagcttgtgagtgacatctcaatgcctaaagcaaaactgattcaaaggagctttcagaaaaaagggaagagaactttctctgtcaggtaaaagcagtaagagactctagattcaccttctagcttgaaacaactaaaa

SEQ ID NO: 547 - DNA, 17595 bp, Homo sapiens
gagctgcctgtaacatcaccattaggtattgctgtgattaaaaacttggagaactgggaacagatcttgcaagagaaaatggatcagtttgaaggtccaccccctaactatatcaacacatatccaactgacctttcagtgggagctggaccagctattcttcgaaataaagcaatgctagaacctgaaaataccccattcaagtaagaaagctcttataatgctgataaagagcgtagcttaacttttctggaagacagtttggctaaatatgccaatatactttaaaacattcataattttgaacctgcagtcctatttttagcagaatacgcttaagaaaaatatcagaaatttgaatagaatttttcccagtattatctgtaattcatagacattccatttacataaaggaaaaagtctttattgtattaatttccggtgtggtgttttttgtttgtttgtttgtttgagacaagagacaaggtctcactctgtcacccaggatggagagcagtggtgcaatctcagctcactgcagcctcaacctcctgggctcaacccatctttttcacctctgcctcctgagtagctggaacaacaggcgagcgccatcggctaattttttttgtattttttgtagagacagggtttcaccatgttgcccacactggtctcaaactcctaggctcaagcagtccctggtcttggcctcccaaagtgctgggattacaggcatgtgccactgcgtatggcatatttatgttcttattgtcagaactcttacagaatttttttctaacaatctatatatgcaaataaggtgcttctgacttttgtcagtaatttaacagtaaacacattacaggtttttaactgatgttttgatcttttacctgccaatctaggtcccttttgataagcagcatgcttttttttttgaggtagtggaccctgattaatagtttttactattaaaataagcttgaaagaacaaagctttttagcttgttaggctgttagaatcggtatctatgacttgtattcattgttgatatgctttaaccaagagaaccaatataaagtataatttaaaaagagaataataagagattcatttgactctcagcttaactggttcattcagtgtaattagagaattagttgctagatgaaatgatttttaggagaactaaaaattaaaagtaaactgtacagttttgttgagcttaatgctgtgtcttctttgcaatagattatgaaggttttaaaaataaatatctttgcaatagattgtgaaggttttaaaaataaatatctgcaaatataaacatattttctatagactaaagtagtgtgatatgttaattttttttaataggtcccgggattcttctgcatttccagtcaaacgactttggcatttccttgttaaacaagaggtccttcaagagacatttattagatatattttcactaagaaaagaaagcagagtgaggtattttgagaaaaatattttctattgtaatttttctttagttttctttaacatttctaaggaaatcagtgcttgatttattctgaaattttctttctggttgggtaatagtcaaagttcactaaactaccgtgaactacttttaagataaaaccttataattttcatttcatagcaatgaaacaacataggtactttgataaattacatatattcaagtgaaagttggtactttacagtatttgtcattaggtttttacacataataaacattgtgatggatggcttgaggaatttaatatataagcttactctataatattctccaaatatgtacttaaaatataaaatagccctttaaaagcattttctttacttagcacttagaaatgaacagaatgatgatttgaagcaacaaattcaggatacttttgtgagagaataaactacagaaatagcaaatacaagatgaaggaagattgctcttacaaagcaagacagaggttctgcattgcatggttatttttaagctaatacaattagtaatgtaatagcagacatggttcaagaagaattagcagtttgggagattggcaagtgacctcttccttataaaagtgggaccttttatatgagcatttcagtctgtttggctatttagtgaggtaattagtgagggaatgagcagtttgaagagtattcagagttgagcgtctgatgtaattaaagatttggcaaacatggccgggcacggtggctcacacctgtaatcccagcactttgggaggccgaggcgggcagatcacctgaagtcaggagttcatgaccagcctgaccaacatggagaaaccccatctctactaaaaatacaaaagattagccgggcgtggtggcgcatgtctgtaatcccagctgctcgggaggttgaggtaagagaattgcttgaacccgagaggcagaggttgcagtaagccaagattgtgccattgcactccagcctgggcaacaagagcgaaactctgtctcaaaaaaaataaagatttggcaaacacaatcaatgagaagagaagaaatgaattatatttcgcttagaaaagtgaaaacagagagagtccatacggctcaatttcccgagataaagtataaaattgcttctcagtttttcctcatgcccagggcagtggaacctaccatacttgttctttttcccactcacccacttacctgaatggtaattgtggtcagcccttatgaacagtcatttgttttctctatggatttaaaaattatatacttaaatgaggaagtagaagaatgaactgtagagaccttttgagtcctagttataagctttttcataacaaaagacccttatggcattgaaattattgatgtgactttgttagggaaatcagaggcaaattatttgcctctgtcatttaaaccactgtgtatagcatttcctatagtgatgctgagtccaaattccataaactaaaatataggaatctaagatagtgatttaaaataaaagattttagccaggcatagtggctcacacctgtaatcctagcactaggtgggggatctcctgagctcaggggtttgagaccagcttggcaacatggtgaaaccccgtctctacaaaagatacaaaacaattatccaggtgtgatggtgtatgcttgtaatcccagctacttgcagggctgaggcaggaggattgcttgagcccaggaggtggaggttgtagtgagctgagatcacacaccactgcactccatcctgggtaacaaagtgagaccctgtcttaatcaataagatttctggtcaattaggggctctgttattcacagaaaaccagttcattgagtgatcaattttctgagtgttttgttcttcaaattattaaaattaatgatttatcacaagtatgttttaagtattggtaaggttgatagcagcttgactggttgacttgtcagagtgtagagtgctgtgggaagccaggtgtctgggtttcttggaccctcccattctcgtcttgcccttccccacgagtttgcttcttccttaactaattctccccctctccgccccttagtctcccttccattatgcccctcagtctctgtgtgttctatttttcttccagcagtgggtccccatgaacagggaagtaggacagagataaacggaatgtttcttaaagtgctatataagcatcagttggctccaaggaagggaagtacatggctgggagttaggatggaagaatttttatcatgtacccttttaattttaaaacattgaatggaattactgtcttgtccagtactgtcccatagaactttctgtgatgatggaaatctgtatctgcatagtccaacatagtagtcaccagccacatgtggttactgagtacttgaaatgtggctagcatgattgagaaactgaattttaattttaattgatctaaatttaaatagttacatatggttagtgattgctgttttgaatagctcagatctgaaaaaaaaggtgttttattaagaaaaaaattatgaataaaacattaaggctgttaggacaaaataaaaactcgtcgttaggctcagaaatatgcaaaacttactaaaactctacccaatccagtaagagtgcttacatctttaaaattgtcaaataggattttggtaatcactaaatttggcaaattcagaaaattgaccaataaaattggcaggctaatcctaaaaatgctgggtgcatttaaaaaaaatccctgagaaatgctgaagttatatatttataagaataagatcttttattcactgaagatattacaggaaaatatttcacaaaacaagtttttgggaaacagattggtgaattcagctagttaagacaaatagattcttcagcagtttggccttcactgagttagctgtgccacacattgaccattccttggaagttttcttggatgcatctttatcagctgcagcagccataggggagtccctggaggcatgggcagaaaatttgaatggcccttcgtgatgaaaggaaggcagtcacctgaaaaggtatgaggaagagtttgtttctctgatcaaaccttcagagtttccacagcagagcagaaatataacttctgattgcagccatccttaggaccctgcatcaacccgggagcaaattactgagttatttctttttccgtgcctgattttattaaacatttatttacttagagaaaaatcatcatattccttataagagtgaaataattatcaatattttgaatctatgtttagaaataaatattttaatttgtattttaaatcaacccctatagggcaggaatttatgtagcatcttctgcatctgcttatacaaatgggctttaattttatagattaccagttatgtaacttagatttcttaaaactgtatacagataactaatttttattttgaaatagcttttatgttcttgtgtttatgtaatagtcacattaattttgctcttttggctttgtgttgtgtttatttgatgactgttttattcggtttaattttttcttgattttgcaaattcatttttatcatctttaagtggtggagtggccatttcagcttgaaatatttcactgtctttataatttcattccatgcatgtgttttgtgtttgtgacggtgtggtggtatttagtctatagaagaacatgtggagcaggtcaaccaaaactgcatagcagaagattgccacatcaaggtagtattccaagatcttgtatttagctcattctttaaagttcaaggagctaacgcctcatctctgatactaaccatgacctgcccaactggctaactactcagagaactcatagtactcccataccacttcagtggcacaggggaggagatgcttcactgtatctggcttgctctgtcttgcccttggttcttctctttcttgctccctgtcccatcttcacttgtcactttttctgttttaagcatggctgtttcatcttcttgattctgccttttctttccttcccatcaccaaccctaagccattgcatcttcctctcatcagtctcttttattcctttcgaagtatccctctttacaacttttccttatttctgtctcaccacccttacttcaaagggtggtttctttgcggttttctatggctttttactccactctgtgcctcttaatgtatacacattcttattgcagaatatttatgcacttttggaagagctaagagagacatactactgtataaattactaataaaaatatattagccatgttttataattaatcagtatcttaccatcacagtggaaattggggtgattacaggacatcagagaatttaagcaaattttccaaagctagttttcaacacattaaagttactcttacccttttttcttgctgctgctgctgctgctgctgctacattttcttcttatcctacatttaaatcttatgggatgtgcataactctaaatagagctgtgctgcagcaactaaaactgctgatgaatgttttctaggttgaagctgatctgggctatccaggtggaaaggcgaaagtcatccataaggaatctgatatgatcatggcattttctgttaataaggtaaaagctctcatcattatacacagtgtatttctccttagtgaaattgcttaaatcatcgattctgcctttgctttataggcaaattgtaatgaaattgttttggcttcaacacatgatgttcaagaacttgatgttacttctctactggcctgtcagtcatacatatggatcggagaagaatatgacagagaatccaaaaggtttgtctcatagtcacttttacatatagttttctgtaagaagtacccaccaaatggttatgcacatgatttgaattatttcaaaaggtatacgtgtatctccttcatttgggtaggtgacaaatataattggtttagctgccagtgaaagtctttgtctacattaactgaatgaattacacttccattaaaccctacactattgataatatttcaataagggataatccctaacacttggcttcatgatattcagtaaattaatctgatctggataattaaacagtagacacaaatatgttaattacactgagtcacatttaccgagtaattttgcagtgtttcttcttatcacctgataagcataccttttcttaaacataaaaatgtagacggctttacttttcattgaagctatggacactgcaccaagagtgttttgccattcttacctattttgaggtttcttctttgtggtttgccttccctcctgcttttctccagactcttagaaattgttcatgcttgaggatggtgccatgatagtttctctcctcattttgttgaattcttttttttgttagtatgtgatataactaggatttaatatcacatttcagagtagatataaccatgtactatgatacaatccatcccaacaattactttcacattttatatgtcttactccaagaaatctttaaactcaaatttctttaaacgtgttaatttgatactgagctatctgtacttgaagagaacataatatttttccatagataacaacaaacttttgtttcaacttgtgcagcaataaagttgtccccaaacaacattagactaaatttacattttgccaaaagggaaaaaagttaaccagtattaacattggcgattaggacttgtacctaagtttttctcatggctacttagtttttaaaataaagattgtcctatgggtacataagaagatttttagttggaatttgtgttaagagaaaagggaatgttcacagtaacacatgaatgtttttcacagttcagatgatgttgattatcgtggttccactacaactctttatcaacccagtgcaacatcctattcagcaagtcaggtgcatccaccttcatctctgccatggctgggcactggacagactagcactggagctagtgtggtatgttatttacttataggtatcatttctggatttggactctgaaaaatcagttggaatctctttgacataggaatgatcctaaatttcagggacaaacaccagtagataggccatgataatgacagctgacatttattgtggcttttttatttggtgacagggtctggctctgtcgcgcaggctggagtgcagtggtgcaatttcggctcactgcagccttgacctcctgggctcaattgatccttccatctcaacctcccaagtagctgggactacaggtgcatgccagcgtgcctggctaatttttgtattttttgtagggatggggtttcaccacgctgcccaggctgttctcgaactcctgggctcaagtgatctacccgcttcagcctcccaaggtgctaggattacaggcatgagccaccacactggcctcatatgactttcttagtgtcagatacatgctttttctcacaacaatcctaggtggtaggtgctattattaccctccattatcattttacagatgaataaacagatacaaaatggtaaagcaaagttaaaggggaattcatgtctacttctaagtgcttgaaagcatgtcagtaacattcttgtcactgtagctggaggggtcccattcttatgttctgctctgaagcatctggaggtgctcctgaatatcctcagggaggggcacttgaagaagagttcctttattatgagatgaagctccttggtaacctcacaggccagggctataccagcaagtgactgtgcttcctcaccctcttcagacaagtgttctatgtagtggttcagaacatccataacaggctttatctcagtaataagcaaggtgtaagagaataaatgtcagaatttatcctgaagcatatccttcctcatcttttctgcatacacaaaataaaatttttaaaattttcttttaaagcttatgaaaaggaatctacataatgttaagagaatgacttcacacccagtccatcaatactgtaagtatttatgacctaataattgtaagtgtcctcatttggaggttgatttatagaatagaaaatattggaactctttaatttcttatttcctgctttttctcttgtgtttcagatcttacaggtgctcaggacggcagtgtacgaatgtttgaatggacgcggcctcagcaacttgtctgctttcgtcaagctggcaatgcaagagttactagattatattttaattcacaaggcaacaaggttagtttctgggggctactgctgaattcatctgaaaatagttgtggatatttaggagtaagtgataaaagtgcatcgaaaaatgaattcagtgaccctggatttaaactgagtagacagtttgttggagtctattcatacactctcttttcttccaatagaagcaaaaatctacaaaatttagtatggattaatcatctatttaaagatactaaatatactgtgagagtaaaaaaactgcctgtgttgagtgtgttggtgattcctgtaagcacagtaaagttcttgagagaaacctagtttcttactaaatttcatcagtaagaggttagaggaaaacagtgaaacaggtaagcagttaagaagtaatggaagggccagtcacagtggttcacacctgtaattacaacactttaggagcccaaggcaggaggattgcttgaactccagcatttgagacaacctgaacaacaaagggagaccacatccctacaaaaatttttttaaaaagcccaggcatgtgcctctagtcctagctactcagaaggttgaggctggaggatcccttgaacccaggagtttgaggttatagtaagttataattgcactactgcactccagcctgggtaacagaatgagaccctgtctctaaaaaaatttaaaaaaaaagtgacagggaattttttagcacttggactttttgggaatgacagcaacagaaacatagttagaggcagaatgtttatttagtagggccttagtgaatcttccttccatgtttttacctttgctgtggatgctaagaacatgtgtttagtagttatactgttcttacagtgtggtgttgcggatggagagggttttctgagtatctggcaagttaaccaaactgcatcaaatcctaaaccttatatggtaagtatcactaaatgttcccagggcgcatatacacaacactttgttcatgaagtgtctgtttcagacagtgaatctcattggtggtcctattgggaaaaggatgatttttttcagcaatcccagcctgacagcagcacccatccttaccctagttttagactgaaatgacctgaaaaacaaaaagccttgcttttcaccttgaagtacagtttatattttaaaaattttgggggctttccctgtgtgtggtacaacttgggttttttttcattattattatactttcatccattttgaaaactctatcttcttaatatacacatgataaaattctgtcattaagaatcaggttctgccgggcacggtggctcacgcctgtaatcccagcactttgggaggccgaggcgggcagatcacaaggtcaggagttcgagaccagcctgaccaacctggtgaaaccccctctctactaaaaatacaaaaattagccaggcatggtgacacgtgcatgaagtcccagctactcgggaggctgaggcaggagaatcgcttgaacccaggaggcggaggttgcagtgagctgagattgtgccactgcgctctagcttgggcaacagagtgagacttcgtctcagaaaaaaaaagaatcaggttccaaacatctgttccaatttgttccagaattgtgcttaccagattataaaataaccaatcccaatgagccaccttaatccaaattggattacaaaatagttggtgatgaagataagtagatctttacctgatggagatatggtgggggaaaggaacatgggggagggtggaaggtgatgctgtcctgtgtgaaacttcaggcttcacatatatggagggaggttcagaacgccttgaacctcctgggaccagatagattacccaaatactttttaaaatttttctaaactatacatatgttcttaattatgtgtataagataattctcttaaattaggacactatagactgtaccttgtctatgcagaaatggaagtaatcttgaatttatacttttgtcttcagtcagatctgtaccactataattccagacagaaaaacatgcattatattttaaaataccttgacatcctaagactagttgggtctgtaagcatttcctttgtgactgttaaagtttattacatgtatttgagatcattagcactaaaattgacgggtcttaggtaggttcatgtactttgatgtcctattcttacataatctgaaaaacatgacctttaattctgtttttaccaactccagttattaaaaattattggacagtagccaaataatatacacatgacagttaagcctcatactatcacttattcttttatcctagaccgagtttttaaaaactatttttagctcatgcatatagtatgttattagcagacatgtatgttggtactgtatcaaattttatccaatggtaaaataacatcagttgcactttgtttttcgtagagttggcagtgccacagtaaagccacaagtgactttgcatttattacctcttcaagtctagttgccacatctggacactccaatgacaataggtaggttgacagaaaagcaaagtaagaaatataaaaacgttagaaatccatacctttagcaagaatacttttctattagtagggtttttccactctaggcattaaaaaaaaaaactttgttacataattcttatttcagagtgttttttcttaccaaaaagagaaaagcaaaaatgaaagttattcctaatatatgtaatttttattttaaagctattcagtcttttttaaactactactgttaacactgttagtttctctaggactaacaggcatctgatattgtctccatcattctcaacatttttattttattgcagtaggtttgggggaataggtagtgtttggttacatggataagttctttagtggtgattgctgagattttggtgcacccatcacctgagcagtgtacactgtacccagtgtgtagtcttttattcttcaccctcctcccacccctcccaagcccccagagtccattatatatcattctgatcctttgcatcctcatagcttagctcccacttacaagtgagaacatacgacatatgattttctactcctgagttacttcacttagaataatggcctctaactccatctgggttgctgcaaaatgtgattatctcattcctttttatgaagtattccatggtgtatatgtaccacattttctttatccatttgttggttgatggacatttaggttggttccatagttttgcaattgtgaattgtgctgctctaaacaggcatgtgcaagtgtctttttcatataatgacttcttttcctctgggtagatacccagtagtgggattgctggattgaatggtagttctgcttatagttctttaaggaatctccgtatactgtttttcatggtggttttactagtttacattcccaccatcagtgaggtgtccccttttcaccacctccatgccagcgtctattgttttttggttttttaattatggccattcttgcaggaataaggtggtatcgtattggagttttaatttgcattttcctggtaattagtggttttgagcattttttcctgtttgttggccatttgtattttgagaattatctgttcatgtcctttgctcgcttttgatgggattgttttttcttgttaagttccttgtagattctagatataagtcccttgtcagatatatacattgtattttctcccactctgcaggttgcctttttactcttgctgtgcagaagtgttttagtttaattaggtcccatttatttatttttgttgcatttgcctttgggttcttggtcatgaattctttaagtcaatgtctagagtagttttttttgatgttatcttctagaatttttatggtttcaagtgttagatttaagtttgacccatcttgagttaatttttgtataaggtgagagatgaggattcagggactaacaggtatttgacactgtccccatcattctcaacatttattttgacctcacatggttttcattagcaacacatgcccatgaataacatcttgtttccctgcagtggctaccacctggggatataaaagcattccttatactcaggaagtcatatcagtttcctggagtggcaatggaaaggagatggggtagaggatgcagagacgggcaggaccatgtgagatggaactgtgtagtttgaccctacccccatcctagttgggaatcactactctctataggtgtgagtgaacaaaaaagataagaatgaataagcaaaatatttgactgaaagacaggttgtccctgatgacgacttataacaatcatttatgatgtatttttgttattgagtttctttaaaagaaatgtttgcctctgggacacattaatatcacccggaaacagcctcattcatggtgagttaaggtctatgatttttaaaaatataccatgaaggaataatacaccatgaaggaatgctttcttggttttaattagtgaatccagtgagtgtttattgacaggttgaaaatggagaaatatttagaatgaatgactaaaaatttggaaagttaattagcatatctggcttccttgctgcagttaaagattatggtctcagaaatccaaaatagtctttatattctattcagaaaatatggtatggatagtggtactactaacaaggctatttaagaaattagttgcaaagtattcattgagcttaatagaaaataacatattttaaagaattaaacctcatcataaaatactttttgtctttttttcctttttgtggagatcaaggtcatgctgtattgctcaggcaggtctcaagctcctagggtcaagctatcctcccacctctacctccctaagtactgggattacaagcatgagccaccacacctggccctaaccataaaataaaacaaaggttaaccttattataatgactagaaatgtaaacagtgccatttaaatattattccttttaagacaatacttgccaaattagtgtcctaactctgtcttccacatagtaccacccaaaaagtgctccatgctcaagtaagtttggttaaatgaagtagattgtcagaaagacagaaagattctcagtcttttaatacactgatatgcattttgaaatatgtagttaattctcaattttattgcagaattctgcaaacagtggttaacattgcttacagattttctgcatgttaatttgaatctttaatcatattaaaatgcaaatactcctgggaaggataatgaacttcttaacttgtaactgaaaacattcacacattttctcatagtgtcgttgtttcaattacttacctgaaaagaactttttgtacggtacagcacttggctgggttaatactcaccaactttgagaaggttggtctctgctcttctgtatactttttatgaggcagtatcacttagggcttaaggtttaaactttctttttctctctgtgttcatttcatattgagattatggataaaaagtttgttctgacattgcttaacatttttctttaatcatgtgattacagaaattcaatgacttacaaaacaataaatgtaccttagaatgaaaaatgcatcagtaaggtctgtatttaaatgtggatgtagacatcataattaccaagacaagaaattgttttgagaaattctctgatgtttttcttcttcaggtttcacgtgccacgatcatggtgccacggtactgcagtatgcacccaaacagcaactcctaatctcggggggtaggaaaggacacgtctgcatttttgacatcaggcaaaggcagctcattcacacgttccaggcccatgactcagctaattaaggctctggccttggatccctatgaggaatattttaccacaggttcagcagaaggtaacataaaggtgagtcagtacaagaggttggaatgtgctaaagactgattggaaagagaaaaaacaaaaactccacattctttgaaataaagcttcactttatttcacttgggctactgcatggagatactgcatatctcaacactctgccgcctccccatgctcctgtatggttctttctaaactgttatggtcaatgagattatcaaactcattggactcaggccattagaaagctttaaagcattctattttgagtaaagtgtatgagtttaatgcatgaaattttttgatgacattagtttggctccttagaagcttctcccctctccctcagtactcttgtgtgtggtggaggtgacgtttccagtaagtgagctagtgcagatgctccttgactttatggtgggattatgtcccaacaaacccattataagttaaaaatattgttaaagttgaaaaacatactttcaacttaatattttcaacttactatgagtttattgagactaacctcaggataagccaaggagcgtgctgaatgcgtattgctttcacactgtcataaagtcaaaaagtcttgtcaaaccatcgtaagtaggggactgtctgtaccacactacttttacatagccttaggacctagctcagcatgaggaacacatttaactgaattaactcaaatagttaattgaattagagatgggctacatatggttaatatgaagccacaagaggatgtgaaggaaaatatggaaggaggacagtaaatgaatcgtgggagtggtgttatcatttcccacttagataagctcttaggaaagaggcagtgggtgggaaggttgggctttagtgagatcacttgggccaagggagcagaagggccatgtttttgcttttggtcttttcgtaatatatttttaactccttttgttttgcactaggtttggagattgacaggccatggcctaattcattcatttaaaagtgaacatgctaagcagtccatatttcgaaacattggggctggagtcatgcagattgacatcatccagggcaatcggctcttctcctgtggtgcagatggcacgctgaaaaccagggttttgcccaatgcttttaacatccctaacagaattcttgacattctataaagattggggttttatttttatatacatttcagttaaaaggcacactacagtcatcactaggcaattctgctttctaagcagttgtattgaaaacagagaatctctgtgtagaatttgaatatgacccaagctgagtattatctaaacaggttggtggaatgaatgcgcatgtaccttattatgctgacatactaaaaaaaataaaacctagtattgtatgaaggatagctattctttacagcatttagcaaacctgattcagaaaacatttgagattagcaaattagtaacttgaaataatgaaaaggacgtttataccaaattaaggaagaaaatgttgctgatttgggtttttcttcctgttcttaccactgactgaagcatgcctgcagtctcctcctctgttgaatgaaggataatcataaggtgtttgttaggagcgctagaccacctggaaaactttcttagctgtggagcagtgcgcagtgaccagttctctgctgtgagaggccgtttccattctttcctgctgaatatttttcctgttagtgtttatactgagctagtactgtaacttgcaaatgagtgcaaatttaaatgcaatgttttactcacaatttgcacattcacattttttggactgctagtttttctatttaaatatttgccttcatgttaggaatgtactatgtgaacatgacatatttgtagttaaccaaacacaccttcttagtccagtttagtactttttcttttcgtgtattcaaggttaaacacccaaacatttaaggatatgttgaaactacaccaatagagcatttcatatcataattaaaatgaatgttaggcttcttgtggccagttaatagttgatgagattggtgacattatttattgccacagcctattgtataaactatgcagagttaaatatttgcttgtaaaatattagccaatgttgtcattattttgatgtatttccttggttatgaccaaaaatatgttgagatactgaaactaatgtctgtgtgtttaaatgtttaccagcaaattgtcttatcatgttaatgagaatgttcaatgcctgtgtggtaaatagtaaatacaatggcataaaagtaactttctctgaagatgtgatgttcaggctgtgaaatatatatgtaaaagaaaaataaatgttatttgttagagtttttagtttgatactgtttttgaccattgagatttttaatttgataaaatgtttaactgttagagaatttgcaagctatttggcagtctattcattcataagtaagtatttactgaataccttctataccaaaagccattctaggaaatgggatacagtggagagccagacagagaaagcacacaatgttgagatttagcggggcaagagctaacctcactataccttctccagacagatttgaagtttattgaatgaagtactaacctcgtacccaaaactcaaatctgagtcttggctatttgcttgctcctaagtaagtaagggaagtcagaatatgcccactgataagaagagccaggaaaataagcttgtgagtgacatctcaatgcctaaagcaaaactgattcaaaggagctttcagaaaaaagggaagagaactttctctgtcaggtaaaagcagtaagagactctagattcaccttctagcttgaaacaactaaaa

SEQ ID NO: 548 - DNA, 2332 bp, Homo sapiens
gaactcctcgatgaggaccatctacagtgcttttttttttctatctctctgtctctcagttctgctttcttctacagtatttgatgactggcatcccatttctataagctgggtccagaactttgggctcacaccttcctttgacgtgcaagtgccacagaccctgagatgtttcttcagatcagggtgccgctggcatccactgaacttgcttcagtttaagctgagcaccttcctgagaatcatttcattttatctttcattctgtagtgagaagaggcttcagcatgaatagtctagggacatgcaagatgtataaaatagaatggagttgtgaattaggttatatgagggagaaatttataaaaaatataaagcattgtaaagacaaatgcatgttacacaaaaccaggagaccacttcattttaagaggtacctgctggtctcagaagctttaagtgatttataatctagtcaacaataagtggcagatgaactgaaaatatatttgcatgaagttcttagttcagaggtaaagctaggatgctatgcatggcaacactggaagggaaagagcttttgaaatccaggtctgggcatttgctctaatcagaggtcaacatcttctctgccctcataacccactccccgccaggggtcctgtctcctagaccacacattagcagatataatatctgtcattctggtttctcattctctttccagaaaaatccagacatgattttattgcaagatggagagaaaaggagacagcatcacatgtcttatattagtcacaaaaactggatgggttttatttcaggcgctaattcttttgagaacacaagggaaactttgatcttaatctatttgatgtggttttaagtaaaggagcatcttgtgcttactttgaaagtgtttttttacttcgggcttggtcaaatattacattttgttccagagaaaaactcatttggaaggcagcatggagtatagaattagacatccctgggcttgaagcccatctcagccatgaactacctttatgactttcagctagttacttttcctcactcagcttcagtttcttcatttataaagcaagtgcctcaacatcgctttttgactctcttaatcttgtctacgcatttacagtagcccttttattactgattttttactactcctggccatggaatgacgagaagcccatgtgtcattctcagacgggggattttgattctaatgacagtcatggttgagaagtccactgtgttaaagtctcttcatttgaagcatctgatgtgaattttattttttgcttaaaccccagacatagatgttaagtttcaaaattatgtcatacattcactcccactacatactcattgaatgcttaccatgtacagactctgtgatagactatggaaatacatagaaagaaattccctgtttttaagaactttacctagtgtttagaaattgcatttaaaactgataattaaaatactatagaccttggcttaaaggatgcaccttgtaatctgtaatcatatttgtagttatatattgctttgaaaatacactgtagacagtaagacaaaaaaggaaataaaaagtacatgaattgcgaaggagaaaataaaattgtctttgttcacagatgacatgattgtctatgtagaaaatcccgaggaactgacaaaacaaacaaacaaacaaatctagaactaattagttctagattatagcaaggttgcaggatacaagcttaatacctgaaagtaaattcctttcctatataccagccatgaacaattggaatttgaaatcaaaatacaacaccattaatattattaccaaaagagagagagggagaaatatgtattatgctaacaaaagaagtaaaaaaggtatgtgagaaaaactacaaatctctgatgaaataaatcaaaggagatctaaattaatggaaagacaaactatgctaatggataagaaaactcaatcttgttatgtgtcagttcattccaatttgatccatagattcaatgcaatcctagaaagctactttgtggacatctgcaaactgattctaaggtttacacgaaaaggcaaaaagatgcaatagtcgaaacaatattgaagaagaacaaagaagtcggactcttcttgacttcaagtctttctataaagctacaataatcaaaatagtgtggcattggtgaaagaatagatagatcaaaaccaattcaatggagaaagggaaaagacagtctttttaacaaatggtgctggaactggagttccttatgaaaaagaaaaggaaag

SEQ ID NO: 549 - DNA, 115 bp, Homo sapiens
tttttgtatattttagtagagacggggtttcaccgtgttagccaggatggtctcgatctcctgaccttgtgatccatccgccttggcctcccaaagtgctgggatgacaggcgtg

SEQ ID NO: 550 - DNA, 115 bp, Homo sapiens
gctgaggcaggagaatcgcttgaatccaggaggcggaggttgcagtgagccaagatcgcgccactgtactccagcctggcaacacagcgagactccatctcaaaaaaaaaaaaaa

SEQ ID NO: 551 - DNA, 1974 bp, Homo sapiens
tgagttttcatccattggtgacaagatggtcagacttctagagaaataaggtagttttgtggtagaacaaactcttccttgtgggaggtatagtgggatttggggaatagggtttatgaaatggtccccagagtgggatggcttgccttttcaaactgggtttcccacccagcaagttaagttgacccattgcagtggattgagtggagggcaggtgaagggcaggtgttttcaagtcaaaggagttcaggtgaagggcaggtgcttttagtcaaaggagttccttagcattatttcctcctttatttggagatcagattgaagatgtaggggactagaatgcagttgtagtttgtggtgtttactttttatggaaaagtgcctcttatgtgaaaagtcttctgtgcttgatcctgggggtaggggggttataaaaatgtcatacctgggatcctgcccttaaggagttgatggtaggtaatgctttcctttggctttttgttcatcttgagtctgtgtatgttcagttatcttcagccatttcctgggcaatgggaaacatttctgttaaaacaaacttctgactttgatctgtgacttatatttctttttagataatgaagaaccactgggattagagggtgtataaaatacaataataagtatagtgtatgtaggaacctctgtacaaccaatttggtgacttttaggcaactcatttgactatttgactgtttgttacatgagtgtgcatttggctttgtttaaaattcctctataaagcacattttaaaaaatgacccagtacttagtatataagatgaactgccatttgtataattgatcatttaaaaatgcttattatacttttaatcaatcagtttccatgtttatgaaatgggaataattattatatctagctcatagaattgtcctgaagatgaaatttatatccatatatacataatgaagctctttagagcaatgtataactacatgccaactgttcaaaaaatattaatggctacatcactattaatattttaaaattagtactgtcattttcccttcctacatgactgaatgtaggaggtgactatttttgttataaaaggatttccaatgagatacctttgaatggtaaaatttcctatgcatttatttaaatgtttatatatatatgtctttaaagtatgaaagttaagtgcacttatacaaggcagattcaggtactaattaaactgctcatttagattacagaatgagggactgaaaattatatgtatttaattaggaattggattgattggtcttgactgctgttgtctttcagttcttttttattgttatacttcccatgtgtttgtctccttttctttttatcttttaaaaattgctttctgatttatttcctgttcagttttcagtaatgggtgtagaatagggcaagaacttatgttggtgcccgttgtttgaaccaggaaggagcaactgcatcagacagcctggggctcagttgggagggacttcagatcagtccctgcagagctgcctggcccagggaaccactgaattccagtttcctaactccaaatcggacagtttgtgggtctacactgtatgtacataatgaacattttaaggctcattcatccagtgttttccacatgctcccatttgtttagttctcctttttaaaaaccaataattatggaaaaatttagctatgtacagaaatagtagtgagaaaccccccacttagccatcatgcagcttcagcagttgatcatctcatagccagtcttgtttgctcaatactcccaaccatttcttttctcccattttattttgcaggaaatcccagacattatatcatttaatctaaaagtatttcaggatgtatctgtaagagatgaggactcaaaaatgcatacacacattttgagaacttcccagaaatgtaaaaaaaaaaaa

SEQ ID NO: 552 - DNA, 90 bp, Homo sapiens
ttttttttttgagatggagtctcgctctgtcgcccaggctggagtgcagtggcacgatctcagctcactgcaacctctgcctcccggatt

SEQ ID NO: 553 - DNA, 2845 bp, Homo sapiens
tttgtaaattgaattcaggtagtagtatcatccaccaatccatctgttgctttgttggtcttctgaaggggggatttaaaactctgaaacagtctgagcaccttgagagaaatcagaaacaagacaattatttgcagtgctgtcaaacaagccagaaggagaaaatcaaggtagaatgccccactttccagttgccttaggatagcaggctgcagcctcagacttgatcctgtcattctcctctgtctcccacatctgaattgataattgctgcaaaatgtcattagcctacacttcatccatcagggctcttggattcttacaccacgacttgctgtgcaaggtgtttattgcatcttcaaagtgaaactttaaattattattcaaacatttattttccttttgttttaaaaagagtccctacaatgatcacttctaagatttttttttaccttcccctctgcagcacacacagctattcaacaatgatttctaaaattcatatttcaaatttgtatctctccattttgaaacattatagaaagcatgggatgcttgagacaaatctggtttctcctttgaagtagctgttgacaacctactctcttgaaaagttagatataattcttaatcatgtttagtggaaatttgtttacctgttccatctgttttgctgtttcattgtaaggaagatgagaagtgttggaacagcttccctcccctaaaggtattctagcagaggcgagacagcaacttggcgggcatgttgcataggagttaagtaccagatggggaattgcccatgtgatggtgaagagtctctcacattgattttcttccttttctcctcttctctcctccttctcttctctcctctttctcttctcttctttctcttctcttctgtcttcctcttcctcttctcttcctctcctcttcctctttctctctcttcctttttctcttcctctttctctttctctttctcttctcttctctctctcttccttccttctttctttccttccttccttccttccttccttccttccttccttctttccctccctccctccctccctcctccctttttctttttctttctttttttttggtttggcagagtcttgctctgttgcccaggctgcagtgcagtggtgtgatctcggctcactgcaacctccacctcccgggttcaagcaattctcttgcctcagcttctccagttactgggactacaggtgcataccaccatgcccggctaatttttgtatttttagtagaggcggggttttgtcatgttggccaggctgatctcaaactcctgacctcaggtgatccgcctgcctcagccttccaaagtgctgagattacaggcatgagccgctgtacccggcctgattttctatgattctgcctttaaaagacagcacgtataccaagcctttttcagaaagcttttctcttaactccttctaatgctgaattttctctctattatcctcacccaattttggctgagagttagtgtacacaatttaacttcttagaaaaattccagtgtctatgcttatattgctcacttgaatcatttgaattagaaagggatctacaaataataaaagcaaagagtgcagacagattagggatagtaattcttaaagtgccatctatcccagatttccgttatagaccagcatatgtgtaattgtgcagtgggaggtaagtagtacccaggacattgcatgtacaatactttgaaacaaagtggcaacaaagatttcctggctcaggtatgcaccccagctgctggtttagatgaagtgctgagaatatttagaaaaagcgctttaaaaagcatctagagattatcatgaaaataattggagacaaagtcactaggctgctttgtgagaggcagcataccatggctctaaacccgttcacaaaaaacaatgttagagacattaggaattcaggttttgaaaatctttttttcgatttatttgtaatttacataccaaaaaaccacattaaaatagtcctcccttcaacatggctatcttttttcaagttttatatgcatagctctctcagcacttgaatggaaaaactgttacagcatttgggagttgtttttcttttagactttgcagatcttatctcaaggtgactaggaacccagagctaagtatctgtgaggcaatctctgcgaacgctgaacttacctagttggtttctatgaaatatgtagaatgcactgcagtagccattgtaagaaggtactataccggttttttggggcttgttgttgttgtttggtctgagaatgtactgccaacccctcttttataagagagaactgattttgatacatattttaaaatatgatagtacagagttaatggatgttaaaattttatttctttgttttggtaagtagattaaatcgagaatcatataatcagtacatttgagaattatataaccagtatataataatactggacacaaccatttgccatcttttcctgttatcatcccatagagtgggtggggagaatgaatagacataaacctagaataatgataaatggtttttaaaactctatattgaatacattccagctgataatgacttttctttttcaccttggtgatatcagcctcagggtaaaaaaaaaagtttcataaatcttttagttataaacaggaaagttttatattagtgtgtcatttcatttctagactgttgatggtgatgatgataaagaatttggagccaattttgatatatgaatgtattgcttttacatgtgatgattaaagctctccattagcagtt

SEQ ID NO: 554 - DNA, 2395 bp, Homo sapiens
gtgaatttgtggaagcaatctgcattcataactttgattggagaataaatggtatacatggtgctgtctttggaaaaggtaattatcagaattccaggtccaatttgagccccaggagagagtttcctctttttagaggaatataaatataaatatgaactgctttatggcaaatatatagagaatgataaaacaaatggattataattgcattgtgtacgagaatagatactagtgtttttgttttattttgtttttaagaaaatcataggtaagaatattagtgagcaataaggaatagtgggggaaaacttcacgttatttataatgttgtgaaaatccaagtttttcaatttatgtctggtactcaggcaaattaaggagagaggtgaggggaaaaggtatgggatgtacatttaattttctggtccttactttgtaccttgcttccagcaagagaactgactactgtttaggatcaggatatgctgcattttgaaaatgtaaattaatttaaaaaataactactaaaaaggccattccacttatttaactgtaaggaggtcagaaggtgttacataaatcccatcagtgttaggtaaatatgagactttgcaattcatttccacatttttttagagtaagaatgcccttaatgatgtctatctcttgtgtctaccatttcagaagagttggctgctttatcgagttttcatgtgtaggcagtgagccagtaaaatcatttttgttttggaatgctcagatatgaatagcattatactctctcagaaatcttttcatggatatgggattctattgtttccagaaatattactgaattgttatcccatatcatagaaatacggtttcttggggtttaaaagaatccctgtaggccatcggtttccactgtgctctctagagctttgctggatgttgacaagggaacagggtgaggaagtggtgaaaggaaatagaaacgggagggagggccaagcagtaaaactcagggccgggcatggtggctcacgcctgtaatcccagcagtttgggaggtcgaggcaggtggatcacctgaggtcaagagttcaagatcagcctggccaacatggtgaaaccctgtctctactaaaaaaatataaaaattagttgggtgtggtggcacgcgcctgtaatcccagctactcaggaggctgagggaggagaatcgcttgaacctgggaggcggaggttgcagtgagctgagatcgcgccactgcactccagcttgggagacagagcaagactctgtctcaaaaaaacagaacaaaacaaaactcaggtccaaccacacttttaatcattaaaccagttttatctgttttattaattgttttctttgtaagatttattttaaaaacagaagtctgatagctatattttggtgggggcaggggatggtgttggtggtgaggactggtctgtaccaacaaatctattcctatggcagtctatactacagctgtccataacagatggatttctattcttctcttaaagatctgcagatgaggaaattccacatctatttttattatacaattctatgcatctattctcctgacaaaatgtttttgcttgtttttaatatattcttcggagtaatcttggcttttcttggtcctctttgtttaaggaacctattttgctagagatgctgcttattccagtcgtttctgcaaagatgacataaagcatgggaacacattccaaattcatggtgtcagcttgcaacagcggcatctgtttagaacatataaatctatgtttcttgctcgagtgctaattggagattacataaacggagactccaaatacatgcgacctccttccaaagacgggagctatgtgaatttatatgacagctgtgtggatgatacctggaacccaaagatctttgtggtttttgatgccaaccaaatctatcctgagtacttgatagactttcattgatttcacttccaaatctcggtggtcaaggaagctttattcttttttgcaggaaggtttgctcttcagtcatctagccactaaatgttaattatctgatacttttgaaacagatatgaaaaaaagtggcctccatataaaaagacatactgacttcaaggttggtttttgttgttttgtttttgcctgtttcttgtagtcttgtttgttaaaagttgatatcattgatgttttaacacataggggtgaaagataccattcaaaatggaatcagctgagtctcaactaatgtggtcattgagatctttaaagtttacgtgtgtgttatcaggataaatgattttagtttaaatagacttattcgtataaatgttgaaaaaaaatacagacataaatgtgtcccttt

SEQ ID NO: 555 - DNA, 6713 bp, Homo sapiens
tagacagtgtctccttccttgaagatgctatcctctgaaataactgtgagtacagtcgcataaccctaatttaagatgtgcctgctgaacatgtgctctctcagatcctgtcctcagaatgcttttggctcttttctcggtatctcatccttagagtttttattttataccaatgttctggattacatacctggtccagaaatctagacttgtacttctttttaattgcctagttgacatttcaaccttgattaaagattgacaatatttatcaccttttcctcctggaacaatttaggttaatggtgcagccttttttcctagtcaaacatgccaggaagttcagggcaaagttcaactgctccctcttgtcttatgtggtcactgcttctgagaacatccaggaagttctttctatacttgaatcatcttctcagtcctttggggctttactgctatgagtatgaacttttgtgattatttatttcagtcttcatgatggtgctatcacattctacagttgtttatgtctgtacccagtaagctcttttgagggaaggaatcttgtcttctcctattcccagtcttgctcatgcataacagatgcccattcctcctaaatatgaatgctgtattataggcattagtaataatccctgttacattgcagtctgaagtatgttttaaacatacttttttaaagttagaactgacttacaagtgaatctattcttagattcttagatactaactactttagatatttagttatactcaataactaaatatcaatactcaatatctgtttcttctgaatttcagagtagttagaatgtttttcttaagactttgctagaaaggaactggtttgttagtaattctgccatcaactcatggagttataattgccaaatgagttaatttttatataccttaagctatcttgcctacaaaaagtaaaataaggcaggattcataaatgttacttgtaaattgagtgtttcacatgaggccaagtatgattttaacataatgaatatcattgctcctcatctgtaaatttgctgctgctttcatatgtgtatctgtacatagagttatgaatgaaaatccagtaatgccctaaagcaactttcttccatagggtcaaagctcacttaaggtaaacgtgtgaaaaaagtgactgcagtgtgtttgaaaccacaagctgtttctatgtcataaattaacatcagcttgcaagtctctgaaagaaccactcatttgtaattggtatatatgtcacaacctcccacattcctttagcccatctcagggaattattgaaacgctggcagggttagtttcattttgttttggtttttttgggtttttttgtttgtttgaggattttttttttcttttatcatttgtttgctcctgtgtaagcttaatatataatggcagtttggcatctgttcttcgcacatgtctaacccagcagagttatgcaaaaatgatgacttcattttaggtcaaattggctttgttcccagtcctcattgttggtcactttgttcagttctggtgactcattggtgatgttgatgaaactgctcagcctgccagctgggatattgatggcaggtctaggcttcattgttaggtagaagattgaatacttctcactttatacaaatttacattggctattgctcccatgtgttagctagtcttaacatgtttgttatttcgttatcttattagctgacatacggagtggtattattagtgtcgtactccttagcgtgagcatgacaattaagttaccttactaacagtgatgagtaaaccatactctgatctaaacccattgttaccaatgatgtgattatgaagttagctgaatctatggtctacatttgaagaaatagttcagaattctctactacattgtaagttacttgctaatagagattgggcattattatgtactactccccttctcacatcctacccaaagtacacaaggccgtagtaaaatactgttgctactaaaaactaaacatactgtggttgctaatgtcctttacatcttcagcctatagggaatggtacaggcagaaacaagcaccattaagtatattatcatcagtagtgagatctgtatgattaggatatctttgcttaagcccccaaaggaaaaattctctagcattaaaaacatggctggaacatagctaagcagttaacctaattagtagacttattgttaacgttcagtcctaaaaatgaaaagcttcagttgggagtagaaaatatactatgctggtatatagagcaacaaataccctgatgagataaaatgaagtagaaacttaccatttgacattatttgactttcatacatgctactgaaaagtctaggtttagctaagaagcataaataatggcagtacttgtagaggaaagaacataccagctaaaacaagaactgtaatgaatataatggaaagtgtttggagcttgaatacttggcttcaaaaatctggctttgccatttactgttaaaaaaatatctgagaatttatctcaggctgtaaaacagagaagtcataccaatttcaagaataaaatatgatataaagaattgttgaagccaaaatatccagaaataaacagaatggaaggtatcattgctataattatcttttcagaataaaaaatagagtattctttatcctttctgttgtctcacatgacaagcatgggatggtgaggaaatggcatattgcctatgttcgccgccccacccccttagttccaccaccccttcaccgtcacccccagttcactagtgtatcagaatgcatcttcagaattacacactgaagatacaaaaggtccagttggtaagctcatcagtaaataacaaggctttgaaatctgacaaattagctatttttgtaggaagataatagaacagcaagatggaagacaagtgatgagtatcatctgttttgaggttgacaaggtgtgacataaccctgttaatagacacaagtaaaagaaaatcatactaggattggatattagtgagcgagcaccgaccagtagaaacaacaacagcataaatctgttatttaagtatcccaataatgaggttaaaaaaaaaaaaaaaacagaacaaagcatgaaaagaccacaattagtgctggctatgcttagagaggagcagtctcttggtaaactcaggcagtgatgatgaacagaaaatggccgactgatactgtaatagaggcatagaactaaggacactccgtgagctggcataaatacaggggagtctttaagactgaaaaaagttcatgggtatgacacttaatatgactcaacattactgcagaattttaaagcaaacatgaaagcttgagaataaacactagtccctctacttcaagaaaaagcagaacctgtactagaacatgaagaacttagagatcaaaagacagccagaactatgatgaaatattttgaaagcagtgggcacatttttaaagattttttttggagaactttatgaggctgtatgtataattcctatatgtaattttataggaattcttaactgaaagtagttatcaactgctacttatcaggagcagtgttattagggattttaagttaggcatgtagaaaactttctgacaaaagggctattgaactccagccagttcccagtgaatctccaggaggcaccttagaagtcttcacaagctgaataccatgtctttagggtgtccaaatgcttctgtcttgggggagagatgagagatgactgggtgcctttccactcagaacacagtagaccactcactatttatgaccaagcctcacttcttttctattacagttacagattcttttttagtctggaagttagggtaaataaaatttgtatgtttgatttttctcttaggaatgttttctcatcttaactcttatgttatctttatggccaacagatttgctcagaatatatcatcaaaatatatgtattgtattttgtaaaggtgaaaggatcgaaataccactttgacagttataaaccagagtagatttgagaactgattgctcacatcacacttacgaatagtctcagaagcctttaagagaaacttacttctcaatggacacttagaagaatttgatgatcttactgtcataaaatcagtaatgaaattctcagcaaaactatttggtaaacattgcaccctgtatttttacccaacatcttgttatgaaaattatcaaatacattaaaaagttaaaataattttatagtgtactcactacctagatgctaattagcattacctatgcttgctttgtcacatatccattcatcatttcatattattatttgatgcattttaaattgcatatcattaactagagttcattgttggcttttttacataaaattagcatgcaatgaagtgcatagaaatatgtgttcactgaggtttggcaaatgcatatagtgctatggaaataggaaacgttatcaccaccctagaaagtttccacactgccctttccagtcaattcctgtccctacttgaccctcaaaggcaaccactgttcctttgtctaccataagatttttctgttctaacactttatataaatagagtcacgcaacatgtacgctcttctacaaggcttcatttttttattgctgttcttttttattgctgagtagtattccactgtatgacaatattacagtttgttttcttaatttcctattattgatagatacctgggctgtttccaggattggccattataaataaagctgctatgaccattcttacgtaagtctttgtgaacataggttttcatttctttgcagtaaattccttggattagaattgctgggtcacagggtagttttaaaagaaactgccatacctttttccagttcagttttattgtgccctgtattttgtattttgatgtgcataaaggtgtaaactatttttatgatccatattgaagtattagaagaagtgagtttggaataacaatggcattgttcatggtcaaggatgacaattggaactatctgaggaaagcaaagacctgtctgccccagacagctcctcaaggggttcctatgcctgaaactttagcaatatttcactccttgaaaggttaaagcccaaccatggtgatatgttagctagaagaaacagcactggtttgtttatgttactaactttcaccacccgttttcagtaggtaaagtaagactgatcattgacagaaaaggttatttctgtgatgaggttgagggggtagtggaaagcatgtattgctagtaagccccaggtacagctatgtgagagagagtcacctggacagggaagtcccccaaatggtggccagaagagcagaaaacggggtgggaaaaattctacctcacagttttgcataggggatagctatgcttttacgggacattttagcgtttaaaaatattttcaatattgtctctttattcaataccacccagctgtagttttttcacactctgatgactctcttatccactcttttacctctcccagctgttctattacatacagcattcacctgtattagtctatagaattataatcatctgtgtgtttctaatgctcattttcaaaaatatgtatggtttattcgatttttcctattaaaattttaagggctgggaaatttggcttctactgtaaatccttataatgttccacacattgtaaatatgcaataaaaatgttaacaactataatggcagcaggttttggtatgtatttctttgatatattgtcactttggacaataagtttgatttctgttaataaaagttgttcataaaatctagggagaattaagtcacactggtctctataagataatctgatgaattctgcatctttgaatcaatttgagttattttttgtaaaggtttaaattgtttctaacagtgttacctaaaacctttcattaaatcaaaaatgtaacttgtatattctgaaataacctggagtcttagaagacagaggcttctgcttccctctcccgtgaccccaacaatcccttcccacaggcttggcacagaagttcagtgctttctctacgtctcatgttgtcagaaataggttctcaccataatagacagtggtgaaatttccattgttcctactgagaagtccatttttaaggcatcaaaggtgaatgtgtatttagggatggaggaggcatattacaacaaagctgtatttaaaataacacaatcatatcatgctataaacaatagcagttccagaatggctactaaggattttggactgccagactttggaaattggcaagccttataccttgtccaatgaagttaagtacatttgagtgacagttcaacatacaagcaaaaaaatatatagaagacattgtacatttgttattaatggacatgtttactttacatgttagagtatccatccatctctaggttttccattagatgcttcattgtatccacaaacctgtttcaaaccattgaagtgatcttaccattgtgtttgttcaaaataaaattgggagaaaatgtgaatgagtcaatatcaacacttgacattcctgtctttttaatacattttattcttttgtttagaaaattt

SEQ ID NO: 556 - DNA, 15914 bp, Homo sapiens
aaattgcagcactcttgaatgctggcgatgaggaagatcttgtggaactaaagtcactgcagcaacaacttagtgatgtttgttatcgacaggccagtcagctggaatttaggcaaaatctcttacaagcagctcttgaatttcatggtgttgcccaagatgtaagtgtctattctgattcttttcttttcttcaaattatctgaacacttacctacacgtaatttttttcaggtttgcatgcctcctaaattatttttctgaaccaataaaatgaattactggtgggggtaatgagataaaattctttgattttttttaaaaacaagtattttttaagtcattctgcatgcaattcaaccttttattgtctaactagagtgttccaatctagtagaatattttattttgactccttctcaatgtttatgctttataacttagatggaaatggaagtctcaatacttttttgcattctgctgacctgaatgtacttctttgtcttcctggtgcatgcatctgtgtgttctgtcttccagataatgcatattctaatgattcgtccttgtcttgtaacagtgtagtcttttcaagtgtaattgtgataacctcattagatataaacctcattaatcattaaacactttagatgctgattacatcagggttatctctttggtgtccctctgctttagttgtctcagcagttggatggcttattagggatgttgtgcgtagatgtagcaccagctgatggagcatcgattcagcaaactttaaaactgcttgaagagaagctgaaaagtgttggtaagcagattttaaaaatgctgaaacataaggtttttttttttttaaatatcattaccatggttagacaattaagtcaacttacactgaactaattagtattattttcaggaaacagaaaaatagtataaaaagattttattcccttgaggggttataatttatgctgaaaattttatttttcatcgttagttagtcactcctcccttcactgggcctttacccttgcctgtttacccagctatatctacaggtgctgtgtcttgcatatactatgaacaattatttgtagtgcatgcatgaactgtaattagctgtgaaatgttctgtggtaaatcctgtatgcccaaaattgtgttttatgcaatgatttttgttgttgctttatcctaaccttgtgaaaaaatagttggtttggttttttggttcttgtctcaccaaactgggaatattgtcagattacccattctccaaggagtggggtacatttacattaaggggtccagttacattaagctgatgtaggcttgatgtcatttgacatcaaggcctttagaatttttctacagcaggaagcacagtgaactttcctaaaaggtcaggatgtgacaatgggaaggtggggagtcgtatcaaggggggacaaaaggggaaatggcaatggaagagaggaaacaggaacttaaggcagagaactagtaaaaagtggttgcacatgactaaaccaaattattgaaaactgccttagggaattggtttgaaaaatcacacttgtactgacattttacttgcttacagcctttgttattttatttttttgagatggagtcttgctgtgttgcccaggctggagtgcagtggtgccatcttggctcactgcaacctctgcctccccgattcaagtgattctcctgcctcagcttcctaagtagctgggattacaggcacctgccaccacgcccggctaatttttgtattggtagttatagtagacatggggttttgccatgttggccaggctggtctcgagctcctgacctctggtgatctgcccacctcagcctcccaaagtgctgggattacaggcatgagccagcgcacctggccagcctctgttattttaacagatggtatgcataatacatatttagtgtttaatatgacaaatgaattttcttttaaaatattagttttcttgagccacagtctttgtttaaaaaaaaaaagttcctttacacatgtaatttggagaattgtaaatataccctaattgttgcttcctatggtatagaagctagactgtatctttagtcacaatgttcaacatcctttgacattgatgatacattgctggagtgtcttaaaattttgcaaggcttatgcgcttttttaaacaacatgtttgccttgttctcctataagttggacagcataaaagcaggaagaaaaaacagaaaattgttttctattagaaataggaattttcatatttttcttctgctttcattttttaaaagtaattattgtctatggaaacccatgttttcaaaattccctttagggagaatttggcatgagagagagctccaattcgagttacatttaaagggttttattgcttgaaatgttcataggatggagtcttgggattccatcccaaggtggtttactgtacaaagctcctatacttgggatccaggtacaatatctgatgagacgatttgtttgagggagggaaagcgccttagttgtgtaagagattaaatctagtaacttttgttttagatgtgggattgcaaggtttgcgtgaaaaaggtcaaggtctcctggatcagatctccaatcaggcatcctgggcctatggaaaggatgtaaccattgaaaataaagaaaatgtggaccacatacaaggagtgatggaagatatgcagcttagaaaacaaaggcaaagtttgaccgttaattactttttactaaaataataacaatattagttaaaatgaagttatataacattttatatacagacaaaacgttcttaactgttatatagaagacatgtagtaggtttttggtgaatgtgataattactgtatataattttactaacatagtaataatttattcaattattaggtaccattttcctttttattgggttgtaaaaatttcaattatactcaactatttcaaattccatatccccagtgtagtctatgactcttctgctttaaaaaaaacttactgaagaataattttgctttttaaatttcatttagtttagagttgccattaaacttgtcatctacattgatctgtttcttcatctaaacttacagaatgtcacacattcattgttctcatatttgctgtaggaggattaaacagtggactagtgatgtttagtttcattttctataaaactaggaattcaaaagattctttgaaaactcagtttgcaatagcaactacaaagtattgcaaagtaaaggattaaaattatgcaatatacacaatctagcatggttatatgaaattttgcacacttaaaaattttatgatcatcaacaaaacttcacagaaagcttccttctgcatcacagagaaaacagtcatgaggcagaaatttcttccctcatatctgcaaacttacttttattctgtcaccacagaggatgatagagctctccgtttatatcaaaaaatatcaaagctgagcttccatttaggctctgattctgatcaccctcctgactcctaactccatcaaatcccattctctactctggttcctgccctcacttaaatgcttaaatttctcctgttttaaaaataataatcacacatatgggtacgtcttcctcttcaactctttgtcttttagcattagaactcttcctcacagctaagtcatttggataggtttacggtacattcatactacttcccccactacctccaatttattttcaactcttttcagtctgacttctaccctaactatttcattcagtgttgctcttaccagcattaccaacgtaataaatgctgtatcttacttaaagttcagagaatacttttagtcttgacttgcttaactgtgattagcgttaggcacaactgacttttcgatttcatctttcttgaaaacacatttatgatccttctctgtttcttcttggtttttgtcactgatttcttggccactagctaaagttactgcttccagggtttgttctgaggccagattcccttctttatatattctccctggacattctcactacttgaattactttctttaatagatcatggtttagtagttacagctctcccgtgctgtagacccataattccaattgcctacttagtgtcgcctgcgggatgccccatgtactgctgaaatctagtgtattagtccattcttgcattgctataaaaaactacctgagactgggtaatttttcttttcttttcttttttttttgaaacagagtctcgctctgtcactaggctggagtgcagtggtatgatcaaggctcactgcaacatccacctcctgggttcaagcgattcttctgcctcagccttccgagtagctgggactataggcgggtgccactgcacccggctaatttttgtatttttagtagagacggtgtttcaccatgtcagccaggctggtttcaaactcctgacctcgtgatccgcccactttggcttcccaaggtgctgggatcacaggcgtgagccaccgcacccggccgagactgggtaatttttaaagaaaagaggcttaatgggctcacagtcccacaggctgtacaggaagtatggctggggaaacctcaggaaacttccactcatgatggaaggtgaaggggaaacagacacatcttacttggatggagaaagaggaaaagagtgaagggggaggtgcggcacacttttaaacaaccagatctcatgagaactcacttactgacatgaaaacagcaagggggatatgtgcccccatgatccagtcatctcccaccaggccccttgtatttattagtccattctcacgctgctatacctaagacaggataatttataaaggaaagaagtttaattgactcacagctttgcagggctggagaggcctcaggaaacagaatcgtggtggaaggggaggcatctaatcacatcccaccaggctcctcctccaatattgggattacactttgatgttagatttaagtggggacacaaatccaaaacccagatccaaaccagatcacctagtatgtccagactggaatcattttcctctaaaacttgctctccttttttaatttcctgcctaggttaaagttaccatcagctaccaaacttgagatttatcctaaaatccttcatctttctcatcccttatagcttaatcaaatgtccaggttctgctgtctctgaatctcaaacatttatggtcaagatcttaaactcttatctgcctctggcctggctactctccagctttttgtatataagtgtaattttcataaagtacaacaattgtgtaaaacttccttcagtgacttcctgtttgctcagatggagtttgtcttcttggaataatgtaggagacccttcataatccaattcttgcataattttatcttctataacattcccataaaatcacacagttgtttttatctccctgaaagcatcatgctgtttcatgcatccatgactaagaatacttgtttccttgttttctgctcagtgaattcctacttactcttcaagactcagggatacttactttactttaggaagcctttttggacttctaaggcaagttagtcacttgctcctccctactctcataaaacattttaaatagctttataatagtacttataacatctctgcaaatgggagcatcttgatagtagagaccatatcttatattttccccagcacacattatctaatacctgaatacagtatatgtatgataccatcttcatcaaagtggcctacattgttttttagtttcatatttaaaaaataattatcacttcccttcagtccattgtagaattactttaaccaagttgaattttaatgtcatgttatagcttttattcagagcatctttatttttttttaaaaaaaagccttgtgatacctacttctatattgttattaagctttctttaaggacatcaagtatagtagagcacagtgtctggtaacatattatcggtatttgagactgcagtgggagtcccccatcccacctgcagtacgcagaatttcatggaaatgaaggaaatggaccagagttaagttaggttaagttgccttaaaaatttaaatggttatattatccaaaaagaccacaatgagattaaaaaaataatttgaattgtgtttctctacacccagaggtcagtagagtttttttgtttttttaagccctccatctagtttttaagaatgtagatggagggttttaaaaaaaatcagaattaaatattattttaggtactataatataatgaaaagcgttaatgtttaaatgtttctttagctgggcatagtgatgcacacctgtagtcttagctacttgggaggctgggatgtgaagatcatttaagcccaggagtttgaggttatagtgagctatgatggtaccactgcactccagcctaggtgcttgagtgagaccttgtctcaaaaaaatatcatcctgtatttgagaaacattacacttttatccttgaaacttgtttgatgctaaacagcaatggagattttttttgggttttagtgtactattgtccttacattttgctttaatattttgcagaatccatgctatctttaagagggtttgtcattgagtatcatttgggtattttgatgttttgatgtaacattgatataaatatccctaaaattcttacaaatcaatacaaaatacttgcattctccattgtttaggactaagtattttagtgtactataaaatacatgtaccaaatgatgatgttacaatagtaatcaataaaacagaaatgatgagttaaatttatgtttgggttcattagatgtgaagacatggtagatgtgcgaaggttaaagatgcttcagatggtgcagttgtttaaatgtgaagaagatgctgcccaggtaaggagcagtcagctacattatgtagttaacttttcttagaagattgattttatctaactacaaacaaaagtgtacttttcatggtcctaaaaaagtaaattcttgaagtcaggttctagtttatctatcttgttgaagaatacactttggtattcccagctagttgattgatctcatttaacttaattttctcaatgaaatcctctataatcctctattgagctagagattgggatcgtttattatttattattgttgattaggttgtcagttacatccaggataaaatctggtggagcacactgcattttgctctcttgcatctgcaagagaaatttcaataccagataaacaatttgatatattttgtcgttatcatcagagaacatcatttcagttagatatagataaaatttttgattttatgtagtaacacaaatctgtaatgcaatcctgatggatctacatacagaaatacatgatcttttattatgtgatattaattttaaaagaatgcttttcttcagtatgtcttgccttcagatttaaagaattttgaggagtaggacaggtcattaattcatgtagcttatcattgaatgaaataagcttttaagactttaggttataattaacggatttattaatcacatgatagtaatctctgtataaatgacattttgatacaataagtaaagagttctgaatccagcttcattgttatgtctttttgtttaggcagtagaatggctaagtgaacttctggatgctctgcttaagactcacatcagattgggcgatgatgctcaagaaacgaaagttttgctggaaaagcatagaaaatttgttgatgttgcacaggtgcaaaactggttatcttccttttccacaagctcagtgtttgaatagctttctgcatgattataatgtaactttaccttccaagtacaagaaggttagttttgttattccagaagtgtcacagaattaagaaaatgtcagctggtgcatcaaaactagcctgcataaacttgagagggtttacgtttccctgaatacatgttctgcatggtccctctgatttatgctatgtattacggcatttttaaggcaatccaactgttcatccacagaagttaatatgaaatggatgttaatatcagtaaataagaaacctcactttctgcatcacactagtgttagcataataatacagaacttttttgtggtgaaaagtgtctttttttttttttttaagacacagtcttcctctgttgcccaggctggactgcaatgatgcaatctcagctcactgcaacctctgcctcccaggttcaggcgattctcatgcctcagccacctgcgtagctgggattacaggcaccggccaccacgcctggctagtttttgtctttttagtagagatggggtttcaccatgttggccaggctggtcttaaactcctgacctcaagcgatccacccgcctcggcctcccaaagtgctgggattacaggagtgagccaccgcgccaagccaaaaagtatcttattttccctaataatgagttcacgttttaacagatgtagtttcctatatggaatataaagtgcctaatttcacctacttttgaaagtagttttgattaattcataagcagacattctttctggccagtgaaatttaagcagactgcgatgggggaaacagaataaagtggggaagcctaacagaaggagacttttttctaattaaaaattttaaaacaatttttgtttttttgagacaaggccttgctctgtcaattaggatatgatgtttcagcacaatcatagcgcactgcatcctcaaactcctgggctgaagtgatcctcctgcctcagcctccaaggtagctaggactacaggcaagtgtggccaaactcaactaatttttttcatttttttagagataggatcttgctatgttggccaggctggtcttgaactcctaacttcaagcaatccacccacctcagcctcccaaagtgctgggattacaggcatgaatcactgtgcctggccatgaaacttattataaactaacaaaaacatagcttcccctttattacttatacacacagatgatttgtagtaataagtgccactagatttattcagtattgatttctagtagtgtcacttaactgtaacgacaatcttcctgcacactttccccatccttctcttaagaattcttttattacaattttatgtttccttttcttttttagagcacttatgactatggcaggcagttgctacaggccacagttgtgttatgccaatctttgcgctgcacttctcggtcatctggggatacacttcctcgactgaacagagtatggaaacaatttacaatagcatctgaagagagagtacatagattggaaatggctattgcatttcactcaaatgctgaaaaggtttgcttgtgtttttgaaatgttattctcagtggtattgattatatgtgtttaaaatatgttaattttagtaatgtaactatatgactaatctatttttcaatatttatattagttccgttgttacggtttgtttagatataatacattgccttagagagttcaaattaaatttccttaatccttaccagtgctggagagccatgattggagaaatccagaaccacctggtagtcttcttctctttacacttctctcctcaccaagcctggtgtccagaatatgccctctgttctttagagtatcatgagttcaatctctttcgttatgcctggaagggaaactttttgctttggcaactgctattaattgtcacacattttttaaaaggcaccttgtgattttataaagtcgggacattaaaaaaataagaataaggacaaaagtaaaatgcttttttatatgtgttctttaaagattcattctagaatttattattcaatgaattaaggtcattaatttcagaaacaaaaaataaaatatgcagggttatttggacacattttcaatagaacttttttcttactcttcatagtaagaatttattctacccaagccttacatatccattctgaaaaggaactttattatgtagttaattttgttttgatctcttacaataaaagtttatatgtagggaatgttcgatacactttgagatattagcaaacctaacttgatccatggaacagatgttgcaaggaacctcaggaattaaagtttctatctgagttatgaagtacatctgttgggaagggtccatagttaactcattctcagctggtcattgaactccgtagatcagtgtttgattaacatgggcctaatgatgataagtggaagtatacaaaatagtgtaacttgtttatctactgattgtttcaatgagaattttttattattatgaagtatactattaacatagaaaacataccacaagtattctgtgcagtgagatttcataaagtgaacacacctgtgtactcagtgtactgttcaaaaaaaacagaacattaccagcacccagaagctccccccaccctgtgtaatcacagtactgctcccccaatcacctcactgtcaaagggtgacaattggcccaatgtctagcaccactgataacttttttttttttttttgagacagagtctcactctgttgcccaggctggagtgcagtggcatgatctcagctcactgcaggctccacctcctggagcttgttgtacaaacctaagtaaagccctttgttatcagatattactttcctcttgactgtattctattttataccataagcataaatataaataaccacaactataagcaaattgtatagtataatgattagaaaaatatctaaattaaatcttgagttttaaaatacaaaaatgtccgttcatgagtaatgctgaagtaaacatgattagataaagtgtaatgcaaaaaaaagttgtaaaaatgaatactttttattctctctctcaaattttgcagttcttgtggtttaatttaaatggtaatggttagggtggagtgaagaacagtatctcatcaaggactatagagattaccatatttgaattataacctaatcattttatggcagttaactcaagccagcagatcagttgttaaatattatcatctagctgagttgtcacatcagttatttatttgtactctttgttgttttttatttatataatttttcatttgtaatgtctatatgctctttgagaacacagtctatacctccttcaccttccagactgctacataaacataaactgttcaataaatggttacttaatataaatgaaagaatacttcttaaggacagattgaacttattttccaaatagtagtctagttattttctttcttggaaatcaccatattgttagtaggaattatgtatttcattttgtttgtttgaatttcttgaagaattttgccaataatagatcaatcttatatagtggtatacctgaagatgctaagaacaagaaaatgcctttaatctaccaaatttgtatgagcttgattccatttctgtgtctttcttttctctctttttttttgtggggtggggtgatcctctgaaactgcagacctgtctgtgtctcttgattgatgttgctcttttatttgttgcagattttgcaggactgtccagaagagcctgaagctattaatgatgaggagcaatttgatgaaattgaagcagttgggaaatcacttttggatagattaactgttccagtagtttatcctgatgggtatggggcatgttcttataattttattttttattggtgtggtcttaaagtgaaatcattaaaagaggaaatctattctttaaaaagccaagtaaattaggtttggtccacatctttaactcctacgatgaattagtttaaaatgaaaagaaatccacacctcttagccacagtaatggtacttgccaacaacagatgcgttacttcttgacagcttgttgtagaatgatcattgactagattaagacactgggttctagccttggctatgatggtggggaatagtgtgacttggggcttcattcaggaaaaggaagaggggacaagggattgatgtttagtgagttcacaatatatgccaagtaccaagtgaaacatttcaccttcattacttttgaccaaagaggaccaaaccagtatgattattcctgatttacaaatgaagaaactgaggcccacagagattaagtaaggctctcaggatttcacagcttctaagagttagcataaacttacaatctcaggtatgtctgtgtggctccaaacccattccctttgtactgtgttatatggcgttctaatttctttatgtgtgaaggaatggggtcctgattatcttacacctttccatttcaaatagtgataaaaatatgaaataatctgatgcaaaataaatggatcaggaaaagaatcaggaagagcttcagccgggcgtggtggctcacgcctgtaatcccagcagtttgggaggccaaagcgggcggatcacaaggtcaggagatggagaccatcctggctaacacggtgaaaacccatctctactaaaaagacaaaaaattagctgggcgtggtggcgggtgcctgtagtccagctactcgggaggctgaggcaggaaaatggcatgaacctgggaggcggagcttgcagtgagccgagatcacgccactgcgctccagcctgggtgacagagcaagactccgtctcaaaaaaaaaaaaaaaaagaatcaggaggagcttcatccctggtgatttagacctgattcttactgaaaataatttagagataatccagaggatatttaattcaaatgatagagtaaccaaaccagtgaataaaaatacaagtacctttaacgttgtggtatagtgtgatgagtctgtgcactctggagccagaggtctcagctctaccacttactcactgtaacaccttgggcaagccacttaacctttgtgcctcaattccctcatctaaaaactgccatgtaacactcataccttcctcaggttatgggggtgtgggaattacctgagctaaataagtataaagtacttaaaacagatctgacacataataagcactgctactactgtgccatgatcttccagtgattatttgggattgatattgaaaagatggcattttattcccttgaaataatattattcatagtctatacttacgttatctcaagccccacctaaacttgaacaatcagaggtagcctaaagtcacctaaagttgtattacacatctgcaataaaagacaacaaaattcagctagtagcagaattacaggcgtgcttctggttgttccattccaggatcccttaccctccctgattcctacatttcacagccagttgtcacacagtcagtctcctgttctacccatgtcagcctaggaacacctctccctggtatgcttgcttcagcttctcgtctgtgtttcacagatagtccatgtgtcatttcctcatccatccttttaagataaaagaatgttagtactatatattcaaagttcacacccacctttaatattttggaattgctgttttattccactttatattcatattaaaacttatgtatatctcttttaggtattttgctgaattaaatatttcccaaagttgtgtgtagtgttttccataattattaatataatggtaatctgtttatgccatgtatagtttgtttgacaggttagacagatttctcttttataccttctcctggtaaaataaaagagattgatggtctctctggattcactgctcaaagacctaggttcaaattctggtttttccctgggtgaccttgcttacatcatttaacttgctaggctccacttttctgatctgaaaaataaagagattaacctgataatttctaagaaatcttccagctctaaaaatattctgtgattctgaatacagtatctttgagagtagaataaaattaataattttatctgttaatgtaccaaaaaatgtcataacattaaaaagaatatttattttgcttgccagctctatagacaagtggtgtccccagccggtagcactcaagtacctgtataaattttatgtttgtgcatccttctggacccacatatttccagtgtttcattgttcaatttgttgctattatcataactacacatgatataacctttataccatcaatatatttttctcatcatgtcttaatgtattttatgccattttaaaaaatgtttttcctgctgaatttcctgctcaaacagtatgatcaccgatgaactgatatttacacataggctatctcatgtagattttttatggtaaatttttgcttctatttgtattcactgcagttaatagatttgtattaatctgaggtttttctgtgtgttttgatttttagaaccgaacaatattttgggagtccaagtgacatggcttctactgcagaaaacatcagagacaggatgaaactagttaatctcaaaaggcagcagctgagacatcctgaaatggtgaccacagagagctaatagctaccagctacctacagatttgcagttcataatcccgcatgttgtcaacatactacagcattagccaccacaccttaagatgcatttcacagccaaaataagtctcatttcttttcatgacacatttctctttacatgttaacaccttgctactaccaaggcataattacttaacatgcttcgaggctgtagattccaagtatcttaaaagaaggaactataaacattgcactgaaaacttgctttaaagctttacctgacctgtcagtttgtagacaaacaactgataataagctttgaatggtgctaataagagtaggaattctctctattaaaaagaaaaaaaaaagttgcccttcctccacaggtgatttagtaaatttagacagtagttaaactcttgttagtagacagtggtgtcctcaaaattttactttgtaattcttcagaattgattatttttattgtgtcaatacagagaaagcctttcagatctttgatatatcatagtcattaaaagaccttttcctatttgtattgataatgtattaaaagttgtttgtgcttaataaaagacttctttaaacatcttatttaatttagtagttacatcctatttccaaacatgagtgccttatttaaaagggcattcttaggactgtgaggatggtttaatatttgttttttcatggtggttgcatgtattttagacaggaaatacatatgtaagcatgtgtatataataaataagcatgttttatcatgaaaaattattgtgaacaatttagatctttaagaacttattaataatggaatactatttctaatttttctctttttcaacttgaaaaatattctcaaaattattaactaccctgaagatactttgtctttaggggaggagggctgaggaagaaggcatacataattacttcagtgtaatcctttatatcagagtaatctttcaggaactaaaatagcaattgttaataaaatttagtttctcattatagtctaaaagcaaaataaattctgaagtagtccaataacagaactgtatgacccctttagaaataaaatttatcatgaaatgctagttcttttaagtttgtattaagtttaaatggtaaaatgcatataatttaaattttatgtatttttatttcagaacattttttaaaatattaaaaattattttttagtcttgtagtcattacaaaattataaacgagttgtatactggttcctttttgaggtctacaaacatgctcgtgtatcttccaatgc

SEQ ID NO: 557 - DNA, 217 bp, Homo sapiens
gagaaaccaaacatgtttatgaaattaacacgttctgaaagattagcacatccaatctatggtaaattttagcaaattcaaaacagagtgaagcctgaactgtcattttccagcatctcatcactaagggaaggttgttttcaactggaaataactaattcctttatgctttattatttaaatttctgtttaagaataatgtgtagttattattttt

SEQ ID NO: 558 - DNA, 6677 bp, Homo sapiens
tggtgaaatgcaacttcaatgtggaggaggccctgcgaaggctgcggttcaacgtgaaggtgatccgaggtgagcagcggtctgggccttccttccgctgcggccccgccctgggcactgctgaccgttctccccggcctgggccttccttccgctgcggccccgccctgggcgccgctgaccgttctccccggcctgggccttccttccgctgcggccccgccctgggcgccgctgactgttctccccggcctgggccttccttccgctgcggccccgccctgggcaccactgaccgttctccccggccgtgtttgcagatgggctctgtgcttggagtgaagaggagtgcaggaactttgagcacggcttccgtgtgcatggaaagaactttcacctgatccaggccaacaaggtgcggactccactgccaggctccaccgggggcttctcgatctggggaggggctcagggtccgcaggcacacagcacacggccgactggaggcctggagccccgtgtcctgtgtccgcctcctcaccgtgtgcccattgctgtcttctgcattttttgctactgactgctgtgggcccctttcctgtccccacaagaacaaggctctggctttgggaaagaatgtggcaaaagctgaattctagtagttgtttctgcctcacattccaccccagggccctgggcacctcatcttcaagtctgtgtcctctgagcagagcctgctggctcagtgtccagcattggccccacagcagaacccctgacacctggagaccaggggtctcctggttccctcctccagggacccaggtcctgccacccgggacaaaccctcatgacaggcaggtgctgccaagtgccggggccttctgcccttccttagaccttccccacgtcctctgtgggtctctgcatgtctgcagcagtgccctctgccctgtggcttcttgagtggtaacttccaagccagcctcttggcagtcagacatctctggctgaaaaccttcccatggctctgaccagtggcttctccgcctctgtccacgccccggttgggcactgagtcccttcaggaccagtgggctgtggccttgttgccgagccttgcttctgcctcgtgtcctgggaccgtgctccatttggggcccgatgtcgtccactgaagggcttgggtgaggaggcacctgcccggggctggttgtacggctcaggacattgctcaggtgactgtgcggtgccgtgcgcagcagcgatggactgtccttgtcagactccagcaccacgtggtgttttgattggagacagcggggcgaggtgtggctggagtgtggtgctcccaggctacacttggagcccctgtcaagtttctgtagctccgggccgtgtttctggagttgtgggccgtgtttctggactcctggccgtgtttctacagctccaggctgtgtttctggactctgggccgtgtttctatggactccgtgtttctgtagctccgggctgtgtttctacagctccgggcccatgttcctatagctccgggccgtgtttctatagctctgggctgtgtttctggagcttcgggctgtgtttctggactctgggctgtttctatagctccgggctgtgtttctatagctcccggctgtgtttctgcagctcccggccgtgtttctatagctccgggccgtgtttctgcagctccgggccgtgtttctatagctcagggccgcgtttttgtaactcccggccgtgtttctggagctccgggcaggtcctggcccagccgcgaggggccgtgtgtagccagcacacgttggtcagcctgagccagtgcgtatttcaccctggcccttcacagaagagctccctcgtggcgtgcgtttgaggtttgccctgcagggaggttgtctcggtctcgcccccaggcaggaccccacgttgttctcgcagcggtgagcatggggcatcctcgttctgggtggcggtgggttagttggcccagagcatgtccaggtgagggggtcttttccgccatcaccagcagtggccacagcctcaagctctctgtgggatgagcctcccgggtggagatgttggaggtgttgccaggtgtgcgcccagctctgtgccaggtgccacatggaacacacttgctgtgtgtcccttctcgtgtccctgaagccttgtgtgcgtgtgtgtgtgtgtcccttctcgtctccctgaagccttgtgtgcgtgtgtgtgtgtgtcccttctcgtctccctgaagccttgtgtgcgtgtgtgtgtctcttctcgtctccctgaagccttgtgtgcgtgtgtgtgtgtgtcccttctcgtgtcctgaagccttgtgtgcgtgtgtgtcccttctcgtctccctgaagccttgtgtgcgtgtgtgtgtgtgtccctatctcgtctccctgaagccttgtgtgtgtgtgtgtgtgtcccttctacgtctccctgaagccttgtgtgcgtgtgtgtgtgtccttctcgtgtccctgaagcctatgtgtgcgtgtgtgtgtcccttctcgtctccctgaagccttgtgtgtgtgtgtgtgtgtgtgtcccttctcgtctccctgaagccttgtgtgcgtgtgtgtgtcccttctcgtctccctgaagccttgtgtgtgtgtgtgtgtgtgtcccttctcgtctccctgaagcctgtgtgcatgtgtgtttggccctttatgtgctacgttgggaattttgtcgggttcacagaacccatgtgtccttctgcggtgtcttctgtgcacttgggaagcattcgctgggccctggagggatgtgttcggtgggaaagcaggcgccgcgggcttgtgcctcttcctcccggggaaggggctcagtccaggagtctgtggacccgggggttgtcactcccactcccaccccgggcctgtgagaagcaggcagatgaggtggacgcaactggcccgtggctcatggtctgggatggggtgggtgagcagtagacagaggcctggagggtacgtttgtctggctgatgctacagaagggaaaggggtctcaagccaggagctggagggctctgagggggcttgaaacaggaggcagtgccacagtgctccgagcccctgttccctgtggtgggcatagcctgtggcctgttagggtcatgggtcggggggtcttgcgttatctgagagtggtgggtgctgtgctccttctgtgctgtcccggggtcccaggacgtcctgggatcgtggtgcaggtgctggggctgggcagccggggacagagatggctcctgacccctccccgcaggtgcgcacacggtcagtgggcgagtgtgtcgagtactactacctgtggaagaagtcggagcgctacgactacttcgcccagcagacgcggctgggccggaggaagtacgtcccgtccggaaccacgtgcgtgcagccctccccagcagtaacgacaggcggccaccccgccgggggtgggcacgtgggcgcctgggcggcacctcttgggtgggggcgtctgtcctgtctgccgcccctcatggcgccctctccccacagggacgcagaccaggacctggatggcagcgaccccgatggccccggccgtccgcgcccggagcaagacaccctgactgggatgcgcacaggtgaggcttggggagtatctcctgccctgggggcggccacgggtctggagccgtgagtgaggcccggtggagcctctcctgcctggcgccctgtgctgggccagcctcgccaggaggagtgggcgtctgggtggcggagggcagccacgtgatgtggatgccgctctgtacacctggctgggagaggggagggcagggattacgcttaccctctgggcttgctggaggggtgcatgtggccccactgctggggagccccgtatggtgaggttggggtatttaccaggcctcagtctccggggagggccttcctgccccagggtggggacttagcccgtcaccaggacactcaggaaggacagggtgtccggagccgtcgccaggatcttgcacctgaggccatgacggagcacagcagggcctcgggtagggaccatgtccgatggtggtgtctgatgtggcgtccgaaggtggagacccacacggggagggtgcaaacgaggatcctttgctttctggctctgtgtttagatggttgagtctgggagggtcccccatttccagagtctggttgtttccatggtttgtttgccaaagggtgtccacctcggctacttcctagaattgtggtgaggccccttgcgctgcctgtgggaacaaaacttccaaagaccctgtattagccctcgcagcgcccccggcattgtttacacctaagtctgtgtattccacagaccctgtatttaccctctgcagtgcccccggcattgtttacacctatgtctattgtattctgctctttttaaagatgtgggttgtgacccactgttggtctgatgaactaaaatctacttctaaagctgagacccttaacctggggctcgcggatttcagtgtaactggtgtcttttgtatttgtgtggaggcttttctggggagggatccacaggctttgctggacccagcaaagttaggcaggagcctgcacaggatccgcggctgtgggcaggccccaccctctgttgcgttctctttcacagatccactgagcgtggatggcacggccggtggtctcgatgagcccggagtggcctctgatggactcccgtcctcggagccagggccgtgttccttccagcagctggatgagtcccccgctgtacccctgtcccatcggcccccagccctggccgacccagcctcataccagccagctgtcactgctccggagccagacgccagcccaaggctggccgtggacttcgccctgcccaaggagctgcccctcatctccagccatgtggacctcagcggggatccggaggagactgtggccccagcacaggtggctttgtcggtcaccgagtttggactcatcggcattggggacgtgaaccccttcctggccgcccaccccacgtgcccggcccccgggctacactcggagcccctgtcacagtgagtgccaccccatgcccggagcctccgcaacactccaaccaggtccccccagccctcaggctgagcagaggagggtgggaggcatttgccccaaggacccgaggacagtgtggctccacgagcaggctctcagtgtgtctttaggtttattctttacttgtatgtattttttgactggagaatacattcatgtggtccacattctccacaaatgggagcaggtgccaggctgtcccacccctgctccagccaccagctcccctcagggcaccccgggcccggctgccataggctgtgggggaggcaaggctgggagtctcgagtccagcgctcagcactgggctgtgcaggcacgtggggccgcactgacactctctgcgtctctcttggtctctcccctgcagctgtaacgtgatgacctgctgactcctggccgcgggcggcgtatgcggcccagactggacttagcgctgccgctgggcccgcctctgtcagtcttcctgaccccttccccaccccccgggccttggggtagcacctccttctgcttcagaacacgtcaggactggggtgaggtggctgggccgtgagcccttgcccctgtccacacagaatggacccacggccccacccagcgccgtcagcgcccggcactgccacccgggtccgggccgctgcctgcacgtgggatccgtcgggcagccggggacagaagagaccccgtccgttgggacgcagggcagagccggccacctagtcccttccagccagcagaggcgagggaaggcgtcactgccccggcggggagacgggcaggacgccctgccccgcaccagcagcctccgccggggcgccctcagctccctgcttggctctgtctctccacacccggcagggccgcgggctgccccagccctgggggtcgtgggcagctgctactcagtgccaaccccgtggggcacagagccatatacctcgctgtccggcccccaccccagcctcgccttcccaccccatcgtctccacttcaggaaaagccgcactttacacccccacctgcctcttccccctccatccctgctccccgatcctgagcggttggggtggggtccctcagcaaccccaggcgtgggtttgaggagacaggtgatttacatcccctttgctgtcctcccccggtaccaaggcagggagcctccggaggagccggccctgctggccacgcaggggccagactccagcctgtttccccagccctgcaggtcttccttctgtgggaagcttcctagcaagatggcttggagtcctggtccccctcctccctggccctctcgttcgtttctgtttctgtttacacgttggagtggggtcctccgtgggcggcggcgcgccctgccccgggtgtcgtccggcctcttgtgctcgagcccctttccgagttggactcgaccatccctcaccccaccaaggaccacactgtgaagtgataactgccttgaacccccctttgctgttttaatttacttaaact

SEQ ID NO: 559 - DNA, 677 bp, Homo sapiens
tgcttttcaggcaacctgaaatggttttttcttcgagtacctgtaaagtactgactctgaagcaggagcgccttaatagttttataaactcaatcaatagaatgaattttttcttttctccctttctttctctctccttccttcctgcctttctttctctcccttcttttcccttcccttcccctcccctccctccctccctccttccctcccttccttccttccctccttcttggtcttgttctgtaacccaggctgcagtgcaatggcaaaatcatagctcactgtaacctcaaactcttgggctcaaggaatcctctggaaagctttttcaaagagatggtcgtaggtcttctcctcaaagatgtttaaaaatgggatcaggctgggctcagttgctcatgcttgtaatcccagcactttgggaggccgaggcaggcagatcacatgaggttgggagttcgagaccagcctgaccaacatggagaaatcccgtctctactaaaaatacaaaactagccaggcgtggtagcacatgcctgtaatcccagctatttgggaggctgaggcaggagagtcgcttgaactggggaggtggaggttgcagtgagccaagatcgcaccattgcactccagcctgggcaataagaatgaaacaccatctcaaaaaaaaaaaa

SEQ ID NO: 560 - DNA, 677 bp, Homo sapiens; identical to SEQ ID NO: 559

SEQ ID NO: 561 - DNA, 339 bp, Homo sapiens
aatgactggcaagagtgaagagaaaatctctggcaaggagaggctagtgagggttggagaggagacagcagaacagatgagagttggggtaccttatgaaaaagggaattaagtgaaaaaaataataatggatgttgagattctccactccccgccttctactcccccaccacttccgaaccttgttgctcctctccaaatggctggcagcttgcatatttttagggcagggctaagtggcacagctcctgaggagtctttcatacacatggttatgggaatgacgtcccctggagtcatgcagggtctagtttgcactgtcatacgtaaaggtcccgg

SEQ ID NO: 562 - DNA, 10149 bp, Homo sapiens
cggctctgctccactctgctcagctccgctccaggaaggccacctcctcctccccctcctcctcccgctgtcaccactcaccgctcataacctcaagggggtggggaccccagggctggacacaccccaccgtggccccagagctcagccggtcgcacggacggacagttggaagccggaccccagagcctgaggtgggcagtgtgccagggtcccttgcggcctcctcaaggtcagtgccagctggggatgcagctactctggggctcttgagacttgtggggcacaccccaggccctcatcccaaatcacaggccccaaaaggggctttacccccggggcatctggggcaggcaggaccaggggaaagggtatgcccccgtgtccacaggccagccctggtctgggggtctatcaggagaggccccaggctgggggccagctccttgcagaggcctcactggggacaccccgcaccggccatggggagctaaaattggaaagtggcgagtgggaggcagctgacaaagctatttcacgggctcttcaccatgctccggtttcaagctcctgctccattaacctgatccccagggcctctccacccccacccaactgatgaggaggtgcctccaccctcaggccgacagcacagccatcaggctggcagcctctgctgtgggcaggggcagtggtggtcttctcttaccccagattccagaggggggtcactgagaaacccaatcctgaagggaggcaggcagaagtctgtcccaggtctgccatgtgaccttgacaggtccctgcccctatctggcccatgacccctccatctgtacgaggagaccgtcggctgctggggggcccaggggagatggctacagggctggggatgaagatttaggggaggatcaagggtgggcaaaagggccacatcagccacctcttggccccgtcagcccaagagttgcctggacatgttccctgcttcctccctttaatttgggtcctatgtctgtatccatggagtccttgggaagcccctgagccaggctgaagcgggataggaagggtaaaggtgctagctgagccgtagtacggcccagcagttctccaggggacaagctaggcccccgctggagggagtggtgagactcagccggggcctgattctggtcagcaccttggacagcagccagtgccctccctggccccgcctggccccgcctggccccacatccgctactcctgggcacctcctcaaatagcacagcctccagctggtgcccagggcctgaatacacagagcgctgagagagtggggcagtgtggtcacggacacaggcagggactgggatgtgacaggctggagctcagggacttgttgggggaatgggggtcagtgacaggctggaggcttaatgcgaggatggaggcttggctctaggggcagcacctggggtggtcatgggatctcagggaggggagtgggagtcagagaaagggtcttagagaagctggggctttgtgaggagctaagggagactcactgatcgaggtggggaccctgcaggcagaaacctgactgtagtgatagaggtggggtttctccgcacgcaggtcatgggggccttggcaggagcggttttggcagagggtggggccggtgcctctggaaggtatgaagatgtaaatgaaggtgagggaggcaggctgcgagtgagggctctgcgggcaagagccttgatgggtggggtgggggcaagagcagcagctgggatggggcactggtgttcggtggcctgtgaactgtggggggcacaggggcaggcagagtgatggtacaaggtccccaaggggctggaggggcaatctctcttcagagtgggtccccactggggtggtgggaccatgaggtggggctaggcttggctggagactgtaattccctcacccaacctgtctccccagccctgtccaggctatgggcatcaagacagcattgccggcggctgagctgggcctctactctctggtgctgagtggggccctggcctatgctggccggggcctccttgaggcttcacaaggtaatggctgtgccccggggcaggtggacaggacccttcttcccctggaggcctcagggttccaaccagcaaagccagaaagttacaggctccagacctagggtactccttctagaacacggctggatctcccttttcagcccggggttcccatctcagatagtcactggaggctgggtggagccaggttcagtcacaggaacacagagatgcagagacactgacagagagatggacacagagtcacacacatagacacacacacacacacacacagaggcctggacccagacacacacacacagagacctagacccagacatacacacacacacatcccgacacacacacacacacacagagacctagacccagacacacacacaaacacacagacatatacacacaccccccaacacacacacacacacatacacacacagagacctggacccagacacacacacacagagagagacctggatgcagacacacacacaaacacacagacatatacacacacaccccaacacacacacacacacacacacacacagagtcctggacccagacacacacacacagagacctagacccagacatacacacacacacatcccgacacacacacacacacacagagacctggaccccgacacacacacaaacacacagacatatacacacacaccccaacacacacacacacacacagagtcctggacccagacacacagcgagacccagaaagaagcagatgcagcaccaaagagactcagacccgtgccccgttcctgatgccctcgctccccagggtggggcagccttgtccacgggggaaggtggggcaggggatgtgaaggcccctctccctgaggccacactctgttctcagatggggcccacaggaaggccttccgggagtctgtgcgacctggctgggagtacattggccggaagatggtaggtcccccacatcccagggtccctcccatcccgaacccttctctgctctctgctgttccagatgttggcaagtaacagagagcttctcacagctctggggcctctggcttgagcttcagtgccttcagcttctttactggcccctcctgtatcctcctgggacatcaagtttgcccgggccctgctcacttgggaaataggtcgcattagtggagtgtgcttcagtggagcctccagcacctccttcccagaaacaaagcagtaaagggggaatggcaggcaacgtgcggaggagagggggagcttcaagcgacccggcagcccccatggtgcccttcactcctctctaccctcctgcctcggtacttccttcacagaggagtgtggagacctgcaggcactgctcttgtgtttgcataaagaggacacgttgggtttggctagtggtaaaaaataattattattattaaatttaaaaatgataataataaaagaagaacatgaaggctgggaaaggtgctggggctctgaccagcccaggttccagctcgtcctgtcccctctcccaccctcacctgccccacctccttctgccccggactgccccaggatgtggctgacttcgagtgggtgatgtggttcacctcctttcgcaacgtcatcatctttgccctctccggacatgtgctgtttgctaaactctgcacgatggttgccccaaaggtgagctggacctgggccacccagcctctccctgccagctcctctttcaccacaagggttgtgggaaccccctcctggggtcacgcccccatttatatggcgaaactgaagccttctccctgcccacagctccgctcctggatgtatgctgtgtacggggccttggctgtgatgggcacaatgggcccttggtacctgctgctgctgcttggtcactgtgtgggcctctatgtggcctcgcttttgggccagccctggctctgtcttggccttggcttggccagcctggcctccttcaagatggaccccctaatctcttggcaggtgtgaactggtgcaggggtagagggtgtagggataagatcccaaacctctcacttcatccaaagtccttgcaccccaagtatccccaagtattcccttcactttccacctgtcttcaagcctttgggtatgtcctggccacaaggtgagcacctgcatcacaggaggaactatccagatcatcccctgctcctcgcattgctgggatagagcagtggccaaagttaactggctctggaagagaggaagggacaggaccaggctgggcccctgtgggaagctagggagtggggaataggttttccagagacaggaggcaccctagtgagctggtggcctgttctttccccctccagagcgggtttgtaacaggcacttttgatcttcaagaggtgctgtttcatgggggcagcagcttcacagtgctgcgttgcaccagctttgcactggagagctgtgcccaccctgaccgccactactccttagctgacctgctcaagtacaacttctacctgcccttcttcttcttcgggcccatcatgacctttgatcgcttccatgctcaggtgaggggacaccctgtgggcttctagaacagggctgaatctcccttttcagattggggtttccatctcagatagaattccccaagcaggctgtatccccatcctcaggcatgattccaggatgaagccgtgtctcccctccctcctcagaccccaggatggggccacctttcccctccagcagggaccccagggtggagacatgtctcttttctcagacaggactcccaggccacgaatgttcccttcccactcaaatggggctcccaggacagaactgggtctcccatggctggctgtgaatcctcctcagactccagggtgacctctgtctccaccctcaggcaggactcctggataaagccatggctcctcctgccccaagtagttggtgagcccccctcagacagggctccccaggcagggcttgcctcttccctcagacccttcgcatccccccaggtgagccaggtggagccagtgagacgcgagggtgagctgtggcacatccgagcccaggcaggcctaagcgtggtggccatcatggccgtcgacatcttctttcacttcttctacatcctcactatccccagcgacctcaagttcgccaaccgcctcccagacagtgccctcggtgggtccacagaagagaaatgggggcagggctgccgccccaggaaaacagaccctctgcacccccacggtgccacagtcaggggagctgaggcacgcagggcacagcacctgagggcgtgggagcaggggcttattctttctaatgcatgggtcttggcattagcttcatcctgtggggccagagcagcatcccacggaccccacccacttcaccaggcatgactgatttccacaatatgggggggtctccgtggggcgggcagagcctggtgtctccccaaggaagtggtgggacagggtcttcatgggggcaggccccaggcgattggaccccaggcagtgacagtgccctgcccccagctggcctagcctattcaaacctggtgtatgactgggtgaaggcggccgtcctctttggtgttgtcaacactgtggcatgcctcgaccacctggacccaccccagcctcccaagtgcatcaccgcactctacgtctttgcggaaacgtgagtgctggccaggacgggggaggctcaccccctgggaccacaccttcccctagcctcttcccccatgcctggggagctctgcgcctgatggcaacatgcccatctgctttcctcttacaggcactttgaccgtggcatcaacgactggctttgcaagtgagtaggagtggggtgggggtggtcacagccatcctgccaggtgtctgagcagggcagtgccaagatgggtccacattttaaaagatcacccctgggccaggggaagcaaagagggcagtgaggaggtattggcagaggtctgggtgaaagatatagaagttaggatttaagtgagggccctcgaggtggagagaggtggtgggaggagggtcacacagtcagcagcctgaacaggacgtggccatgaactgtgggtgttgggaaggagaaggagatgacgctcaaattgctgtctgcagcctgggaggatggagggcagtttccagagagggcttcagtttaagaaatgtatagtcgcaatctaggagacatccctgtggaggttcagggaggtggttgggtctgagggtctgggtttctgagggtccagaggactgatggaactcagagcgtcctgagtgtgggcaggtggtttttaggctttgggagtgggtaagtcctcaggagagggagtggtgtgagaagaggagagacggggatggccgagattcagcctgcaagagctctgcttggaaggaaaaggagccagcagaaaggactggaaagagtagttggaggggcaggagaagaatcaaggtcatgtgccaccctggaagccaagggaagaccatccaggcatggtggggacagcttggtcagatgccactgagcctcaaggaagctggagaccgaggattagtgctggtgacatggaggttttcagcctttcatgggcaaggcaggagcaggtaaggagggaaagtcaactgaggagtagagaagtgtgtgatgactcctggaagaagcctgggactgcagggggaagacaggagtggctgagggagaagagggatgtgttaaagataggagagaatgggacatgctaagaagaattattcaacagagaagctggggatgcaggatacaggggtgattgatggagtgaggtccctgaagaggaaggaggtgagggtgtctagttccaggcggaggcctggcttcagtgggaggaggaggaagagaagccagtgtggatgcagaggaaagcaggttaatgtagacaagtaagggattccacctgaaggcttcagccttgtccatgaagcaggaggcacggccatcagctgagaaagccaggacagggacgtggagagaggcaacatatatgcttacccccacaacccagcctggatccccccactcatactatctctccactcatacttgtggggagataagaatacagtggcccttgcagagcaagggagaagcagctgactagagaaatcttggcactgagtacccaggtggtattggaggtggtgggcttatgaactccagcatgtgaagatgtgagatttcccccatggggcttagctgcctgggtgtagctgaggagaaagtaagtgattgggctctcccagatggatgacaaggaagaagtcaggaataagggtttttagattatttatagtcatgactcattggatataagcctgctaaggacggtggtgaaggtgggagggtcacaagatcaatgggattgaagaactgaagctggggggccaggaggtcaagaggagttgggcaaagaatgggaattagaaaggagtgaactttcaagtggtgacaaagttggggcatggccatgggtgtgggtggctgaggtggagtggagaaaaagccattggaaatgaggaggtcgaggaatggagaggctggttattcctgggtcttccacagaacttatttaacaaatatttattgagcacctatgtgccaggcattgttctaggcactggggatacagcagtgaacatggcaaagaccctgaactcatggagcttacagtctagtggggagaaacagaccataaacaggtaaacaaacataaataagataattttagagagtggtaagtgttatgaagaaaataaaattgcaatgggatagaagttgacaacagggtagaagcttctttagtcggggtctaggcaggcttctctgaggagatgatatttgaattgagatttgagtgataaggagatgtggagcagagaataccaggtagagggaacaacaagggcaaaggccttgagacacaaaccaactgtgtgggtgtaaaggtaagaaaggccagtgaggccagcatgatgaactgggggagcatggtggctgatttggtcaggaagggaacagaaaccagaccacttgggatcttctagccagagtaaagagactgagtttattcctattgtaatggggagctattcagagaggttaatcatggaagtgatgtgacctgagctacactcttaaaagatgcctctggctgctgtgtggagaatgaaccatgggggcaaaagcagaaacaagaagaccacttaagaggctcttgcaataatttatgtgagaagagtgatcatcttgactagggtggtggtggtagaggaggtgagtggtggtcaggactgagaggagccaacagaatttgctggcttgcttggatgtgggtgatgaggcaaactgagaatccaagatggcaccaaggcttataccctgagcaactgaatggatggtggtgccattcactgagatgaggacggagctgggtttgagcagggataggggaatctgtcaatcaagtgacatggctagtagcaattgcatatacaaatcaggagagactgggctaaagacacagatttaggggtcatcgtcatagagctagtacttgaaatcttgggtctggatgagatcatttgggaagtaaacgaacagagatagagaagctataatgtcccaggctgagcctgccacaatttgaagttggttggaggaggagctgctacgtgaggtcaggaatgttgaatgcacccagggtgacagtgttgaggaggacgccctgttgtgtgtcctctcccatctcatccctgccctttcccacactcccagtggcccttctcccatctttcctgcagatatgtgtataaccacattggtggggagcattccgctgtgatcccagagctggcagccacagtggccacatttgccatcaccacactgtggcttgggccttgtgacattgtctacctgtggtcattccttaactgctttggcctcaactttgagctctggatgcaaaaactggcagagtgggggcccctagcacgaattgaggtgagcagggaagacctggggctgggactggctgggtcatagagggcgggggggcactgctgctttctggagttgtccaaacacctggcccctaatccagaactttctcaccaccaccctcttagttgtcagagcaatggctcactctgtaggaatctgcccctccctcccttctatgaggaatggagcacctgggccttgccatgttggtcaggccttgtcctctctctggacctgtttccccatgtttaacaaggagggagagctgacctggggctctccgagacccagacatagccccaagacctgactggccaggtgggtaaggctgctgacccaccatgtcctctttcctttggcctcttgtcccgctgcccatgctttcctggaccggataggcctctctgtcagtgcagatgtcccgtagggtccgggccctgtttggagccatgaacttctgggccatcatcatgtacaaccttgtgagcctgaacagcctcaaattcacagagctggttgcccggcgcctgctactcacaggtgagggacaggggtgtggggatacagaaggtgccaggcatcagcctcaaggaccgtgaccttccaaaatgcctcctatctccctcatcacccctgggactcagaagggagggcccatcaagcggggagaggggtgggaagacaaaagtcgctgaggatgcagtgctgctcctgagcatctatgactccctccccacacagggttcccccagaccacgctgtccatcctgtttgtcacctactgtggcgtccagctggtaaaggagcgtgagcgaaccttggcactggaggaggagcagaagcaggacaaagagaagccggagtaggagggagcgggtagagggatgggctctgctcagctattcttgggccagatggggcctgaccgatagaataaaagacttttctacaacag

SEQ ID NO: 563 - DNA, 10146 bp, Homo sapiens
cggctctgctccactctgctcagctccgctccaggaaggccacctcctcctccccctcctcctcccgctgtcaccactcaccgctcataacctcaagggggtggggaccccagggctggacacaccccaccgtggccccagagctcagccggtcgcacggacggacagttggaagccggaccccagagcctgaggtgggcagtgtgccagggtcccttgcggcctcctcaaggtcagtgccagctggggatgcagctactctggggctcttgagacttgtggggcacaccccaggccctcatcccaaatcacaggccccaaaaggggctttacccccggggcatctggggcaggcaggaccaggggaaagggtatgcccccgtgtccacaggccagccctggtctgggggtctatcaggagaggccccaggctgggggccagctccttgcagaggcctcactggggacaccccgcaccggccatggggagctaaaattggaaagtggcgagtgggaggcagctgacaaagctatttcacgggctcttcaccatgctccggtttcaagctcctgctccattaacctgatccccagggcctctccacccccacccaactgatgaggaggtgcctccaccctcaggccgacagcacagccatcaggctggcagcctctgctgtgggcaggggcagtggtggtcttctcttaccccagattccagaggggggtcactgagaaacccaatcctgaagggaggcaggcagaagtctgtcccaggtctgccatgtgaccttgacaggtccctgcccctatctggcccatgacccctccatctgtacgaggagaccgtcggctgctggggggcccaggggagatggctacagggctggggatgaagatttaggggaggatcaagggtgggcaaaagggccacatcagccacctcttggccccgtcagcccaagagttgcctggacatgttccctgcttcctccctttaatttgggtcctatgtctgtatccatggagtccttgggaagcccctgagccaggctgaagcgggataggaagggtaaaggtgctagctgagccgtagtacggcccagcagttctccaggggacaagctaggcccccgctggagggagtggtgagactcagccggggcctgattctggtcagcaccttggacagcagccagtgccctccctggccccgcctggccccgcctggccccacatccgctactcctgggcacctcctcaaatagcacagcctccagctggtgcccagggcctgaatacacagagcgctgagagagtggggcagtgtggtcacggacacaggcagggactgggatgtgacaggctggagctcagggacttgttgggggaatgggggtcagtgacaggctggaggcttaatgcgaggatggaggcttggctctaggggcagcacctggggtggtcatgggatctcagggaggggagtgggagtcagagaaagggtcttagagaagctggggctttgtgaggagctaagggagactcactgatcgaggtggggaccctgcaggcagaaacctgactgtagtgatagaggtggggtttctccgcacgcaggtcatgggggccttggcaggagcggttttggcagagggtggggccggtgcctctggaaggtatgaagatgtaaatgaaggtgagggaggcaggctgcgagtgagggctctgcgggcaagagccttgatgggtggggtgggggcaagagcagcagctgggatggggcactggtgttcggtggcctgtgaactgtggggggcacaggggcaggcagagtgatggtacaaggtccccaaggggctggaggggcaatctctcttcagagtgggtccccactggggtggtgggaccatgaggtggggctaggcttggctggagactgtaattccctcacccaacctgtctccccagccctgtccaggctatgggcatcaagacagcattgccggcggctgagctgggcctctactctctggtgctgagtggggccctggcctatgctggccggggcctccttgaggcttcacaaggtaatggctgtgccccggggcaggtggacaggacccttcttcccctggaggcctcagggttccaaccagcaaagccagaaagttacaggctccagacctagggtactccttctagaacacggctggatctcccttttcagcccggggttcccatctcagatagtcactggaggctgggtggagccaggttcagtcacaggaacacagagatgcagagacactgacagagagatggacacagagtcacacacatagacacacacacacacacacacacagaggcctggacccagacacacacacacagagacctagacccagacatacacacacacacatcccgacacacacacacacacacagagacctagacccagacacacacacaaacacacagacatatacacacaccccccaacacacacacacacacatacacacacagagacctggacccagacacacacacacagagagagacctggatgcagacacacacacaaacacacagacatatacacacacaccccaacacacacacacacacacacacacagagtcctggacccagacacacacacacagagacctagacccagacatacacacacacacatcccgacacacacacacacacacagagacctggaccccgacacacacacaaacacacagacatatacacacacaccccaacacagacacacacacacagagtcctggacccagacacacagcgagacccagaaagaagcagatgcagcaccaaagagactcagacccgtgccccgttcctgatgccctcgctccccagggtggggcagccttgtccacgggggaaggtggggcaggggatgtgaaggcccctctccctgaggccacactctgttctcagatggggcccacaggaaggccttccgggagtctgtgcgacctggctgggagtacattggccggaagatggtaggtcccccacatcccagggtccctcccatcccgaacccttctctgctctctgctgttccagatgttggcaagtaacagagagcttctcacagctctggggcctctggcttgagcttcagtgccttcagcttctttactggcccctcctgtatcctcctgggacatcaagtttgcccgggccctgctcacttgggaaataggtcgcattagtggagtgtgcttcagtggagcctccagcacctccttcccagaaacaaagcagtaaagggggaatggcaggcaacgtgcggaggagagggggagcttcaagcgacccggcagcccccatggtgcccttcactcctctctaccctcctgcctcggtacttccttcacagaggagtgtggagacctgcaggcactgctcttgtgtttgcataaagaggacacgttgggtttggctagtggtaaaaaataattattattattaaatttaaaaatgataataataaaagaagaacatgaaggctgggaaaggtgctggggctctgaccagcccaggttccagctcgtcctgtcccctctcccaccctcacctgccccacctccttctgccccggactgccccaggatgtggctgacttcgagtgggtgatgtggttcacctcctttcgcaacgtcatcatctttgccctctccggacatgtgctgtttgctaaactctgcacgatggttgccccaaaggtgagctggacctgggccacccagcctctccctgccagctcctctttcaccacaagggttgtgggaaccccctcctggggtcacgcccccatttatatggcgaaactgaagccttctccctgcccacagctccgctcctggatgtatgctgtgtacggggccttggctgtgatgggcacaatgggcccttggtacctgctgctgctgcttggtcactgtgtgggcctctatgtggcctcgcttttgggccagccctggctctgtcttggccttggcttggccagcctggcctccttcaagatggaccccctaatctcttggcaggtgtgaactggtgcaggggtagagggtgtagggataagatcccaaacctctcacttcatccaaagtccttgcaccccaagtatccccaagtattcccttcactttccacctgtcttcaagcctttgggtatgtcctggccacaaggtgagcacctgcatcacaggaggaactaccagatcatcccctgctcctcgcattgctgggatagagcagtggccaaagttaactggctctggaagagaggaagggacaggaccaggctgggcccctgtgggaagctagggagtggggaataggttttccagagacaggaggcaccctagtgagctggtggcctgttctttccccctccagagcgggtttgtaacaggcacttttgatcttcaagaggtgctgtttcatgggggcagcagcttcacagtgctgcgttgcaccagctttgcactggagagctgtgcccaccctgaccgccactactccttagctgacctgctcaagtacaacttctacctgcccttcttcttcttcgggcccatcatgacctttgatcgcttccatgctcaggtgaggggacaccctgtgggcttctagaacagggctgaatctcccttttcagattggggtttccatctcagatagaattccccaagcaggctgtatccccatcctcaggcatgattccaggatgaagccgtgtctcccctccctcctcagaccccaggatggggccacctttcccctccagcagggaccccagggtggagacatgtctcttttctcagacaggactcccaggccatgaatgttcccttcccactcaaatggggctcccaggacagaactgggtctcctatggctggctgtgaatcctcctcagactccagggtgacctctgtctccaccctcaggcaggactcctggataaagccatggctcctcctgccccaagtggttggtgagcccccctcagacagggctccccaggcagggcttgcctcttccctcagacccttcgcatccccccaggtgagccaggtggagccagtgagacgcgagggtgagctgtggcacatccgagcccaggcaggcctaagcgtggtggccatcatggccgtcgacatcttctttcacttcttctacatcctcactatccccagcgacctcaagttcgccaaccgcctcccagacagtgccctcggtgggtccacagaagagaaatgggggcagggctgccaccccaggaaaacagaccctctgcacccccacggtgccacagtcaggggagctgaggcacgcagggcacagcacctgagggcgtgggagcaggggcttattctttctaatgcatgggtcttggcattagcttcatcctgtggggccagagcagcatcccacagaccccacccacttcaccaggcatgactgatttccacaatatgggggggtctccgtggggcgggcagagcctggtgtctccccaaggaagtggtgggacagggtcttcatgggggcaggccccaggcgattggaccccaggcagtgacagtgccctgcccccagctggcctagcctattcaaacctggtgtatgactgggtgaaggcggccgtcctctttggtgttgtcaacactgtggcatgcctcgaccacctggacccaccccagcctcccaagtgcatcaccgcactctacgtctttgcggaaacgtgagtgctggccaggacgggggaggctcaccccctgggaccacaccttcccctagcctcttcccccatgcctggggagctctgcgcctgatggcaacatgcccatctgctttcctcttacaggcactttgaccgtggcatcaacgactggctttgcaagtgagtaggagtggggtgggggtggtcacagccatcctgccaggtgtctgagcagggcagtgccaagatgggtccacattttaaaagatcacgcctgggccaggggaagcaaagagggcagtgaggaggtattggcagaggtctgggtgaaagatatagaagttaggatttaagtgagggccctcgaggtggagagaggtggtgggagagggtcacacagtcagcagcctgaacaggacgtggccatgaactgtgggtgttgggaaggagaaggagatgacgctcaaattgctatctgcagcctgggaggatggagggcagtttccagagagggcttcagtttaagaaatgtatagtcgcaatctaggagacatccctgtggaggttcagggaggtggttgggtctgagggtctgggtttctgagggtccagaggactgatggaactcagagcatcctgagtgtgggcaggtggtttttaggctttgggagtgggtaagtcctcaggagagggagtggtgtgagaagaggagagacggggatggccgagattcagcctgcaagagctctgcttggaaggaaaaggagccagcagaaaggactggaaagagtagttggaggggcaggagaagaatcaaggtcatgtgccaccctggaagccaagggaagaccatccaggcatggtggggacagcttggtcagatgccactgagcctcaaggaagctggagaccgaggattagtgctggtgacatggaggttttcagcctttcatgggcaaggcaggagcaggtaaggagggaaagtcaactgaggagtagagaagtgtgtgatgactcctggaagaagcctgggactgcagggggaagacaggagtggctgagggagaagagggatgtgttaaagataggagagaatgggacatgctaagaagaattattcaacagagaagctggggatgcaggatacaggggtgattgatggagtgaggtccctgaagaggaaggaggtgagggtgtctagttccaggcggaggcctggcttcagtgggaggaggaggaagagaagccagtgtggatgcagaggaaggcaggttaatgtagacaagtaagggattccacctgaaggcttcagccttgtccatgaagcaggaggcacggccatcagctgagaaagccaggacagggacgtggagagaggcaacatatatgcttacccccacaacccagcctggatccccccactcatactatctctccactcatacttgtggggagataagaatacagtggcccttgcagagcacgggagaagcagctgactagagaaatcttggcactgagtacccaggtggtattggaggtggtgggcttatgaactccagcatgtgaagatgtgagatttcccccatggggcttagctgcctgggtgtagctgaggagaaagtaagtgattgggctctcccagatggatgacaaggaagaagtcaggaataagggtttttagattatttatagtcatgactcattggatataagcctgctaaggacggtggtgaaggtgggagggtcacaagatcaatgggattgaagaactgaagctggggggccaggaggtcaagaggagttgggcaaagaatgggaattagaaaggagtgaactttcaagtggtgacaaagttggggcatggccatgggtgtgggtggctgaggtggagtggagaaaaagccattggaaatgaggaggtcgaggaatggagaggctggttattcctgggtcttccacagaacttatttaacaaatatttattgagcacctatgtgccaggcattgttctaggcactggggatacagcagtgaacatggcaaagaccctgaactcatggagcttacagtctagtggggagaaacagaccataaacaggtaaacaaacataaataagataattttagagagtggtaagtgttatgaagaaaataaaattgcaatgggatagaagttgacaacagggtagaagcttctttagtcggggtctaggcaggcttctctgaggagatgatatttgaattgagatttgagtgataaggagatgtggagcagagaataccaggtagagggaacaacaagggcaaaggccttgagacacaaaccaactgtgtgggtgtaaaggtaagaaaggccagtgaggccagcatgatgaactgggggagcatggtggctgatttggtcaggaagggaacagaaaccagaccacttgggatcttctagccagagtaaagagactgagtttattcctattgtaatggggagctattcagagaggttaatcatggaagtgatgtgacctgagctacactcttaaaagatgcctctggctgctgtgtggagaatgaaccatgggggcaaaagcagaaacaagaagaccacttaagaggctcttgcaataatttatgtgagaagagtgatcatcttgactagggtggtggtggtagaggaggtgagtggtggtcaggactgagaggagccaacagaatttgctggcttgcttggatgtgggtgatgaggcaaactgagaatccaagatggcaccaaggcttataccctgagcaactgaatggatggtggtgccattcactgagatgaggacggagctgggtttgagcagggataggggaatctgtcaatcaagtgacatggctagtagcaattgcatatacaaatcaggagagactgggctaaagacacagatttaggggtcatcgtcatagagctagtacttgaaatcttgggtctggatgagatcatttgggaagtaaacgaacagagatagagaagctataatgtcccaggctgagcctgccacaatttgaagttggttggaggaggagctgctacgtgaggtcaggaatgttgaatgcacccagggtgacagtgttgaggaggacgccctgttgtgtgtcctctcccatctcatccctgccctttcccacactcccagtggcccttctcccatctttcctgcagatatgtgtataaccacattggtggggagcattccgccgtgatcccagagctggcagccacagtggccacatttgccatcaccacactgtggcttgggccttgtgacattgtctacctgtggtcattccttaactgctttggcctcaactttgagctctggatgcaaaaactggcagagtgggggcccctagcacgaattgaggtgagcagggaagacctggggctgggactggctgggtcatagagggcgggggggcactgctgctttctggagttgtccaaacacctggcccctaatccagaactttctcaccaccaccctcttagttgtcagagcaatggctcactctgtaggaatctgcccctccctcccttctatgaggaatggagcacctgggccttgccatgttggtcaggccttgtcctctctctggacctgtttccccatgtttaacaaggagggagagctgacctggggctctccgagacccagacatagccccaagacctgactggccaggtgggtaaggctgctgacccaccatgtcctctttcctttggcctcttgtcccgctgcccatgctttcctggaccggataggcctctctgtcagtgcagatgtcccgtagggtccgggccctgtttggagccatgaacttctgggccatcatcatgtacaaccttgtgagcctgaacagcctcaaattcacagagctggttgcccggcgcctgctactcacaggtgagggacaggggtgtggggatacagaaggtgccaggcatcagcctcaaggaccgtgaccttccaaaatgcctcctatctccctcatcacccctgggactcagaagggaggcccatcaagcggggagaggggtgggaagacaaaagtcgctgaggatgcagtgctgctcctgagcatctatgactccctccccacacagggttcccccagaccacgctgtccatcctgtttgtcacctactgtggcgtccagctggtaaaggagcgtgagcgaaccttggcactggaggaggagcagaagcaggacaaagagaagccggagtaggagggagcgggtagagggatgggctctgctcagctattcttgggccagatggggcctgaccgatagaataaaagacttttctacaacag

SEQ ID NO: 564 - DNA, 802 bp, Homo sapiens
actttgagcaacaaccaaacaaaaaaagtctgaaaattgaaaagggactcagatttgagagaattgtccccactccccaccatatctttcctagtggcccttgtggcatttgggaagctggccccagggccaagtgctggtcttagctcagtcagcttcctgtccctcacgtgggctggccttgccaggtgccctcccctgccacccccctcagacacagtggagctggcctcaggctgtccaaccacagatccatgggacttccctagccctccacccctcttgccatttccgcacaccacactccctgcagaccctgctgtgtgtgggtcacccagggaaggcctcacttctgagtgtgaatccagcctttctgggcctctgggggtcagggtgtctgtggctctctaatagcctctgtttatgagcaaggctcttgtcatggagtgaatcaccggatgccccctgccaccccagtgagggccagggccagcggtatgcccattttacaactgaggatctgaggccctaagaagtgggtcacaccagctcagggtcaagtaaattggctgaacctgtgttcttaactctggggtcaaaccaccctgtctgctcccttgagccattttcttggagcctcgtgagggccccagtgtgggtgcacggggttgtcgcccctgcagggcagtcagtgccaggagcttacagggctgatccaactacttggcttcctcatgtgccaggtccttcttctcccaactgcgtacagtggcaacatcttccctatgggctgtggtgacat

SEQ ID NO: 565 - DNA, 6150 bp, Homo sapiens
gacaccagatggagagcagagaccatcgaccttggcagcccaacagcagaacactgaagccccaagtcttcaacacacctgctcactgactcttggagcactgatgcagaccctgagctgcttgctcagaaggcactttattcttcctaaagaaggagacatatctgcactgtacactgcacttgatggggatgctcccatcggaaagacgagaaggctgagtcctgtggggaactttgccagcacactcagctaggctggggcagggccagcacacggcctgggataccgccctgtggttctggttcatggatcaagacaacctagggggatatggcaacactggagaagcctctagtttctcacccttgcccaaaagtccaggactaagcagcacttccctttccttggctgacgcagcccctgaggcaccataactggatccaggtagactctggcctctcctagcctcttttctggagcccccacaaggccaggccagtgagggtcgcaggatgggaggggtgcttagttcagtctgcctgagctggtcacatcttagtcaggcacagcacattgagccgcactggtaggaaggtggcacctgctgcataggcgatctcccgcaggacaccctcccatttcttctcctcctcgttatacctggggatgagagagagtggggacaaggatggagagcttggtcagctgagtccagagtggaacgcagcagagaggggtggctgagggcacttggcccatctctagggagatctgctcctgaaaatccccaggctctgggaaaggagaccccccacaagacccaccccaaggaacacccaccccacactccaggaagggtctttctccccaggaaagatcacctctcaaggggtgttcccatattcctcaaagttcccctccaggaaggtctacactgcccacaccaccccatcaatgtcctctccttgagaatttccatgctccatttctactaagtctcacgtctcagcctccggcagcactgctccccaggggctgcctgcagcagtgcagatggctgcaggttcaggaaggagatgccccagaggctaaagtttccttctcccacccccacaaaggaccagccatagagagcaatggttctgaaaggccagggctccaactgtttcccagccctagtggcagccctccctccagaccaagcacccggaaggcaggagagaagaaaatccggctgctatttgggccctgtttctgtgagtctatgacctaagcttgggtctgctcccatctgcaacactgttgctgctccacagtggggcatggtgtcatctgtgcaagcccagactttcccaacaaactggtgagaaacggccaagcagggtatgttggctattcctccctacaggactccctagaagagggatccgctttgcccccagaggagcttgcccagtgccttggtaccccaccatggtgctatggggtgtcagccttgctcatgatgcccccttgcctccccagggtgggactcacctccagatgtcattgagctctgtgggaaccagctctccagactccgtctccagtgtggcaaagccaccaatggcatagagggtacccaccaggctgaccaggctgagtgagctacgctcctgtgggaaggcctcgaagggtgcccacctgggggtgtgtgagaaggtgcatcattgggatgcctcggcaagcccagtgactgtccctgccacccagcacccacagctccaactgcaaccctttgcaatccaagtcccaggcacccatgcccccaaccccattccccttccctgtccctctggtcttcccttccttccccattctcttgctcctccactttcctttccttgtcctcttgccattctatccaacctgtccagcaaagtccaccatggatctccccactgcccctactcctctcctgaactaactccaccctccaactcacaaccccagcccctagcaggcccccagccttgccctggacgcagtccttttgcccctcagcggcccctgcagccccacccaccttgcacacctgctctatccttcttctcccttcacagcccagttgttctcaatgtatcttcgctaccctggctcctgccttgggccttagtcccatcctccaaaactgaccttcctgaggtccacagtcactgcacacgcactgaggtcctacagcacacagccctgctgacgtgactttcctcacccatctcttcggcctcaccttcgtggcctccttcctggataatgcagctgcctccaccatcagggcttggacctcagctcctcccatttacactctctctcctgagggagcttggcccctccgtgtgctactgacccccagatctctccctccagctcagccctctctctcccgggtggggtccttttggacacccccaggtacttcaagtccacatgtcctaactggaccctcactttccctacccaatcccaatgattatccagtaaatggcctcccaccctcactcagaagcatgtacttctccccctctcacccccacatccaatcaatagctaagccctgtttctcccacctcctagactcttgctactcaaagtgtggttcatggcccagcagcgtcagcatctcctgggggtgcgttagaaatgcagacttacaggctttcagccctccgcataccgagaatcagaatctgcactttaaggcgatccccaggagatttgcatgcccatcacagtgtaagaagccctggcctgtctttgtccggtgcatcccctcaaccccatctccgctgtgcccccagctccaggcctttatcacccctgaccttcctgacccctgggaaatccctaatctgctctctatatcagttgccatgaagtactttagtagaacacagatgagatacagtccctctcctgctggcccccgctccagccccagcaccgccatcccaactccatcacccacccacctccacccagctggagcaacaccttccctcctataggccttgagttttttctccaaactgcctcagcaccacctttccttagtctggggcaacctcctcccaccaccctcaccccttttgcgagctgagtccaactgtctctcagttcagttttctcttttctgatgtcccaggcagggcagcttctgtcttgttcactgctatatcccttgcaccaggccattgcctggtatgagtccctgaatgaggaacctggcatcccctcccccagccctgggagccccctcctgcagaccaggctggccataacccttgccccgcctccccacctcactgctgatcaggagagaaagcctatttctatactgatgtccaaagtcaacactggagacccaagacagggactgcagctcctgctggggctgacagaagcccaaagccatgcagttgtccttggcggaagggacaagctttcatacttgttgtctgtgatgctgtacacttcggcagaactggtcagccctgtgtcggtgaccccagctgccacgataatgcggccatcatggacagtggccccaaagagtgagcgggcggtctgcatgggtgccagctccttccactcaaacttcttggggtcatagacgcacatcttgttcaggcacttcctgtggggtggagggtggggatgggtggagagaagcaggagcccagccacgcctccctgcaatcacctgccggggcagccaggacaaacccctgacagcctctgggagattctacctctgctccacagactcactccaggcccagcctcacctgtcactgcctttgccgccaattacgtagacaaggtccatgtgggagagcactgtgtggccatacaccacgtaaggcagcgggtccgattcaccccatttgaatgacctggaggagacgggagtgggggtgggggagggcacccatccaggctcggctcagtccctgtctctgcacccatccgcccatccacctaacacatattcgagatgcgtcagatccattgctggaacttccgaggcctctcagttctttgatcccaccctgccccccaacctccccgcccttacccaagcccaccttcactctaagcacaaggctctagctccaaatcccaccccaggccctagaccagctgcggcctccatgccccactcacccccacggagctcagccccaccccagccatgctcacagcctgtcgtagcacatgaccgagtccaggcagcgctcgccgtccttgatctctctgccaccgaccacgtagatggagttgagagcttctcccaggccaaagaggcagcggggcgagggcagcggtggcatccccagccactctgagtccagatggtcaaactgcaggccaggtgtccagtcagctaccgccccccactcccccagcctcagcccagccccactcagtcccactgccccagatcacggaggaggtcgggaacccaggtagggccaatacagcctggaggtgccctgagaaacagtgcccctcctaccatcaggctgagagcagatgagcgtcccccacacccaggcaggctcctggcaaccaccattatagcaggcggtagggcaccacagcacagaaatgagggggagctctgtgagggaggtccagctatggccttgctttcccaggctgaacaactcccaactgaggcctgcctgccccctcctctccaccccatcccactgttcaggaaacttccaaatacggccctgccttttcgccctgtaaaatctacagtccacagccttgtccacctccacagctttataattaagatattaatactaggggttcatctttttggaaagttttctgagggctgagcaccttgctgatgagcactttataagcatcatttaaccttccaacaaccttatcatgcaggaaggagaatatccccagttacaaacagaggcccagagagaataaacaatgtgcccacactgctgagctagtagctggtgaagctgccctcatcccccagtgcaaccgtaaggcctgtgagcttaaccctggcaccaagcgcctgtcacccctcttgctgatcaggcctccctgagcacaccactcaccaggctcagccccagttctatcccttgcttaccgttccttggccggaaacactgccatcttccccttcacatctccaaatcccaccccactggcaaggctcaaacttatatggccagtctccaggaaactgtctctgccctttgagatctcacagtcacaccccaactcagacctggcactccactctgctgatacctcctgggcctcagtttcctcatctgtacaatgggaggaccatacaggattgttcctttgtctgggacactgctgtgagctccgggcctggccttcacgcagaggccctgcccaggatcctcacaccgaccttgctgctccttactgtgccccaccccaacccctgtgcagggccagggcctccaacatatgccaacttggggctaccacacccctgaaattaagataccaaagttatgctgctttttggcagctgcctattgactgtcttcaaccttcaagtaggtggctatcagtcaacctccccagtctacatctcaccctagacccagtggcattcacttgtgtagacacaagccccttctgggccccaagactgtccacagtgcctagagcccagcattagctggcggctcccaaggctggtcaggcacctgcaggaagtatgcgctcatggggtcctctttgttgtcttcgttgtagaagaggcctccagccacgaagacctggttctccttggtaaccaggctgacgtggttcttggggacctggttggagagggaagcacagtagcactcgttggctgctggatcgtaggccacagcgccctcctcactgatcatgaagatgagatcctgcaggaacatgccgaagcgcagggtgtcattgaggatcccaggaaggatacgttcggcctcctcatcctcctctgctttggctttgcttgtgcccttatcagcctccttggccccggctccatccttccccttctttttcttccgcagcgtggtgatgcggccctcgtgtgca

SEQ ID NO: 566 - DNA, 1672 bp, Homo sapiens
gacaccagatggagagcagagaccatcgaccttggcagcccaacagcagaacactgaagccccaagtcttcaacacacctgctcactgactcttggagcactgatgcagaccctgagctgcttgctcagaaggcactttattcttcctaaagaaggagacatatctgcactgtacactgcacttgatggggatgctcccatcggacagacgagaaggctgagtcctgtggggaactttgccagcacactcagctaggctggggcagggccagcacacggcctgggataccgccctgtggttctggttcatggatcaagacaacctagggggatatggcaacactggagaagcctctagtttctcacccttgcccaaaagtccaggactaagcagcacttccctttccttggctgacgcagcccctgaggcaccataactggatccaggtagactctggcctctcctagcctcttttctggagcccccacaaggccaggccagtgagggtcgcaggatgggaggggtgcttagttcagtctgcctgagctggtcacatcttagtcaggcgcagcacattgagccgcactggtaggaaggtggcacctgctgcataggcgatctcccgcaggacaccctcccatttcttctcctcctcgttatacctggggatgagagagagtggggacaaggatggagagcttggtcagctgagtccagagtggaacgcagcagagaggggtggctgagggcacttggcccatctctagggagatctgctcctgaaaatccccaggctctgggaaaggagaccccccacaagacccaccccaaggaacacccaccccacactccaggaagggtctttctccccaggaaagatcacctctcaaggggtgttcccatattcctcaaagttcccctccaggaaggtctacactgcccacaccaccccatcaatgtcctctccttgagaatttccatgctccatttctactaagtctcacgtctcagcctccggcagcactgctcccacaggggctgcctgcagcagtgcagatggctgcaggttcaggaaggagatgccccagaggctaaagtttccttctcccacccccacaaaggaccagccatagagagcaatggttctgaaaggccagggctccaactgtttcccagccctagtggcagccctccctccagaccaagcacccggaaggcaggagagaagaaaatccggctgctatttgggccctgtttctgtgagtctatgacctaagcttgggtctgctcccatctgcaacactgttgctgctccacagtggggcatggtgtcatctgtgcaagcccagactttcccaacaaactggtgagaaacggccaagcagggtatgttggctattcctccctacaggactccctagaagagggatccgctttgcccccagaggagcttgcccagtgccttggtaccccaccatggtgctatggggtgtcagccttgctcatgatgcccccttgcctccccagggtgggactcacctccagatgtcattgagctctgtgggaaccagctctccagactccgtctccagtgtggcaaagccacaatggcatagagggtacccaccaggctgaccaggctgagtgagctacgctcctgtgggaaggcct

SEQ ID NO: 567 - DNA, 802 bp, Homo sapiens; identical to SEQ ID NO: 564

SEQ ID NO: 568 - DNA, 22008 bp, Homo sapiens
gcggttccaagtgtggagaaagcggctctgggtctaggtagtgtgcggagaggggcgcggggtggaattgctgcgggaagtgggaaactggaagtgggaaactggaagtggaatctggtgctccggaaagagacgttcccaacttctactttctccccagattgagggatactccccctttccaccatgggcaagaagggcaaagttggcaagagccgacgagacaagttttatcacttggcgaaggagacgggtgagtccggattcgctcagtctgcgagcgagcgagcgatctctgcccggttcgcctgctctttgcgaccattatgtacctctcctgcagaaggggtggtcggttgcgaggccggagaaatcctactagtgaagcagtttgcgcacttggttgttttgtccaggttaccgttcccgatctgctttcaagctgatccagctcaatcgccgctttcagttcctgcagaaagcccgagccttgctggacctgtgtgctgcgccagggggatggttcgtaacactcgccacaggttgctcctggtggccgctttctgggttctgagctgggatggcttccagtttcactgcgggaggggaacccgaatcccggtcctcttgggggccgtttcctttcttgattgcagagaaagggcttggaatacgtgcctatgatatgctttggccagtacacgtaacaccagggatgagagatcagttgccaagagggggaaaaggatggctctaggtttttaaatttctgttccttttataggctgcaggtagctgccaagtttatgcctgtatccagccttattgtgggtgagtaacggacagctctccttggtgttttaaggggtgggtgtataaggtattttgtcctgtatttctctcctccctgcttgaagcaaccttttagaatactctgacctgatttcttccaggagtggacctggttccaatcaagcctctccccaatgtggtgactctccagcaggacatcacaacagaacgttgtaggcaggtaataggagtctctctcttccttccccctttatacggaaacatctacatccctgaaatcctctaaaggcaagtttttcctttttaccgtgctttgagcacgttcttgcctgacatctgtacgacaagacctatggcattcgtagtgtccactccaggctttatttagagtcagggataaaggtgtttggaattgggagaagggcagagatctttagtgaagtcttctcctgtgaattcagtgtcagactgtaatctccatgaaggtagagacatactgtttttgtttactattgtatctcctgtgcctggtactgcatttggcccatgatgggcactcagcaaatgactagatggacaaatggctgaaccagggccattccagtgtttctgtttccatagttccttttcttctctttaggccctgaggaaggagctgaagacctggaaggttgatgttgtgctcaatgatggggcccccaacgttggggctagctgggtccatgatgcttactcacaaggtacagggagtgtggtgcttggagatcaggtgatggtggaggtgggcgcatgccctcctgggctgcagagtgcgtcaactaattgtctctatcctacagcccatttgacactgatggctctacgtttggcttgtgactttttggcccgtggtggcagcttcatcacaaaggttttccgttctcgtgactatcagcctctgctatggatctttcagcagctgttccgccgtgtccaggccaccaagccccaagcctctcgccatgaatctgcagagatctttgtagtctgccaaggtgggcatcatttcctttctcttgatccaggctcccaactcccaaagcacactttttaatatatcctgtcatttttaggattcctggcccctgacaaggttgacagtaaattctttgaccccaaatttgcctttaaggaggttgaagttcaggctaagaccgttactgaattggttactaagaagaagccaaaggtgtgttttggggaatggggtcactcttgggtcctggaactctagggaggttgggcctggtgggtcctacaggtaccttagaagggcctgaccaagcttctctcttttccttcctaaggctgaaggctatgctgagggtgacctcactctctatcaccgtacctcagtcactgacttcctccgagctgccaaccctgttgacttcctctccaaggccagcgaagtgagtctccagccttgagggacatgaggtagccccagaaacatggcctgaggatctcccctgacacctttccatcctcccaaacagatcatggtagatgatgaagagttggcacagcatccagctaccactgaggacatacgggtgtgctgtcaggacatcagagtgttggggcgcaaggagctcaggtatggagtggggtaggcacgggggccaggagccctggaggcagggaaaggccatgatgttggacctctgggaagaggatattgctgtgctaaaggtttgggatgggggcctgagccttttgatttatgtagccgaagcccgaaaggtgggtagtgagcctaaaacagaagggggcggggacaaagagggagatggcaagatcagtaatagtatctctggggcaggtcgctactaaactggagaacaaaacttcggcgatatgtggccaagaagctgaaagaacaagcaaaggcactggacatcaggtgaggagagaacgcagcgaggcaggtgtggactgggtgtccaggggaaaagtctgggaaaataacccaactcttgggactgttttgccagcctcagctctggagaggaagatgaaggtgatgaggaggactcaacagctggaaccacaaagcagccctctaaggaggaggaggaagaggaggaggaggaacaactgaaccagaccttggcagaaatgaaggcccaggaggtggcggaattgaagaggtgaaaggagctggggtagagcttggagttccccaacgcagggactgtgtgaagatgggagaagaaaatgcaaggcatggatagaaactttggagctgggccggttttactccctcaatccaccccctcaggaagaaaaagaagctgttgcgtgagcagagaaagcagcgggagcgtgtggagctgaagatggatctgcctggggtttccattgcagacgagggggagactggcatgttctccttgagcaccatccggggtcaccaggtgaggcggcattgggggtgcaggtttaggagacagaaggatctgtttgggtgtttggaggtggggggtgttgaatgtctttttaggttgccgaacgataggctgtggttgctgtcttcaccacagggtgccttggtgagtataaggccacaaagaaacataaaccaaaaaggatgagttaggtagatagatgagtgtgatagatttattttttttttttttgagacggagtcttgctctgttgcccaggctggagtgcagtggcacgatctcggcccactgcaagctccaccttccaggttcacaccattctcctgcctcagcctcccgagtagctgggacaacaggcgcctaccaccacgcctggctaattttttgtatttttagtagagacggggtttcaccgtgttagccaggatggtctcgacctcctgacctcgtgatctgcccacctcggcctcccaaagtgctgggattacaggcgtgagccaccgcgcccggctgatagatttattcttgaagaactagaacatcagaaaagaacttaggttatagtagatgctgccaggttacttgagtttcaagcacagatgaatagaggatctccctcagaggggagcagcattctttagttcattgagaccaagtgagcactcgcattagggtacttccactgaatactgaagaacatgtttttcctgacaaaatcagggtcacaaacaaaatgaacttttgtggcttatgtgtgggagtgtcataatcaggtcatctttgttgtacaggagggcagtagagcatggtggccctagagcagacacaggctcaggtttccttcccagctctaccacctggagctttgtgaagtgactgagctgactaccacttatccttgctgcctcagtttcctcatctgtaaaacaataatagaacctacctactagagtttttggtgaggaataaaaaaagataggtgtaatccctcatatgtgataaacactcaagaaatagtagttggagtttttcctttgagacaagatcttgttttgtcacccaggctggagttcagtggtgccatcatgactcactgcagcctcaaactcctggcatcaagcaatcctcctgcctcagcctcccaaaatgctgagattacaggtgtgagccaccatacccagcctagtatctttaccatgaggaaaataaaaggttctgacaattggtttaagtggaacagttttgttggatgtatgttggctgggccccttttattcagtggaaacaaactgtgtagacggtattctcaggagatgattgagatgctgtctgagaataatttttaaaggaaaaccagtgttgtagaatatgttaagatttggtgctatgtgggctgtaggtaccttccttaagacctatttgtgataccactgagacaagacagctgagtgggatagatcagtaacccagcctagaacgggatgttgtaaacaggccattcactaccctggatctgagctttcccatctgtgaaaggataatggatttgccagtgttctttctagtgttgctgagcatagactgaggtgagggacacagaaaaaaaaacagtatatttccttttaaatagtttacctttgtttctgttacacttcagttattagaggaagtaacacaaggggatatgagtgcagcagacacatttctgtccgatctgccaagggatgatatctatgtgtcagatgttgaggacgacggtgatgacacatctctggatagtgacctggatccagaggagctggcaggagtcaggggacatcagggtctaagggaccaaaagcggtaaggggcacgtgtgcaccaaagggaatgctgccactctgaggaagtgttagggtgggtactaccagagcctgagtagggcagcaagggctccaggcaatctgggtctctgagccccctactttcctttgggtctacagtatgcgacttactgaagtgcaagatgataaagaggaggaggaggaggagaatccactgctggtaccactggaggaaaaggcagtactgcaggaagaacaagccaacctgtggttctcaaaggtaaggagaggccgggggcaagactgcggggagatgagtcttccttgggagaagggcagctgatgttctcctatcacagggcagctttgctgggatcgaggacgatgccgatgaggccctggagatcagtcaggcccagctgttatttgagaaccggcggaagggacggcagcagcagcagaagcagcagctgccacagacacccccttcctgtttgaagactgagataatgtctcccctgtaccaagatgaagcccctaagggaacagaggcttcttcggggacagaagctgccactggccttgaaggggaagaaaaggatggcatctcagacagtgatagcagtactagcagtgaggaagaagagaggtgagtagttgcagctgagagaagggatggaaaggaagcggtggcttgaaccatttctctaaattgggggttcttaatcttggctgcacatggggagggttaaaaatactgtactgacgatcctgatttaactggtctggggtacagcctgcatggcaggatttttgcaaattccgtgggagtgcggtctgagtagtacagagtggtggaatcactcagagtcctcccctcttcacagctgggaacccctccgtggtaagaagcgaagccgtgggcctaagtcagatgatgacgggtttgagatagtgcctattgaggacccaggtgagagctctgtatgcagtggaatgagaaaagaccactggaagtctcagtattgggaattgagctttgacctttctccttccctctctagcgaaacatcggatactggaccccgaaggccttgctctaggtgctgttattgcctcttccaaaaaggccaagagagacctcatagataactccttcaaccggtaaaggggccataaactcatcaagagtgacccagggtctggtgggtaaatgggtaattttttgtttttgagatggagtctcgctctgttgcccaggctggagtgcaatggcacgatcttggctcactgcagcctgattctccttgaatcgcttgagtcagccttctgagtagctgggattacaggtgccaaccaccacgcccagctaatttttgtatttttagtagagatggggtttcaccatgttggccaggctggtcaaactcctgacctcaggtgatctgcccacctcagcctcccaaagtgcagggattacaggcgtgagccaccgtgcccagtctggtaatttctttagaaagcctggaatgttggatattagacagatgtcctttccactcaggtacacatttaatgaggatgagggggagcttccggagtggtttgtgcaagaggaaaagcagcaccggatacgacagttgcctgttggtaagaaggaggtggagcattaccggaaacgctggcgggaaatcaatgcacgtcccatcaagaaggtggctgaggctaaggctagaaagaaaaggagggtaagtgatggggcctccagagattgggtggggtgggggtggggggatggggaagaggtcacctgacaggttcctttgcagatgctgaagaggctggagcagaccaggaagaaggcagaagccgtggtgaacacagtggacatctcagaacgagagaaagtggcacagctgcgaaggtaatgggaggacaccacaaaggtacacagggctaaaagtgcagcagaaagcaagcctctaacctcttctcttcccccctgtagtctctacaagaaggctgggcttggcaaggagaaacgccatgtcacctacgttgtagccaaaaaaggtgtgggccgcaaagtgcgccggccagctggagtcagaggtcatttcaaggtggtggactcaaggatgaagaaggaccaaagagcacagcaacgtaaggaacaaaagaaaaaacacaaacggaagtaagcagagctgccaggctcccaggagagcatggggactaggaggaagggtgtggcatggctcagtctggcccccttgattaccggcctagcccctgctcacatcacagctgtctgaagaacagtgaggtggagtgcctagaactcccgtggtggtcctgagcagagaggaggatgtcctcctgcctgcctgaaggtctcccatgaaaacactgctgaactgtgttgacactcatgaccctttttttaaaccgttaaagggaagttcggtgttggagcgatactcaatgtagtcagtctacacctggacgtgtgggccacttaagccctccccacccccatcctattcctgaataaaaccaggataatggaagagttgtcttttctgacagttttaataagcacttccctatctgtccctacactgtgtgcggcactattcttaatatgtaccaattcatagacagaaatgacaaacgatccacaggtcccggtagtaaaacatttactagagagcaagcagaaaggaatgcacatcttaaagaaaccttcacaaagtcacaaaagtcaaagtttgtatatttcttttcctttttataaacgataaacaaaaatcatcaaaatcatttcagcaaaagacttttctatcattggggcaagttaaaaaaaatacaatgagatagaagacactttaaaagctgttgttgggtttcttgtttaattttaaatttagcaataccatctcaaacctggagcaatcctggaacagttaccaggatcaccttttcccttcaatccttgtggcttctgggaatcttcagagcctgggtctgaaaggtgtttcctacatgtctcagggctggatgcaaacctggctggggacctgagcatcaactcccatttagaatcagacatctcccttccctgcaaatgtctacaactaccaaattgctccccaacagttagctcaatggattgaatttgcagaagccaactcctaaaatggggactgcctggccatacaactaagaaaaagaagtcaatttatagatgcttataaggtgacaccttagtaaaaaatataagctacatacaatataaacctagagtgagttttgtgccctagaagaccctttatcccaagataacctcaacttacccacatgacaactcacctagagccaaaagaagcttcccagctctcactgcttccaaggaccaaaacagcttcccaagaaaacatccgaaaattccttctgatgaaggggtaatgtctccaagctccagctctccactaagggcagggggtccttacactttggaccccaacccagccctgagacacctagttaccaaaatctttctaaaaattaaggacaactgatttcacgctttagcacatcccctctaactgtcccatcgacttttcttgcgtttaggcggctctgggacagcaaagccgtcagctgtcttatctgtcttgctgtccaccttgtccatcttgctgctgtccactttgggttccatcttgggctccatcttgctctcacgattaaaagcttctttcctgctttccccattccgaccatcatttgcaccccggttctccccatgccggcctgcgcttcctccatgtctgttctccccgtgccgatggccatcagtatgacggctgctgctttctggatggcggtatccatctccatggcgaccaccatctccgtgacgtggactatcgctatgccgattgccagtctctccgtgactgtgacggctgctgccccggttctcagtatatctctctcttttcccgttgctgcccccagtcccttctcggctgttattccctgaagctgtgttgttgactccttgggctccggcagacgggtaggtcacaggggcaccactgatgttgccagtattgccaaagcctgggatgcccttggcggcactggtgacggggctgtcaggactgttatggccctgttgtgctgagttagttggaacagaattcaagctccctgcactagtccacccacttgccccagcagcagaacttccagccttctgattacttaaactggctgcaacaaagtgactcttgtactgtgactgaaagagaaagagacatcaggagtaggtaagatagcaagttcaagaaacttgaatatacaacttggcaaatgatgaggtttacagaaactctgtgctatcctggcactgtgagtttagtgtcctgatggccccacagtatggtcccttttgttcttgtgctataaaggaaaacttgtggatctctgtggagagatggacccccagtgttctgaaatgtacttttatagcctgattggctagaataaagcatctatgtatttagcacatttatctgcattcaaaaccaaaaagttctgaaaacttaaaaaaaattttcatactgcaatttaagtttgacagcaaaacctgccttgaactcattctatcgattcaccttagtgtgactatcagtaaattttgcttcagaagtgagttggaggtgggtgcctgggaggtgggcaacacttcaggctgttgggaagggagggaacacacaccctgctgcaggacaacaatcccaggccccaagtgtgactcaaagtagaccagcacaaggggttctctagatcaacttgcatttccaactaagctactgttaggtttatattcaaaatccaagcagcgtgaagaccctaaatctagcatcaagcctaggcgcccagctacaaccaggaaaactaagcccctctgtcactgcccaagagttactgctgaaagtgcttttaatgaaatgcttatttcagacctggaaagctgctttcattgccgttagtcgatctcccatagctcctgtggaaggcttgtaggcctcataattgctcattacattgttatttcctcgatcctaaaaaaataaacacatctatgagaatgaaaaaataagcaggaaagctcactgctatagactaggcctcattatgaaaacccttgaagtgggagctacaaaggaactggatacttttagaaagctgctactgctttgtgagaaaagacacagtgacaatcatttaaaaatgcttatgccctcaacccagaaattctatttctggaaattaaccctattaaacagaaatgcaatcagattatgcccaaagttgatcatgtatttacataaacacttccaattaattaagtaaaaattacgttaaagatgaaaaggccctgaatagcatattgtgtgactgctcaggccctgaatcaagaccatgaagggtctgaatttcggcttgaacacttgtcactgtaaccttaggtgcctcagcattgttatctgtactaacttccattcagttattttgaagattaactgagccaaaacatctgattgcttggaatggtcctggcacatataaagtgctcaataaatattacctattattatgcatcatcatcattattattataatgtgggaacagagtatgtaattacaaagatgccaagtttaatgctccagaaaagtatactggcagctttcttccctggcttggaatcaaggtgacagaaaacaggcagttaagaaaggccaccaaaagggtacatttgttacctggtttgtgagaaaaactagctcccgacttggaaattcctgatccgttcctgagtttaatgacaagatatggctagactttacagtgaccctttggcaacatttacctagcagcaggctttaggccagtgttgaagggcttataaaaccagactgctgggccccaactccagagtttctgattcacaaggtctggggttggggatgagtttgcatgtgctgctggtccagggaccacagtgtgagatcactgctaatctagaataatttcctgagcaagcctagtcaaccaagtacacaaagatgcttcttcaatagaaagttaccataagaatgagcactgcattgactcaaatcagattaaatacaaattcccttctagacagggctttaaactcactgaggctttcctgggtagatgagaatattcctaatgactttcaggacatgagaccaactataaaggcactactgtagtagtctagactcaccatgttctcagagcccaggccaggccgctccctgtagcctaggcctcctccaccaatgttcagcttttttcctttccctcctttgaatcgagatttccgaaaccaggcattctgcattgaacaaaattcaaggttaagtcaagggagggagaaaagaacagaagaagagaacgaggacaaagaggaaattaagtgggaagggggaacttttgcttaattttcagccagcactacgctaagggaggaattttcacaggaaccacagattggtttctctttggtagcataatccaccaaatttgaaaagtggctgagatccttatctaaggcttcctacagtgctccctccctcaaggctctcctggaagggaagttgttcaggtaagcttcaaacccagaggagtaactttggctacttctaacttccttgaggaaaatgagcttatattttatttctcaaaccatgtattattggacgtaaacatttggaacttaaacaactggtatgttcagaagcaaaggaaaaatgctatgtgaagtgaggcttatcagaactgactatagggacagactcccagaaaggatggtagccacacaactgaaaattttatttacccgcagagcgtaaaagttttcattgaacttgaccattgccactcaacatatttactcacattctcttaagaatgcagggcggtggctcacgcctatgaatcccagcactctggaggccgaggtgggcggatcacttgaggccaggagtcaagaccagcctgaccaacatggtgaaaccccgtccctactaaaaatacaaaaattagccaggcatggtggcacatgcctctaatcccagctgcttgggaggctgaggcaggagaactgtttgaaccggagacgcagaggttgcagtgagctgagactgcgccactgcactccagcctgggtgatagagtgtgactccatctcagaaaaaagaaaaaaaaaaaaaaaaaaaaaaagcaaatgtctctgggaaggttaaagttttatctgacaatcacatattaccagcaaaataaagtgcttgagaggtagggcagcaggcttggacaaagtcctgagcacagaaagcctgaggtacaaaaagaaatggaagaaaatgccaaagtcaaaatgtgtcctgttttaaaagtttatttaggactagctctctgtgctcaggagcaggggaggaaacattattctcttctctcctgcagtgcaggtcctttactcctaggaccagaaacttgggcactgccacattgcagctgggttgtaccagttgtgtgagctggcctaggcatttgacaaactcttaacagtttctgctctcagaaagtgttccgaacccatttgtaatttggggacagcatggattcagatgactccaggtttgatttgttagaatgcctcacttagctttagattggagcacacctggaagagggcaatcagtgtggtcagaggtctgagatctctgcaaggaacagttaagaggcaccatacaggctgggcacggtggctcacgcctgtaatcctagcactttgggaggttgaggccgaggcgggcggatcacctgaggtcaggagttcgagaccagcccgaccaacatggcaaaaccccatctctactaaaattacaaaaattggccaggcgtggtggtgggcgcctgtaatcacaactgcttgggaggctaaggcaggagaattgcttgaacccaggaggcagaggttgcagtgagccgagatcgtgccattgcactgcagcctgggcgatagagtgagattctgtctcaaaaaaaaaaggtgggggggcactatactatacacatattgttttaaaggcatcacacatttttagcctcccagaagaaaaattttgtgggggaagagcagtaaggagaatagtaaccatctttgagattaaatttactcctaagtgtgctatggggtagaaattacagcgacagattttagcacaaaggaatagcttttcaaaacagatgctgttgaaagaagaagaccagataagactagatgaattttagtatctcacaattcctatctgtacctcataagccccacatcctcctagccacccaactttcttgtcaagtttttatgttatctgttccaggactgctaaaatgtcttggtcttataaccaggagcaattgaaagtgtgcccagcccctcacctgcattgccagatctaggagttccttagaaacgtgttgattggctccttccaagttccggaccaggtcaccagcaaaattgctgtccttgggagtgagtagggtataggccacacctttctcacccgctcttcctgtgcggccaatcctatgcgtgtgggtatcaatgtctcgtgccacatcatagttaatgacagtcttaattgaaggaatgtccagaccacgggctgaaataaaaagcaaccaaattcttttattcttcatctgtagtcagaagatcaaagtaaccagaaatgctagtgctaataagccacatttcctttatctaggcaaagcgcatgggtttggtgagctgagatacaggcatgttaagtcaccaccacagattctatgatgttaggccttctagtgtaagggacttttattttttagagacggagtcttgctctgttgccagacgggagtgcagtgccatgatctcggctcactgcaacctccgactccctggttcaagcaattctcctgcctcagctttccaagtagctgggattataggcacgcgccaccacacccagctaatttttgtatttttagtagagacggggtttcactatgttggccaggatggtctcgatctcctgacctcaggtgatccgcccgcctccacctcccaaaatgctgggattacaggtgtgagccaccgtgcccgactgggacttttatcttttgcatcagtaatctgccatgccctcttctcttgcactgggaatatatatttaaaatgtgtcatgaagctgagaagttctctcctttctaggaaaaaatatcagtgtttaagggtagttattaaaacttgacagaacaaatccagaaattatattccaaaaactgttctcatcctgagttaagttgcccaactaagctgtgtatagtagatcaatgtaagggtaaggtatctactatattcagacatacaataagggcattcactgccttttttcccagagtgacttctagctgcagggattctttgattagagagaaatactaagtgaaaagtggtatctagagctccagactgtgatccctgtgctgaactgctgcttccttgggggtttgggaggggatggccagccaggccaacagtctttccatcagcctgctcagatattataggtcttatgtagtaagacagagtacccttatagcctaggaacttaatgttgttgaaaaattcatactctacctgcaacatctgtggccaccaggactgggatgtcctttttcttaaagtctgaaatgaccttgtttctctcactctgatccatatccccatggagcagcccaagattatgaccctcctgtttaaggttattcgctagctcttcagcattggcttttttagtaacaaagaggaggacactccctgaagaggtaaattctaccagacgccgggtaagccagttccatttactaggtccagaatggagaatctccacaatctgtgtcacatcttcatttgcctgagaaggaagaaatgaaacagatgattgtgacattggagccacagggcacctgaacaaggactaggcattatatttctacctgcatcgagaagaccttgaacaatcccagttctccttgggccttcagcaagtcaagtgcagctcaaaactcacctctcctttccaatcaccttgctctccacctggtgtacatacctaatttgtatgccccactactttgtagagctttccttaacaataaccatggcaagcaactgaaggattctctaagcagccataactgaattccaagtcccaattcagagtaatttttcacatagcgcatatgtacaggtaagaaatgaaacctgattttttccaggccttccaggtcaccctttccctcctgcgtaggcccctaccacaataattaaaacgtcagttccaacctaatacgctgatgcttccaggcacatctttttgtctctttgaagcctttttaaaacaattgtaagttttgagacattcaataaaacaaaaaaaacacaaaatgaacaaaatcaactcatacccatcacctagcttcaatgattcccaacattttgccagtcttgttacgtctatccccacaacttgcaaaatacccaatctcaagcatgttgcatctataaacataacatcttttttttttatctcaatagtgagaaattaattctgtgttccataatatgagaaataaacccattaaggtcccatccagccctgcttagggttacctctccaatatctccctgcaccactcgaatagggtcgatcaggatgtctctggccaacttttcaatcttcttccgaaaagttgcactaaataagagagctaaaaggtaagataaattctgttagagaaacaatatgatatctttatgcatacccattaagcttctttggcattcaggattattcagtttttttacataagctcacctgaactttaaatttagtttagaaactgattcactagggaaagatttgctcttattctatttttattacatttttagttaagacaagttgtcagtatggttcagaaaaagactcttgatttcaaatcagcagatctgtactgtacactgcttctacccactgataaaactgtataatttagggcagtttatttaatttctgatccttggttttatcatctataaaaaggaacaagttatatctagtgctaagatcctgtccagctcagataaactcattacctcccttattatggttctcaccaacagacacaagatcatttttacttccataactctgagtgcttataaaataaataagtgccctttttagtacaaatttggtttaacaaaggtgcttcatacatactctgcctgtcaggacgaacatgacttgctatggatcgaacttggtactctgcaagaaacagaacaataaaattattataacctgaaatacagtttgggaagcctggaaaaagccatattagtaaaagtcttcataagaagttgtaagaattaagaaaattagaaaccccaggccaggcacagtggctcatgcctgtaatcctagcactttcggaggccgaagcaggcggatcacttgaggtcaggagttcgcagcctggtcaacacagctatctctactaaaaataccaaaaaaaaaaaaaaaaaaaaatagccaggctgtggggtaggtgcctatcaccccaactactcaggaggctgaggcagaagaatcgcttgaaactggaaggaggaagttgcagtgagatcgcaccgctgcactgcagcctgggcaacaaaagcaaaactctgtctcaagaaaaaagaagctcctaaacatatcattcagcataaaagtgaaaaattttccctccatccaactgggctaggtctagcagtgttccaatcagtaaagacagctacgaggataggaaagcaaagggcctcgaatgatctgacattcatctacccaagaacacagaccttaacctctatgatcaaaggcatatggataaaaatgaagacagagaaaatattccccttatatacaaaggcactttgaaatttcctcaacccaataaaacctaacatacttttccagagaaaactcctaaaaatgttcatcttagctatatttctatagtctaaccccatccaggagtatttttagcttctctcatgctgaaaaaacagtctagaaagacatggaaaaaaaactagtatcatgaggatggggacagaagaaactggtattcaaggcataccaaatcccatgtcaaacattcgatctgcttcatcaaacacaaggtaagagactctttgaagattggtagctttctttttcacatgatctatcagtcgaccctataagatcaacaaaatgaacagtaagtataattaaaggcattcacagggactttctaagcagttgcactcctggcaaaagtgctaattctctagtctcagactgtaatagatactggtccaacagccacataccttatgcactacttagctcaaaggaacagaaattttgaaaactcaatcggcatcttcatttacactgtgatttaaattctgtgggaaagtggccagaagcagtttttgaggcattctaaagtgacctgatttaaagcataatgacaggtttcaatgtttaaactacactcttctaggctattctgaccatatgtatctttctgattcttgatgaacttggcaatcattttgtgggagagtataagaaaaactatttgacatagaggggaatttgtagctactagcctatatgtcacagagactctcactgaactgctaatttagccaccaatcaaaattaaaaccacagcctgccgttcatcagtatattttcaaccctgcttttaccacactttaggggaaattctctgcaaaactaatcatgttttccataccgagggaggctgagaagccatttaaacacaaggcatacttactggggtacacacaacaatctctgccccctcctgaagggccttggcctgctcccacatactccctcctccatatacggccactgatcgaagattatatgcttttccaaaccgcttacattctgcatggatctacaaagttgtgaataatatattaacaaactgtgacactaacaaatacctgtcacaacccaaacgaagttctgaaaaacagaatgtgatgtcataaaaaatcgaaacctagaacatactttaaaaccacgattttattcataaaggtataaatgaatggaataccattattgcatctcaacagattatctaaaatcttttattcattttacccccttctcttcctgatcctgtcactgcttttctaccaagataaaatgaactcatcctacagaaaaactgtcagcttataatacaaacaatccccatatcacaataggcttttcctcttaaaaaaagtagttctggccgggcacagtggctcacacctgtaatcccagcactgtgggaggccaaggcaagcagatcacttgaggtcaggagtttgagaccagcctggccaacatggtgaaaccccgtctctactaaaaataaaaaaattagccaggtgtggtggcgtgtgcccgtgatcccagcctctcggctgaggcaggagaattgcttgaaactgggaggtggaggttgcagtgagctgagatcacaccactgcactccagcctgggcaaaagagtgagactctgtctcaaaaaaagcaaataaataaaaataaataaaaacagtagtttttaggggaaaatatgtatttggttatatagaaaatatttaacacataatactttccaaaagtttcctggtagcacaacactgtgaatatacttaatgccactgaactgtacattaaaaatggttaagataatcaattttgtgtgtatcttatcacaattaaaaaaaaaagtttcctggtcattctacctcacttgactggctggtcccttgctagtccacatatggaaggaggcattctatagaaagcacatacctgctggcaaagctccctggtaggacacacaatcactgcaattggtccatcacctggttccaactccttctggtccattatatgaatcaacatgggccaaatgaaggctgcagttttcccactacctgttttggcaataccaatcatgtctctaccacttaatgccacaggcacaccctggagaaaaagtaaaatataaccactctaaaatttcaattctaaagatgtactgaagcaaatcctggggaatgataaatgactactaacatttttatttgcaatggaacaaaacatacctggtgctatgcatactggttgtgaaatagaaatatcaatatccaacattctcattaacttcttgatttataggaaatgacatcattctcattacgtggatatcagccaccacttacagaacagaaacaactccattttgtttaaaatacagaaatgaaaaatcaaggccgggcagtggctcacgcctgtaatcccagcactttgggaggccgaggtgggcaggttccctgagctcaggagctcgagaccagcctgggcaacacggtgaaaccctatctcaactaaaatacaaaaaattagccaggtgtgctggcgtgcgcctgtaatcccacctacttgggaggccgaggcaggagaattgcttgaacctgggaggcagagattgcagtgagccaagatcgcgccactgcactccagcttggacaacagagtgagactctgtccccaaaaaaaacaaaaacaaaaacaaaacagaaaaattgcaatttataatgaagggttgctaaaattttaaaaattttccccccttaagaaggtacagactatctcattcatatacagaaaatgagaatgttctgcataagaataaataaatcccatatataaatgggaaaaagaagctaaaactttcagtaatgaatgagaattttcaagtgacgaacgaaggaattctagtcattgacagtgctaaatttgtctatatacgaacctttttggttaggtttaggcctaataaattattttcttcatatcatattttcaacatacgtatcagatacaaaagaatatttgtcagccatttagtgacttcttaagagtgataaatacctctatccttatcaacaaggttctacactaaacactgttttactgctgtgatttgtttttaaattaatatagtcatgaaagactaccctactttatttttctttcattatgttttacttacctggcactgtattggagtgggctgtgtgtattcagatttccgaatctggtgcataagttgttcgtcaaacccaaaatgagcaaagctacttcctggtctaggaggtgcagcaccagagacctagagatagagacaactccccagaatgacttgtacttcaacattaacagcatttgaagttcaacaatacttacctggatctagcattttagctggagtatgaagtaaaaatacaagtctgtaagccaaaatcatacaatgaaaaggaaaaacctcaaatggtaacaaatataaacctcatattaaaaactccatgataaatattcccaagataattgtcatacaattttaaatgattaaaaatttcttaactcaaaattaattttctcataacaaataaaacggaaaaaaaattgttcaatgaattgggaagccataactgttcttttgccattttgcattaagtattaaccagatggtagaaaaaaattaatgtatcttactcttgaaatgaaaattccaagtgggctccaaataagacaagtctacacatgctggctaccaagatataatctactgcctccattttcagttatgcttgatgaattaaagtctcacttagtgatggtccagccactgtcaagccctgttcaaactgcacctaggtgaagaatggggcttataatctccattttgtcccccaaagtggtaacctttcaatgcttctctggtgatgttgatatttccaatcaggatttcaggggttttacttaaaatttttcttgggtcactggggagatgagtaacctcttggaaaacagacaagtgtacacacacaaatacacacccctcctggaaaacaggagtttaaacatcgtgtagcaactgataaggtgcacacaggcgagaaagttgtctatattagagtagatagcatagcatattttttctgtgtgtttcatttaccatctatcagcaccttaaaccaatgtagccaatgtgcagcccaaaactttctggtaggcagtttaaaccattctgaaattagtacatgcatatttttaaaaggtattagtttattctaatttttaaaataaagcatactatatgtaatttgacagacaagtttatcttcatttcaaaatattctaagatatcatctgttaacatctattccttttgtttcctcttcctttagatggggactcccacccttcatcactagcccatccagcacagaacatataaaactgactgaaatatgaaacaagaaaatgatcctatcctaaaacagcatctagaagactaaaacaatcaaattaagagacatgaacagaagggatataataattactctggcaaagacagttcagagaccattagaaaagaaattcaaggttattagtttagataaccaataatactaaatctggactaattaacattaatattaagaatattgagcttaatgatgcttacccgaagattgagcttatgccggagatctattaactgctgtggagtgaggttggttatctcttcatgctcattgtaaaagtttttttcaaatggtg

SEQ ID NO: 569 - DNA, 15500 bp, Homo sapiens
caaacctccggaggccggggacggaaggcgggcccgcagcagatcctggatccggaatctcccgggcaggagcggaatctgtcccgaaccgggtctgtgaggaactcgcgaacttggattaggaaatcccggagcccggatcgacaaatcccggaacccggaattaagatcgccaagtcccggatcgcggagcacagagcacggagtggactcgacgcggagcccggagtccggatcgcggcaccgcgggacgggacggagcgatgtcgggccgaggcgcgggcgggttcccgctgcccccgctaagccctggcggcggcgccgtggctgcggccctgggagcgccgcctccccccgcgggacccggcatgctgcccggaccggcgctccggggaccgggtccggcaggaggcgtggggggccccggggccgccgccttccgccccatgggccccgcgggccccgcggcgcagtaccaggtgagcaaggaggacgcgagcggacgggggcgagaggcgctgcgagggcgcccgggccggcggctgaaggggcctcgagtgagggccctggggaatgcatgaggaactccgggagacggtggagggcgggccgggaccctcgggctgcggcgggtcgcggtggagaagtgggaaggggaagcaggttctgcagcggagggctggaagcagctgggaggcctgggggcttccgcggcacagggattccgagtgactgggagatggaggagtttggggagccagtgaattgtggcgggtgggttgagaagtctagggtaggagggctggaaagtgatgagaaagtttgggaaagggccctcgctgagaaaccggggttaccctgcatcggccttggtcccagtccaagtctgccctgttttttctgattgggaactggcggagctctagcgtgtctgagatggctcccggctgctaataaggaggaaggagcctggcttcccacgggcacgggacgctgaggctagggccaggggattccagcttgtgcacgggcggactttactcctgaggcagggccaggcgccttcgctgggaggactccagcttagaccagagacggtggtggcctggcctgaggggaggcccagcccagtcacaggccggctctcttctgggctttctgcctcctgtcatcgtgtccgggagttgattagtctggacgtgcagagtggagccctgctggtctggggccggaggagtctgcgagagttgcttcaaagagtgctgtcctgacccctttggggttttgagagctgctcagattgcagcttcaaaagcccttgcaaagcagcgacttctgctcagtgtgtgaggacctcagcctgaccctgccagtgctctagtctgctgttcaggttgccccagagggcttggaaactgtgcccatctgccttgtcaccctctctgcatttttatttggccttcaggttctaactccaccacgtccgaagccatgtgcccaagcatttgacactggcttcttgctcatctacgggtttgctgtgggcttcctctgttttcgactcatgtctccaggcagaggtccttagggatcctcgtggagtatacacagcctacctgccccactgggccctcacttctaaggagatggcttaactagggacagtgactggatttttttttccttcttactcctcattcttcctcctttctcaagagaaaagagagtctgggtatgggcagagacagacctggtcccagggattccagctggggctcatctctcccaccttgctgtccccgttggggattcatgggcccagggtgttgctgagggctccctgcatcattcattgtagcccttgggcctgcccactgagacctggcctgggcaccatctgtgggcctttggccttggaaggacctggaacagacaagccgctccagtttccttggcatgcaagccataggaaatgtgcccttgggacagcccctgagaggatggattccacatgttttggtggggggtggccttgggcctgtggcaaggccaagctggctggctggttaggcctgggctgctagctgtgcggaagtaggagatggccctgagtctgggtttcccatcccactagctttcctcctcctggcaggagaggtagatgggaaggagaacccagccagctaactttggctgagtttgaagaggatcctatttgccttctttccaagtccagttgtatgactgccaggagaagggacttgagatctgggaaacaaaggggttcctgtctgttagggctcatgagatgcacttgaaaagtgagaatttgaggcccaagctgagcaaatagttgaaagaagggaagtgatgacctcccttcctccagagggtggttctagctgtggatcacagttaacagaggaacctaaaaaaagaaaaagaaaagaaaaaaacctccagggcaggatatggtgggctcacacctgtaatcctagcactttgggaggcccagacagaaggattacttgagaccaggagttcaagaccagcctaagcaacatagtgagaccatcatctcttaaaaaaaaaaaaaaaaatttagccaagcatggtggtgtgcgcttatggtcccagctactcaggatgctgtggcaggaggattgcttgagtccaggagttcaaggctgcattgagctatgatcctgccactgcactccagcctgggcaacaaaataacaaaaacctcagattgctgggttcactccagagagttcaaaaagttcaaaaaaaaaattttttttttctgatacggagtctcactctgtcgcccaggctggagtgcagtgacatgatctcagctcactgcaacctccgcctcccaggttcaaacaatcctctgcctcaagcctcctgagtagctgggattacaggcgcccaccaccacgcccggctaatttttttgtatttttagtagagacgaggtttcaccatcttggccaggatggtctcgaactcctgaccttgtgatccacccgcctcggcctcccaaagtgctgggattataggcgtgagccactgcacccggcctcaaaatcctttttactcatgggagagtgggtggtatgttccccaactgaggccctcaggcccaggttccaggagcatcagggccacatttggggcagggcaaagcacgctcaccggagccctggattcctcatctggggttcaggggattgatccaggcctacctggtcctgctgcaggcagggagttagggaggctcagagtgctggactgcttttttttttttctttaactcctgagttgtttttttttgtttgttttgttttgttttgttttttgaagtgggaggagttgctagcgcctataagccctatggagcttggcaaggctcagctgggacttgaactataagcagccttcccctggggccctgagtgagccaggggctctgggcccaggaaacctggagcagatgtctgggtggagcctattccagaccctgcctatgaggccttgtcttgggacttcctgttaccggagcacctgcccaggagggatgggtggtgctgcaggttttgtgaacactgcagcagggagcttcctggggaccacagggccctcgctcacctctgcaggacccactgcttcagttcttccctgtctttgtctcaggcactaggaaaaactagtctgggatgtctgggcctgggcttacagctgtagccacacttagtttttttctataatctcaggccagagaaagaacaatctttaaggcagagaaagaggctgtcttttgcctttcaacagctctgattaatctcttcctgatgcagagagactttggcaggactcccaaagccccagagccccccactttgaactttttattctcccaaacacttccgtcccaccctgctcctcctctccccatcctcacgtctgtgggtcatgtttctttccatctccgcatctggtcaagaatctgaccctctgtgttgggaacatgggtttagtgcgggatgaagaggttggggaagaatctcatctccatgatgctggggtgggggagggtcctttgatttggtacaagtctccaccctgccgggcttggttggctggttgtgctcgttgcataatctgggccctggggccagccctgtgaagctgccagggacagtgtgtgcaaggcagagctgccaaacaggccttgcaggcagcagccatggggaggcgggtgggggtggaggtgactcccagatgggctccacagaaatgtcagggagcaaggcctcaggtgggaaatccttctgcaggcatctaaagaagctatttctgtctcccactttcctgctgctcagcctgggcctctatccttgcctcccaggataatcttagcccccttctccagcttgggattgccagggctacacggagccagagccagtcctggctgccaggtggtgcctggaccactggcagagtccaggtgctagctgctctctttcccacaggccacccaggagccatagcttcccttctggggtcttctgtcataggggtagtagttgggcagtagggaggtaagaggagggtccagttctgggctgtgggtgggggctatgtgataccagactacagggtacagggtccctgtaccctgcccgaggccacccccaccagctggtacacgttccaagccatcctgttgcagccctgctcacctggggtgctgctgcctaccagacccctttctccctcggccacagaggatggggattggggctctgcgccattggcctactcatactatagtacactcctctgcctggcagtgacactgcccctgtgcctctcagccatgcttcttcttcatgatgggagaaagagaaggagggcagggcttggcaggactgtctgagagaatagggaccagcttgcccagggaatagggcacagcatgctggggctggaaggtagcaatgggccctgaaaagctccccaaggcccttccctctgcaggcaggaccctcctcccagcccaggttctggcaggcctcattcgctggcatggctgccagggcggttgcagggggcagggcaggtgtggtttacactctgtgctcaggcgcccactcccctttgttcctggggctccagcagggctctggtgtgctgctcaggccctacctggctgacgagagggatggagggcatgggctatgggtcccggagggccttgcccctgacctatgcacccccgttggctcacttcccccagcgacctggcatgtcaccagggaaccggatgcccatggctggcttgcaggtgggaccccctgctggctccccatttggtgcagcagctccgcttcgacctggcatgccacccaccatgatggatccattccgaaaacgcctgcttgtgccccaggcgcagcctcccatgcctgcccagcgccgggggtaagagcatcctgcttctctcactctgcctaactcagctctggtggtagcagagggtttccttctatcttaagagctttggtgactgaggatgactccaggctctcctgggggagagggtcctggagactggaggggcgttatgggagtgagtgtccttttttggaccattgacctcttaagtgggtttctgtcctccccaggttaaagaggaggaagatggcagataaggttctacctcagcgagtaagtgttaagaggacacctgggaggcctgcccagtggccaccttggggtgggtgtccatctctctcaaagctgggctgcagcaggaagggaggaaagagccaggctttggctgaagcaagctgatgagcttctgctaccttccttcagatccgggagcttgttccagagtctcaggcgtacatggatctcttggcttttgagcggaagctggaccagaccattgctcgcaagcggatggagatccaggaggccatcaaaaagcctctgacagtatgtgtggccctgaccacctctagccttcccaggtttccttgccttccacccccttgttttccaggggccaagcaagttgggctagagccgggtttttcacatgcaggatgcagcccactagtagagtacgaactcagttgaatgtgttggggccagtatgttttaaatgaatatatgacagtagaaaatcttaaaatacttcacagtagtacttaccatagtagtaaatggattctttcatgacatttttgtttctgataaatagatatgcagaccttgggtcataattgaaaatgtaaatcttatgggtggtggtcaaaagtttgaaaaccactagactaggggataaaggtagttcctttctccttccccttccccatccatagagaaattttcttttttttttttttttttttttctgagatggagtctcgctctttcacctaagctggagtgcagtgttgcgatctcggctcactgcaaccttcgcatcccaggttcaagtaattcttcttgcctcagcctcccgagtaactaggattacagatgcctgtcaccacgcccggctaatttttgtatttttagtatcgccatgttacccaggctggtctcgaactcctgactgcctcggcctcccaaagtgctgagattacaggcgtgagccactgcacccagccgagaagcttttcttaataataatgtagaacagtcccgagtggtgaagcctttccaggggactaggatattttggagccgtgatgggtgtttgggtttcatgtaagatgtgagccagagactggctgcgtgttactccatcatgccgtagcaccagtcccactgtgctggcattgttggtgatgcatctctttccccataaaatggtgagttccggccaggtgcggtggctcacacctgtaatctcagcactttaggaggccgaagtgggcagatcacctgaggtcaggagtttgagaccagcatggccaacatgttgaaataccatctttacaaaaacacaaaaaattagctgggcatggtggtgcgcacctgtagtcccagctacatgggagactgaggcaagagaatcgcttgaacctgggagtcagaggttgcaagtgagctgagatcgcgccactgcactccagcctgggtgacagagtgagaccatgtctaaaaaaaaaaaaggctgggactgggacttactacttctgattcccagtacctgacaaggtgcctggctggctcatggtgctcagtactgattgttgaatggttcatatgagaagatgcggtagcactgtgtcccagcatcttggtccacctccagttgtgattgcctttctctctttagcaaaagcgaaagcttcggatctacatttccaatacgttcagtcccagcaaggcggaaggcgatagtgcaggaactgcagggacccctgggggaaccccagcaggggacaaggtggcttcctgggaactccgagtggaaggaaaactgctggatgatgtgagttggggagggaggttctggagggaaggaggcctgtgtgggtttaagactgagaccaaggagtttgatactagcctgagcagcagagccagaccccatctctacaaaaaatttaaaaattagctgggtgcggtggcatgcacctgtagtcccagctactcataaggctgatgcaggaggatggcttgagcccaggaggtcgagcttcagtgagttatgatcacaccactgcacttcagcctgggtgacagagtgagattgtgtctcagaaaaaaaaagactgggccagacacttgggcgctcccagagaagtcctgccatagggaggggggcgctgctccaagcccgttggaggttgatttgtgtggttattacagtgttcctgcagatggcagtcgagtgtctcgaggaagtccctcgtgggctgcaagagggcaccatttccctgcctccagtctgcccagagtcctgcttccatccttcagggcccaggaatcttcagtatccggagctccagggctgaaatggggcttctctttcttgggatttagcatagcttgagatttgagagctcagcagcaccatctcacacccctttccatccccagcctagcaaacagaagaggaagttttcttcattctttaagagcctcgtcattgagctggacaaggagctgtacgggcctgacaatcacctggtggaggtgagagtgggcctggggcaaaagcaggctgatgtgcaggtttggcagggaaatggcctcagggcccttgggaggccctgtgttcacgcccacccccttggtgataagccatgcttccctccctgccagtggcaccggatgcccaccacccaggagacagatggcttccaagtaaaacggcctggagacctcaacgtcaagtgcaccctcctgctcatgctggatcatcaggtgacagagaccctggggtcatttctgggcccacagggacccctcaggaggggagctggttcctagaaacccttcctgtccctgccctattttcccactgttctactataagaacccgttctgactcccctccatccaactccagcctccccagtacaaattggacccccgattggcaaggctgctgggagtgcacacgcagacgagggccgccatcatgcaggccctgtggctttacatcaagcacaaccagctgcaggatgggcacgagcgggagtacatcaactgcaaccgttacttccgccaggttagccagatgccagcccccgttttctcagcccttgctttgccttgcctgctgggctactccttggccacagcctgcagactgctgccctcactggtcctggaatggtccactccactgtgcccacaagccaacgctgagcctttcgtatttcctccagatcttcagttgtggccgactccgtttctccgagattcccatgaagctggcagggttgctgcagcatccagaccccattgtcatcaaccatgtcattaggtaaatgcaaggagggggacaggaaggctcttctaagagcagattcacccttggcttgaactaaagccaaagaaagcatcaggtttctttttccctgagtgtgtgcagagaatgggccccagatttggcccaggtgggcaggatgaagtcagctatgtgccttccctccccatgtgctgcctgcagtgtcgaccctaacgaccagaagaagacagcctgttacgacatcgatgtggaggtggacgacccactgaaggcccaaatgagcaattttctggcctctaccaccaatcagcaggagatcgcctcccttgatgtcaaggtgggccctctggctccacagcttcctctggggcccaggattggggtgggctggctctgtccagcatttccatacatgtagcacctggaggacgggatgggaactctggctcagttgcttgcatgtaagctttgggggcacagtctgacacaggtaccctctccagatccatgagaccattgagtccatcaaccagctgaagacccagagagatttcatgctcagttttagcaccgacccccaggacttcatccaggaatggctccgttcccagcgccgagacctcaaggtgtagtcctctttcccgaggggactcctatgtaaagctctgggtgatttttacccacagcagttcccagggtggattagcccaggggtggggattatgctatggctttcctcctggctctttgcagatcatcactgatgtgattggaaatcctgaggaggagagacgagctgctttctaccaccagccctgggcccaggaagcagtaggcaggcacatctttgccaaggtgaggctctgccctgttttccctcctttggccgtgagtagcaaaggcctgagccacttggtttctcccttctccaggtgcagcagcgaaggcaggaactggaacaggtgctgggaattcgcctgacctaactgctcagggatctttcttcccagccctggagcctggagggagaccaccctctgggtccttgctggggccgcagacacgtaggctggggtgaggagtgtctgctgtcaccctctactctccagctttagtcttataaatgtagtgataggattccttgttgcttggtccccaaagccttatactttttgcattggctttaattgggttcagcagatgcctcctctgcccccctgcaggcaggcccaagtaggactgctggaggctgtgctttgacattgtaagacatttccgaaccaaaggctgctgggtttgcatgtttacagactccccctggggcgagggtcagagctggctctggggagctgggctaggaagaggaggtgcagcccagactcttcctagcctttctaaaccaaagttctttgccattcctacaagcccagccttgctgctggttttttcctttcctttgggtatttgcactattttgggagcaagttttctatgtgggagccactttttttgtacaggggtaagttgggggttttcagggagcctgttaggtgcctccttcttttctttcctcaatctatgcaagcggctctggccgccatcatctcctgggatgccagagggctgcctctccagcggcttgggccggggaggggacactccagttctctagcatggcctgaggtatggggtatgtgcatgtggaggccagggtaaggtgaatggggaggctgggaggactggtgttgccctttggagcttggtgaggagggtgggcctagggcttggcgagtgccacatctggcaggtttggaaatttccaaataaatccttttgtctattggtggtgcctggacctggtccttgaacagcacagccctcattaacagactggagtcctagaggacttggcccacagagctttattggagagatacacacaaaggctgtccactcacttccataatttcttgatggacatgtttttctcactgtccttctgcatgacctaggggtgggagagagaatgaacattaagttacgaacacacacatgccctagcccactgccccagagccaccactggcaaaggcacaaagatggaggcctataccttggctactgccatctcaaagtcctcctgagtgacatggactcgccgttctcgcagggcatacatgccagcttctgtgcacacgccctgaacaggaaaaggaaattgaggccccactgctgtgcccctcatctgtggcccttgagcccagagcttcctgcctctgccctgttttcagtgggtactccaattaccttcacttcagcccctgatgctcctggcatgagctcagcaatttttctcaggttgatcccccgggtcaggttcatcttccgagaatgaatcttcaaaatgtccagccgggcctggagatggcaaggaaaagcctgagccccacaccccacccccacagccagagccactttgcacagtgtccatcacaaacctcctcattggggggtgggaattcaatttttctgtcaatgcgccctgggcgaagcagtgccgagtccaggatatcaatcctattagtagccatgataacctgagcagagaaagcaagtggggatcagctaaacctcttcctcagcctgcgtggcacccaggccttccctgggcccatcccaaggatgctaccaccttaccttgatgttcttggtggcctcaaagccgtcgagctggttgagcaactccagcatcgtgcgctgcacttcactgtcccctccagaacccccctccagccgcgaggagccgatggagtcgatttcgtccatgaagatgatagatggagcatgttcccgtgccatgacaaacagctccctcaccattcttgcccctgtgtggaggccgagctggtgttagggagcttattagcttattagctctctaaccccctacccctacctcttgcttctcacattgctagccatggttaccttcccctatgaatttctgtaccagttcagagccagagacacgaataaaggtacagtccgtatgatgagccacagcccgggccaacagtgtcttcccagtgcctggaggtccatacagcagcactccctacaggggaacagcaggactcagggcagaaagctacacccctcatttcattcagtgaacatttaccgagtgctgggtcccttgctagatgttagggatacaaaaaaaaaaaaggaacatcaaggtcccttctatccaaaccacctcaccgccctaggaacacttccccagccactcttttcagggggagggccagcccaagcaagatgcagcctatcccggtgcctccccaacccctgcagtagggctggctggggcaggaggagtaagtacagcttggccctctcagagaagccctgctcctcaccttgggctgagcaatgcccagtgcttcgaagagctcaggatgcttaacaggcagctcgatcacttctttgatctccttgatctgtttgtccagtccaccaatcatctcataagttgaatctggtactttctccaccatcatcagtgacactaatgggtctaccttgttgggcaggatcttgtgcagagtgtagctgtcattccttagagccacccggcaattgggtgtcacctgggtgaagggggcgagtttcagaagtggtacagtaagagctgaccccaccaccaccaccacctcacctgctacactcacatcattgatgtcaatgtttttgtccacgtctacaacaaatttaccttcaggatgtacctaaagaaacaagggctcatgaccttccttgacagccaccaaatcactaatcctacccaggaagacctatgagaatcccacaataccttgacagaacacagaaccctgtctcccgaggctacacacaaaggggtgggaatgcagtggagaccgagctggtccctggggtcatgctgcttttaccttgaccaacactttcttcttatccatggcccggactacttcccccacataggagccctgctcctgcagcagctgtagctcctcccgcaataggcgaactagatggcaaacagacacagtggtcacctagctactcctttggagtctccaggacccaattctacgtgcatgagctaagcatcactcttattaaaggaaggccaaaggtcaaaattcatgtatttaaggaggctacaatagggctcaggaaaaagagatgcatgtgaaactactagatgatgacagggagaaaacagtaagcactgctgtgaagacacagtgcagggagataaggacagacctcagacaaactgcccacatgcggcttcccatctttctccactcacctttagcatttagttcgttcctctgtgcctgcagcctccggaggttttggctcttatcattcacaatcagctgtggcagacaagagacaaattccattattcaagggcaggagacaggaggaggtaggatcttggccaagacctcacaggtctgaatgagctgagggaagggcacagggcacctgcatgttgtttcagattctccagtatgatcctaatgaccctgccctgtccttcaagagtccctctggaccttacagcagccatcaaagaaggctgcttgtccaatactggtccaggagtaacagaatctaatggagaaaagttacagctggctcatgtaacaccaaatttcttgcaggaaggcaacaacacctggtggaaagattgttaggtgagaaacctgagttctagcccagccgctgtcaatcaaaagcaaagtaaaggtaagacaatctatttttaaaaatctagatctgttaccaaacggcacatgggtatagcatcagctaccctgcttcaagactactaaggtgaacgaataaaaacacatgaaaaagcattcaaaaatggtaaactaaacataatacctgcaaatgcacttggaattcagaattgtcttttgtggctttcccccatccaatttatattacagttgacacttgaacaacgcagggggttagggtgaaattgaaaatccatggacctgtccaaagttaaactactaacagcctaccgtaacagtataacgtaacactaacagactactgtttatgttgtctgtaaggcttactactggaagccataccttactgctggaagccttactggtaacacaaacatttgattaacaacataaacggtcctttttctatggtttagcgctttaggctagggctctgggttgcccaatttctttcattcagtctctatggaattagcattgtccagatccctcaatgatgcccttcctcacattctcacttcaccctcacccaacctcttggtgataaatttcaactcctgagcttatgtttcccttttataagaatccttttcattcgggcttcttccaaaagggttgacctttggctagaggtacctttactattaagatttgactcgaagatgtgtaacaaactgtgaacactaagaccctcaaagagatgggactggaggagaacaagagattgcttacttctgatacatacaccctactagctaagaaacaaacaagaaaggagaagcagcagcttcttccactgcactcccaaaggaattagatggatttgtggaagtccgtttccatcccccatcatcacccttcctagctccctctggagtccgtcctcacctggagttcttcaatcttggacagataatattggcggagtccgctgcctgccttcccctcctccagctccatctgaagacacagagtgagtcttaaacgacaggttaaacatccgagggggtaaagccacttgcagggcactttgaataaggcttgacaccaggtagctttgcgtagtagaaaaagtttggacttcggaggctcaggatctgggttctaatccctccctcccttggaaccctccattttcccaggactaaaataaaagaatgggaacgccgcctacctcatacgacttttaggaggaccgagaggcgatatgatatagacggggggcgctttgcactgcgtgaagtgctctacaagcccgaggtgtcagtactgacgaaggagccagcggaacggagccaaaggactggcgtcccgtctcctgcgacccgtgggccggccattcccgcgcccatcgcttccctcactcactccgcttctaccgcgtcttcctctcccagccttgccctgactcaccgagggcggcgctgacacagcagatccggtcgcaggcagcgtccagcatggactggtccaggcacctccgacccacccgacgctcctgccccggcccgctctccactcagatcacgctcgctccgcacccagccccgtaacctgccgggccgccactgcacccgccatacctgctctggtccgtcaagcgccatcttctctcttcagcagagaccgccggcatccgagccgtcttggcgcgcaagcgc

SEQ ID NO: 570 - DNA, 9321 bp, Homo sapiens
gctcccggagccctgcctgttccctgtccatccaggccagcagctgaaggagcctcacctgcctcccttctctgagtagcacggatttgaggtaagaaatcccccagaacccccattcccagtgcagcctgtggcagagatcggtccagtgtctcctccgactgccttagtgcccgctaaacgtttggggaggggagagctcggtgccaaactgctctcgtgtggggcaagtgctgagttaggctccttgggggactttacctcactgggccctgcttcctgggttctgtccttgcccttcagcttccaaacagggaagagcaggtgactactgagaggtgaggatggtggctctgggctaggtggccctgggaaaggtgggggatccccagtgcctggaggcagacccttctgaggatggtcacacgccttgtgcagcatcttggccaccccacagggctgaaggagaaggaacctggctgggagcttagttcatgtctgggttttccctccatgtccaggagaagcagcgaagatgtccagcgagcctccccctccttatcctgggggccccacagccccacttctggaagagaaaagtggagccccgcccaccccaggtagggggtcactgttcctgaggctccatattgcagccccctgccgccatggcatggttgggactctctaagtggtgatgcccactccagggttacccctgggccccatctgtgtcccaaaacagtggcctctggtcgagctcatcgtgcagaggctccagctcagtctcctctttctgcctctctctgtccaggccgttcctccccagctgtgatgcagccccctccaggcatgccactgccccctgcggacattggccccccaccctatgagccgccgggtcacccaatgccccagcctggcttcatcccaccacacatgagtgcagatggcacctacatgcctccgggtgagtggggaagggatctgaggggagcatggggaactcctggctgctgtctggcctgcgctggctgtcctcagtacaggtgggcatctgctgtagggcagggactccaacacgcccaaccagcccttgcctagggctcaggctgtgtgtggacagggactgtggacgtgggaaggtgggactgctcttattcaggctggtcaggaagggctggtccttggcacaccaggacctgacatgggtggggaggggcgccttgtgtgcaggagaggggtgggtgacccgcaaggctttccctctcttggtcatgggcttgaggctgagtgccctgtccttgcatgctggagacagacagaggagcagagggaccgggccatgtgcctggctctctgccacatctgtcatgggccccaaggggtggggaccaggaagggctgggagaatgtggccccacttgacttagggccccagctgtaaggcctcccactggcccgttaggagggcggtaggaggtctgaggcgtagccttgcacgctgggcgctgtggaccgtggggctttgcgccaatctctttgtctggtgcaggtggcaggccagtgacctctcgcctccatcttctgtgccattccaggtttctaccctcctccaggcccccacccacccatgggctactaccccccagggccctacacgccagggccctaccctggccctgggggccacacagccacagtcctggtcccttcaggagctgccaccacggtgacagtgctgcagggagagatctttgagggagcgcctgtgcagacggtgtgtccccactgccagcaggccatcaccaccaagatctcctacgagattggcttgatgaatttcgtgctgggtttcttctgttgcttcatggggtaggtggtgtgggcactggtagggtgggggctgcaccagggtcaactggctgcctctgcctcctccgcagcaggcctcagcctgttcttccctgtctctgattcagatgtgatctgggctgctgcctgatcccctgcctcatcaatgacttcaaggatgtgacgcacacatgccccagctgcaaagcctacatctacacgtacaagcgcctgtgctaacggagctgggactcgggactcccccgcctgtcagtctggccccctgtgctttgctccctgtgctcagtggtcactttcccgctcccacttggggctgggagccgtgccaccatcccctagaagtcctgtcctcttcaccctgccctacctgagccgctgactcttctggcaaaaattctgttgggatttaaggccaagggtcagtgggtggcagggggctgacaatgagcttgtgtgttgttggtctgcttggtgtgtgtgatcgggaagataagctgggaggggtctcctgctggggtcctgatgcctctgtttccaaacaaggtacaggttcagtccagactctttccccctgggaccaacagcagccagagcagttagccagttagtccccaggcctgtggccacaggcgtttctgacctgctgggccgagaatgggtaagttgtctggagtcaggtgggcccacgtaggacagggtcacaaagcctgggtttgtttctgggtactttgcgcctctggggtgctagaggtggggcatggtggctggaagtaaaactgccaactctggccctcagaactctcaggtatagaagcccaggatgtctaataccctgtcccagtgcccgagagctgcctggtgtcaggtagagaggacactgtacctgggtgaatgatcagaccctggtagctaagaaggaacttgtccctttgagtcagtgtgcagaccccctttcaggccatgcctctgtgaaccctgtattgctggggccggaaggagcccctgagcctagccccttcccgtctgccctgtgtcctcactgcgtgtgggtatgacctctgcctggtggctggtgtatcccaactgggcaagagatggcagagggtcccccttgtgggtgcgcttggatgtgcagagccttctccatggattttcttccctgtaagtgccgggcccctcaccccagctgacaggctgttgctgtgcctgctcacacctgctcctgcaggcacactgggctagggacgaggaaggagcagccacaagtggtagaactgccttggtggacaccagcctcgccctgtctttatttcctgaatggtttgtgaacttgctcacctggaccactgtatcctgccactgtccttcctggtctcgcactgccactgcatggcctcctgtcactgtgaatcgtggcccagtctcagtttgtagtttctcattaaattggccctttcactcccccgccctgggcctctgctctcttgcctggcttccttcttttttgagggaaagagggtggggctgcaggcagtctactggcaggacgggaggctgagtcctcagggtctcacaccctcagtgctgatgccatgccaactgcctgggacaacaccaacacgtaaggacctaattaaaccaaaccagagtcgggtgtagaccagccctgggatttccagctgtgactgggccagggcacacgttggtctcggcagtggctgtaaggtcaccttccttcctctgatgctggtttcaaccatctatatatggcatccacgcatgggatctgcaagctggagccctcctacccgcaggcttgagcacagcatcatccagccctggggaggcgcacccttaagcaacacagactgggctgaggctgacaggcagaagactaacagagcgcagtctgcacacgcaggttctgggcgacctctggccctggccatctctgcactaactcatctgaattatgaaggtggcagtcttggtcagtagtttaaagagtttccctactttttaaccctttttgaaataaaacttttacaggtagtagattcctattaataaaattatttaagttcatgtttctcttttagagaatgaattgtttaaatacaaatatgtgcttttttaaaacccttatttttaaatatatatatatattttaaaaaaaccttttaagtaggaaacctctaaggtatttctgagctaaaaaatagcagtgctggatacactttaaagatctttgcaagacggttagagtgactttgctttggagactagaggtgctggagagtagacccagagcaggaggtggctgctgggagccatgatggacgatgtccactccccacacagacataacatgcccttgcttctgagggactctcctatggggaggtggcttgacccacccggtgccaggaggcagggaaggaggtagcttgcaaagcccactttattgagtgctggagcatttacacagcgcggaggaggagataagctggggctgagcaaaccgcacccaaggggttagagggattctgggtgagagggatgagctcccaaggcctctgaggcttccacccacacccaccctcactcccagggtccaagagaggcccagaagttgtacagcagcatccagcaaggccccctcgcacagcttggacttacaggccactcacctccaacaggggagatagtcacccatgtactgcaaaaacagggactaccggaagcagcctagggcccagaagtgtggaagcctggagtagagctgggtcgggggccaggcttgctgcactgtgccgactgctcccagggtgacggcctgtgcccagtgcggaatatggcccatagagaggatgctgtcaggcagaggctctagcatctggcttttattggttgcctttcttaaacccagcattttttaaaaagtcacctgaggtggtagtttagtcagggctggagaaaggggtaggccagtggtcagtcgggaggagggtaccggtgtggcatgatgggtgcttcacatgtagtaccaggccaagagtccagcagctagggccacaccagcggccaggatgaactggaggctgggcttcctcagcacagccatagctgttcggaagggacagctgctgccctccagggcacctgtgtggcagcaccaataggagacatggcatcagtggagtctcctgctacacctgccccaggaggggagctcaggacacacagacctacctttgtcttgttcagcagcgtagaaagggcatttacgcatgtctcctttcccatcgtgtacagggaacccatcctccaaggtctctctggccagtgtggagccggcctggtccagttcattgaatatctgcaggagcagaggatcgactgagccatctttgggctgcccatactttttttttttttttaaatgtcttttgagatgaggtctctgttgcccaggctagagtgcagtgttatgaacatggctaactcactgcagcctcaaactcctaggctcaagtggtcctcccaccttatcctcctacgtgtgtgtaccaccatacctggctaatttttaaattttgtggggagatggtgtctcaccttggttgcccaggctggtcttcaactcctggggtcaagtaatgcccctgcctcagcctcccaaagtgctgggattacaggcatgagctactgcgcctggctacactctccttttagaggacgccctccagagagagtgagctggagcaggtgagcttgctcaggtgtgccaactacacagcaagcagcactggtgggcggcagctgcactgcctgatggtcttccctccctagcaagagctctggggaggtgtggatattggtaccccaagaaggctgccaaatgctgggtctcccctgggaactgaccagagatgtagccttctctgaggtggctcaagccactgaaactaccacagcacagacaggagggcatgagtacatccccatttctaggtgctggttatttttttatcaagaagcaacagaaaacctggaacatgggagaatgagactgtggcagggcatactcatcctgagtgccctgggaggcctcagtggaagctgacaggacctggggacagagtaagcttccccaggttcagcctcatctaaaggctacttgtaaacagagcttatttactctccttggtggcactggctctctattaacttataaagcagggcttctcagagcaaaacttgaaaagaaaattaaccattcttcaagaccagcatcctgcaatgagggaggaagccagctccattcttccagacccctctatgtgcgagaggactcacccttcccaaaacactacccactggcatctatcacaccaggcctccatgctgggaaccacccactgggcccacaagctctggtggccaatctggtggccaccttcctctcggcaccctgcagctcatctgtcctaatgccatgtgtgccttcatgggccactatggatctgctaccactgtcaaagtttccctcttcagccctagcagctggcagcccccaatagtacctgcatgttatactcaaaagccttgttggcctcctccacgatcctctctttggtcttcatgttcaggtccagggcgttcatcctggcccggtagagctgcttgaactgctgggcattgtccacattctcaaacaggtagaactgggtcccttcccctgtgctggggagtttcagtgctcgctgggccaccttcttcagcacctggccccccgagagatcccccatgtagcgggtgtatgcatgggccaccagtagctccggctcgttctgccctatgtagtggatccgctccacgtacttctgggcagccttggggcactgcacctgctcctcccagttttcaccaaagaaatactccatgtccttggtcagcgcctccttccggtgcagctccatggggaagtacaaaggggcaaaggctggatggtccttgttgcgctccatttcctcctcgagggctgagtatgtgaagtaaagtgccgtggtggccagctgtggaggtgacaggaggaggccagctatgcctgagcacaccacatccgagcagctggatgcagaggctcaagtgacaacccccaaccccaaagacccaatcctatggtccatttttatgtagtgaattatttaacacacaaggaagcttttgtttcttaaaggaatggcatggtgaagtctttggaacacgcatacttttgcttccttcacaccactatgttattctatctaagccatgagaaccaattttttttttttttggcggggtaaagagtctcgctctgtcacccaggctggagtacagtgggacgatctcggctcactgtaacctccgcctcccaggttcaagtgactctcccacctcagcctcccaagtagctgggagtacaggcacgcgccaccacacccggctaatttttgtattcttagtagagacagggtttcaccatgttggccaggctggtctcaaactcctggcctcaagtgatccacctgcctcggcctcccaaagtgctgggattacagacatgagccactgtacccagccgagagccagagcttaacgtcaagaaggaatggagtgtggagaaaagcccagcttttccctcagagtggctccaggggcacttttctcatgggaccaaggcccccaccccaaccccatatgacagtctggaacccaatgcggggcacaaaccttaaacagctccttcttaatgttgcctttcaagaagtccttgacaaactgggtgttttctgcccggtcgtgtgcttccttggtcccttccttcaggagctccgagaggtcagccattctgtggagagatgggaggtgtttgtgtgtcaattagcccttcccagctttccagaaaggaccatagagagaagattgagtccacaccccaaggtgaccacctgttgtactggaggctggggcttctcagacacttcactccaacacaaatagcagcaacttgtcagggaacacaggacaagcagacatgacattctgctccaaggactcaggacacaagggataactgtggcctgctccttgagagtagtacccacgtccatgtgtctgtgttgggaaccacccaaatgagcaatgctttgcttctgtggccacctagtggtcgaagagacacacatctgtattcccttcagtatttgctggcttctctaagaacagcctgccttggaacgtgtcttctggaattcacacacctcagtaaggctgtgaccatgggtctcctcagatggccctactgccttcctcccaccttggacccacagcttctttgagactatatgtgactaggaccaagcacggaaggatgcaaaggagacaaccgagaggctagggccaggacgctgggtttgtgctgcttaacgaaattacacagttgtaaaggtgtgtggatggatggacaaggtagaaaacatgtgatcctaaagatggtggtacttgggcaggggcttacatgtgtccacacaatccatctacaagagtgagaaaaatttggccttatcatggtctggcttctgctgtcttctttaggagattagctcgttatcatccatgtgctgagaatcaatttattattagcaattatttcaagggataaaaaaaaaacttggccaatgacagggctatgagaggctaatgatgcagaacagggcctggaagctcaggtttagcatgagctgtccctatacagagtaaggaaaggctgccctgcagtcttttatgtggtaaaagactgaacagagccagctttgcctgcgtttaccctttctcagcccagatgaggaaacgcacaagtttttaaaaagaaaaaaggataactaccatcaaatcctatcagcactcccaggagcacctgccctgcctccttggatgagacaatggaccagtggggagagttctaagcagccgaagctgtatgcggtccctgcagggccaagcaggcacccaggggtccagagctcatggcccatggccactccccagtgctgccaacagacaaaaccaggtgtgctgagcacgacaggtgctgggcccacctgattcagtgcagccagcccccatcgctcacctcatttggttctccttttctagggccccagagttctttttttctgactcgtctaccccctctgaggtttccacttccgctgacattgctgctgggtgtggttcttgctgctctcgctcctctggtcctgcagagacacaaggagctggtgatgtggcacccacggcagtcacttccccaaatacctgtcggttctgctttcctcagagcgaatgtaaccaaggtgacacccacacaccccaggattgttttctttaaaataaagc

SEQ ID NO: 571 - DNA, 1236 bp, Homo sapiens
taaaaataagttttattgacataatttacgtaccattcaattcacccatttaaagtgtacaattcagtggtttttagttattcacagaatcgttcaactgttgctacaatcggtttcagagcatcttcgttaccccagaaggagattccatgttccccatttcccctctcccccagacctaaacagctactaatgtactttccgtttctatgggtttgcctattggggacatttcatataagtgaaatcatacagtatgtggccttttgtgtctggcttctctcaccaagcatgttttcagagttcatgctgtagggtgtcagtgcttccttcctttttatagccgaatcgtcttccattgtctgggcagcctacggttttgtttatccactttgttgatggacatttgggttgtttccactttttggctattatgattcatgctgctgtgaacatttgtgtacaaatttctgtgtagacaggttttcatttcttttgggcagataactaggggtggaattgctgggtcatctggtaactctaggtttaaccttttgaggaactgccagactgttcctcaaaaggggaacaggggctggcagttcttcaaaaggtttgcaggggctgtcccctaccagcagtgtatgagggttccagtttttctacataatgcctattactgtctttttaaattttagccatcctagtagataggaaatggtctccttgtggttttggttttcatttcccttatgaaaagacgctcagtagtttttcatgtgcttttggccatttgtcttttgagaagtctttgttcaaatccttttaaaaattgggttgtctttctgttattgagttgagttctttgtatttcttaatacaagtcctttatcagatctatgaattataaaatgtgatggtatcctttgaagcacaagagtttttcattctgatgacatccactttaagttttctttcttttgttgctttgcttttggtgtcatatctaagaaaccactgcctaatcgaaggtcataaagattgatgcctgcattttcttctaacagctttttgatctctttcagttttcaaacttccatggtactttatagttgaacccaagagcttggacttggttcctctggccctgcccctgatttgttaaactttatattcaaacttatgtgccctccatcccctgcaggtgctgggctgtctgggaaacactcctttccc

SEQ ID NO: 572 - DNA, 626 bp, Homo sapiens
tccactttctgaagtttcagttatggtcaacagtggtccaaaaatattaaatggaaaacttcagaaataaacagttcataagttttaaattacatgctttctgagtagcatgatgaaatcttgtttcaacctgcttgggacatgaattatccctttgtccatcatatgcacgttgtatatgttactcacccgatagtcacttagcagctgtcttgattattaggttgactctcgtggtattgcagtgcttgtgttcagttcaataaagttaaggttcaataaagttaaaataaaggttcaataaagttaacctttattttacgtaatgaccctagggcacaagaatagtgatgatggcatattgtcatgattttttttattatttaatatcttattgtgcctaatttacaaattagactttctcataggtgtgtatatttaggaaaaaacatagtacgtgtaaggttcagtactatctgcggtttcaggcatccactggggttctgggaacatattccctgtggataaagggggactactatagtgaatttctattttcccttgtatatgcagtttcttttgaatgcctcagtccttgatgtttggctcctaaaaaaaaaggaaaa

SEQ ID NO: 573 - DNA, 516 bp, Homo sapiens
cagtatactttgagagcttcataatagttgtatgagatagattctaccagcgtaagtgttctctgggtatacagactcattcttggtgctttctactctactgtcatccaagaatcctctaacttaatcatggattcttcgtatctcacaacacatcttgtctttccatttactcgttttattttagatcctttatggaattatagttttctttatgtagagcctatacatttatagttttgttattctttgttacttatagcttttttgtttgctattgaaacgtgaccttccattataagtcgcatattatctgcatataaaaagtgattgacttcacatactttgtaaatggcagccttaagtgaatttactggtttttttggacagcattttagtattttttccgaagatggccatagtatctgcagttaatgatgactttctcacctcttctgaaatatttgtacctttatcttcttgtgcagttggattggctagtgcttccagtattaa

SEQ ID NO: 574 - DNA, 176 bp, Homo sapiens
tttgtttaacagatctaccatcgggtctttttcagggacaatttgttagtttattttctttcttttagtgggccatatttttctgtttctttgtataccttgtgacttttttgttgaaaactggatgcttaaatttaatttaatgtggtaattctggaaattaggtagtatccctt

SEQ ID NO: 575 - DNA, 1121 bp, Homo sapiens
tttttttgtatttttagtagagacagggtttttctgtgttagccaggatggtctcgatctcctgaccttgtgatccacccacctcagcctcccaaagtgctgggattacaggcctgagccaccacgcccagcctattttgtgtttttttaaagctaactaccattaagatcattatagaagtttggtataatgaagatttgggtttttcagtccaatgagtttccatattcttgaatgaaaaagatccacatttcatcatttgcctgtttcattttcttttagtacttttgaacttagtttggtcagaaaatactagaattttagtttgatctaaagaaccagcttatataacttgctgttgccatgtacatttgtatgtctttgctgtgtcaaataactggatctgattttagctctttttaagtggtgaaagcaatgcatttttattcttcaaattcagacattgaatgtgtatcacaatgtgtgtgcttacctttaatcctctctcccacgacaattaggaacacgtttctccaattactgttggcagactaccaagaaaaatgttgaattagaatcccagcaccgggcacggtggctcacgcctgtgatcctagcactttgggaggccaaagcaggcggatcacctgaggtcaggagttcgagaccagcagggccaacatggcgaaaccccgactctactaaaaatacaaaaattagccaggcatggtggtgggcgcctgtaatcccaactactcaggaggctgaggcaggagaattgcttgaacctgggagttggaggtcacggtgagctgatatcacgccattgcactccagcctgggcaacagagcaagactctgtctcaatcaatctatccatcaatcgataagaaccccagattgtatagctacatgttttagcccccttttcaaagtatatgttctccttggtacttattttgacattctgacttttctacatatgctttatcaacctcttaattaaaccatcattgtctattttgagagataactgcgctgcttcccgttgtgtgttttaaatgttattgttcagtttgagtcaaataaaaggatatttaatctgtggtgccttgacatt

SEQ ID NO: 576 - DNA, 192 bp, Homo sapiens
aagaaatggcatcttagtgtaattataatttgcatttctcttatgaattaagttgaatttgcaaaaatatgcttaaggcacatttttacacccattttcggtgaattgcttgttcgtgtatcttactcatttttctagaatgtctagtcccctttttcttcactcgatataaaaagtattttttaaatatta

SEQ ID NO: 577 - DNA, 5153 bp, Homo sapiens
gaaccttcacataaagtgtatttacagcgtctgtggtagccagcccttcctcctctactttctaggaggggatagccaataactaggaatttaatgacagatttttttttctttgaaataaatggccagagtttctccattttagaattttgttgtcctccttaatcatctgcttacctagtcattactcaatctgcagaaacttcataaaggaaaagtgctgcattgtttttacaaataacagtttgtagggaaaatatgacaaacctcaactatgggagttgtccacaatacaaaattttgaaaaaacattacatagtgataatatcatacttggttgttaggcttgttgcttccccacatcagaggcatctaatgatttatcttttgtaattgctgtgaacttttttaaataagccatttagtgtgaaattgtcatgtatcaaatggctattggaaatggactttactcaattttaattccactgtaaataaggacggagtcattcctacaaggctctcttcagagaaatagattaaaagtccaatttccaggtattattagtatagttatgccgctgggccacatcctcaacaacagctgatccctcttgtataaatatgttaactgtgcagaacagttatgttatgggacaaatataatggtcattatggtcagattggttgatgccacaccagtcaaggtagagtctgatagggcagtatcttaataaccctacccatgacttaactgttggatttgaaaggaaaacgtaggatttgctcttgtccccttacccgccacaaaattttgataatttgtttaaaagggagaggcagaggaaaagactagaagcataaatagctgctttaggtttgccagaggcacatagcttaacattagttcttaatatcgatgttatttttactaatgtaattaatcaacagagcaccaagattctttcatggtgaaaagggtgggcttctgttttggtatcttaaaatgtttcttttaaaatatacatcacctgtgtgagaaccaggaccacctgggagagtgatgaatcattggctccactcaaaagcattgctttactgagttttaaatttcacactgttttgccgctcaagaaaggtcttaaagtagttaaaggatgccagcaatagtgcgaatagaattttcggttgtctgcataataaaaacacccattgcagcatgattggtatgttgctcttgcattattgggaatggtaaatcagttatgggctagaaactatggaatggccgtcctcatatgtgatgggattgctgattcagacttccctattttccatacaattttgttatgtgcagagttctaaagccattttataatactgcagtatcccccccccccccacctttttttttttgagacggactgtctgttgcccaggctggagtacagtggcgcaatcttggctcactgcaacctccacctccctggttcaagcaattcccctgcctcagcctcccatgtagctgggattacgggcgcacaccaccacacctggctaatttgtattcttagtagagacggggtttcaccatgttgaccagactggtctcgaactcctgacctcaggcaatctgcccgcctcagcctcccaaagtgctggaattacaggtgtgagccaccgtgcccggccaagtatctcttttctacagccttattaaactaactacaaacatttattttccaatttagttttactttcagtgcatatcaaagttgttgtactcttcagaccaacaaattaacttgagggcaaattacatagctttccatgtacccttttttcctcaggtgctaatcaaaggctctgaaaatggatactgctttagtgatgtctgctttattcttaaaatgcttatttcttttgctagatgtaaagatttggtgttaacaaaagtggttttaatatgtaaatatgaatgaatgcctttagtttaccctgtttgtctattattaatctgttttcatttatccttcatagaggaggatcctttcatgatcttgaatacatttcattagatattgttgcattttaagaatgaaaatacaactgttttctgtcttagattaatcctgctgctatgagaaactgaaaatcaagaatgtgatgcactttttacattactatataccatacatataccataggttgctttgatacctttcctgtagcacagccactaacaagagtgaatgaattataaaattctttttgggagggaatcaatacaagtaactaattcttagctgatattgtcctatgaaggacaataacttaggaatataagaattctgttaatagtacactttttggccttaaatgtcttctactactgaaaatagtttaaatcttagctttgtttctattattccctctctctgcctcagaaagaggaattgggaagaatggcttaaaggacgtggtgtcattgatttgttgctgatcttttagaaaacatttgtctatgtaagctggggacttattttttgtttgtatatagaggggaaatagtgctgccctgaaccaatcagatttagtttaaatcaaatcaatcaaaactccagctgtttctcttgtctttttacttagcaaaggaaaactttagtgaatgctacttgacaagaagaaaagtcatttctcaagcacatacccaaacttgaaggtgattgaacccaaaataatgggtgggaaacaccaaatgaggtggaggaatgagaaagatgtgtgggccaaagctatctggttatattttgatgttgccaatatcgcaaagccaaaattttaatttgcttatttaatatatttgttggccagagatctatttttatatcaatgtgccttgcatgtatattaaaaaaaaaaaattggaaacgccatgtagtaatgcctgagatagtcgatggttcttaccacctcactaatttttatgcagtatgaaatgctcattctattgcccaactggtgctctctgtttaaagttacagatcttgcgaaactggaactattttataagctggggaagtgatttactttttttgttgtatcttttttgttcttagtctgttagtggctgtcctgtagtgggaaatagtaaaaggattcttcactcccttctcccctcagcaccttcttcaagtaaacatttcttgtgtgctttgaaaaaagtttcagcttgctgtctcttttagtgttttaaagaagtgttatacaaagcattgtttgcaaaatatagggagataatggagtccactttaatttggaattctgtgtgagctatgatccaagttatcagctctttccaactttaaaaattttgttaaaagcaccttgcttagaaaattttaaatatttatgtctgcaacaattgtctcaaaataataaactgtgcaattcttgtcattaaaaaaaaaaaagatctgaattttccctaatgtgacttgttagtttctctctgtatttcctgccagtgtaaatgtgaaagctttgcttgcattacgttttagaaatgcattttgcacactcgaattttgccgaagctccgtgaaaaggttagatctaagtagatgaataaagctatgcacatgttttgaaagtttaatttgtgtgtcattaccaaaagtgaccgatttgtccttactactttgctgttgttagctttaccatctttggaaacttggctcaaagttacatagttctgggctagctcatcagtggaactaggagagaggaaaactggcacctattttaataaagttcaatttaaacgagagcttgacttgtatctattaaagagcttttcttgaaacagggcagttttatcagctttacaaatcattggatgctcttccttagtaatattttggtttatttgatcaaatagaaatggaaagtaattcaaactgaaagacccttttttgtcatatggaacttggtgacgattttttgtcttaaagctggtttaaaggtaggataggcttttacctttattgctttagcataaatttggtttactgaattgactggcttgagattagaattattcagttgtttgtaagatcaaagcactggttgttttaaagataacgtgtatcttttaaaaaattgcccaagctgattagaacaagtttaggagttgggtacatttggttcaagtgctgcaatctgtatgtactaaatagctttactttgtgtatgtgtacttataatgtgtagatgtactactacccaggttttgtcaaatcatcttttttaaagtttttttttttttaattggttcaggacctttgtaggagaggctaatatgtttaagtagaagatattactgatagcattttccccatgctcctacataaaaaataaatatttccattttatagctttttcaatatacagaagagggttacttcttcatcaagtatattgttgcctttgaggacacagcaaaacccttctatatgtatcttcattgatagtggcagttaaaaactaagttatccagttaagacttaaaaggtgacccatattaattgcatggccttaaaaggcagaaatgcaggagtgtagcaagcatcattttagatggctatggttcctcttccgcatctgtcagtagttcacttatgttcagtcttagaacctactggaggagtgaagtaatttctctgtctcgtgcagaggcactaaggagctgagttacctcttaatctgggggaatggataataagtggagtacagttatgttaaaggatgttccccccgctcaaaaaaaagtttcaatgtttgttttgcccagtcaaaaatataggtcttttctacatataagaacagtcaccagaaattttcccttttgctaaatgcttaggtatttgctatagctgtttctgatgtcatggattctgaggaagtgtcatttacgtgatgatcttcctttattgatgtcttcatcatgttcagtgttttaaaaatataaattacaaacactctacaaccatacccagatttacttattttatcagaaaaaaaacttgagaaatttgtagatcaaattgagagacaataagtgtacattgttgaataaaaaattttaaagtttctga

SEQ ID NO: 578 - DNA, 5153 bp, Homo sapiens; identical to SEQ ID NO: 577

SEQ ID NO: 579 - DNA, 25012 bp, Homo sapiens
tgatggaggtgacatttcaaggagaatatcctgctactttggtttcacagggtgctgaaataattccctcaggaactgagcatcctgtgtttcccaaggcttacgagctggagaaacggactagtcctcaagttctgggtagcattctaaaatctgggactactagtgagagtggagccttatccttggaacccagtcatataggtgacctgcagaaagcagacaccagtagtcaaggtgctttagtgtttctctcaaaggactacgagatagaaagtcaaaatcctctggcctctcctacgaacactttgttaggctctgccaaagaacagagataccagagaggcctagaaaggaatgatagctggggttcttttgacctgagggctgctattgtatatcacactaaaggtaactcatttgtttcctatacaaagatttttattggccaatttagtatattgtttatattaagagaattttaagagaattagttgttcatattaagagtattttaagagaatgacaatgtggataagcagctggtgtcaaactaattcagggtccttggaactagtatgattaaaatttagaagaaatgttcacttttccaacttaaaaggatttttaaaaatacaaacataattgacctacctggttcaaagaacagaagtgaggagaacttgcttaaaggtattgatgttatattttctcttgactgagtgcttgaaaaaaaattttattgaacatatgttctccttccgtggcttttttgtctttgcttttttgttttgttttgtgttttttttctttgagatggagtctcactctcttgccaggctggagtgcagtggcgtaatcccggcccactgcaacctccacctcccaggttcaagtgattctcctgcctcagcctcctgagtagctgagattacaggcacgcaccaccatgcccggctaatttttgtatttttagtagagacggggtttcaccatgttggccaggatggtcttgacctcttgaccttgtgatccacccacggcctcccaaagtgctgggattacaggtgtgagccaccacacccatttgcttatttgtttttgagacagagtctcactctctcacccaggctggagtgcagtggtgtgatcttggctcactgcaacctccgcctcttgggttcaggtgattctcctgcctcagcctcccgagtagctgggattacagccatgcgccaccacgcccagctaatttttgtattttcagtagacacgggtttccccgtgttggccaggctgatctcaaacttctgacctcgtgatccgcccgcctctgcttcccaaagtgctgtgattacaggtgtgagccaccgtgcccagcctctcctttgctttttatatcatatgcgtctttaatagtgagctcatttaatagttctaatttgattaaaatgagtagaagcactgtttttgaagaggagactgataagtcttggagtaatggatgccagtttgtaactggaaaataagttagacaaatcacagtgtcaagtatgattagcatagttgagaccaggctcttgggattctccttttcatagccctaaagcccaagtttaaagggaaccaggtatctttcaagtttcacgctaataactttcttttcttttttttctttttttttttttttttttttgagatggagtcttactcttgtcacccaggctggagtgcagtggcgcaatcttgactcactgcaacctccgcctcccgggttcaagtgattctcctgcctcagcctcccacgtagctgggattacaggtgcccaccaccacgcctggctaatttttatatttttagtagagatgaggtttcaccgtgttggccaggctggtctcaaactcctgacctcaggtgatccacccacctgggtctcccaaagtgctgggattacaggtgtgagccaccgtgccaggcctcatgttaatcactttcttagaatgtggtttgtttgtgtcttaaagaaaaattcgctgtatggcataactgtaatctaaatccttagagcaaataatgaggtttaacgatgatgtttatatccttttgcttttgagaacagtgggtttcagtcttcccatctttcctacctcttcctcctttctctaacagaaatgtatgctccatgcatgcatgtacacacttaatacatagtgcacattcccattttaacagtggctcatttaggcagtgacttacaattgcagggaaaggggaccataccagattgtgggaattgggtaattaccatattctctctggaagaaatactgcctcagggatgaataacaaagtgatttgtgacttctaagcaaatttcctagtctgcatacgtttccttatctgcaagctggaagacattgagtataataaatagatgtccttttaatatcattttacttccttaaaaatggaagtagtagaattgcttaatggaagtttaggaatcctcacagataacatttacctgatttcacttattctccagctctgctctttgaaggtaaatacaggagttggttgtttttagcaatgttagggcaaaaagataaatgcttcgttttttaagacatgtgttatacattagttaacctctgccaggagagttgggttttttggtattgttttctgtgccgtctgccctctagagactattactggaaaatgtttaccgaagtattttgcactggcgatcattgtgtgagcctgagagggtatctggttgtgttgtgttctcttaccacctccaaaatattctgggaggcccagtgtggtgggtcatgactgtaatcccagcactttgggaggccgaagtgggaggatcacttgagctcaggaatttgagaccagcctgggcaacaatgtgtagtcccagctacttgggaggcttaggagggaggatcacttgtccctgggagatccaggtctgcagtgagctatgtttgcaccactgcactcaggcctgggcaacagagtgagaccgtgtctcaaaacaaaacaacaaaatgtgtaggatatgttccattaggtaactggttaatagttcttatgtacaatttctattaggtggaattgcaggccatttttaaattggaatgttaacctgaatttactctttatgcattttccctatccatgggctagctgaatatgaaatcagtggtatttatataagctgaatacccctatatgggtgcagttatatttagttttgctggtattaatgaaaaaatttgctgtaggtaaagtgtcatcttgagttctgtatttggacatgattggaaattaatcagattggcatcaaaatttttacccctctagaacaataaataatactcagttcaattgggttccagagtagcaagttctttgaattcctgccaaatgttgattggtccattagcagtccattggccactcatttttctttacttgaattatatttggagatcttttataagtgaagccttttttttttaaagttaactctaaaagaagtaataatcagttgggctactggaatatcctttaagaacatctgtattattttctttgtgctttagtgtagttttcagatgttcagtagtaatctctaagtgagtagttgaagttgggcttagaattggaagttctctgcatttctcctgacttcaaaaataagcccttcagcaacttaatttggaaatagtgggtaagagagtgcgttatgtcacttctttaagaatggtgcactatttatttaacttatataaagaaaggtgtttttattttgttttttggtggttttttttttttttgagatggggtcttgctctgttgcccaggctggagtgcagtgtcacagtcttggctcactgcaacctccgccccctgggttcaagcgattctcctgcctcagcctcctgagtagctgggattacaggtgcacgccaccatgcctggctaattttgtatttttagtagagacagggttttaccgtgttggtcaggctggtctcctgacctcatgagccacctgccttggcctcccaaagtgctgggattacgggtgtgagccactgcacccaacaaagaaaggtgtttatttgactcaaggttttggcggctgggaagtccaagtgcatggcggcagcttctggcaagggctttttttaatacaggaagtttttagattaagcaattacttggaaccttaagcgtactatggatttttaaaaatttgagtgttaagtacaattgagggtatgaagtaaagatacaatagagcataaaaaggggatttgtgctgggtgcggtggctcacgcctgtaatcccagcactttgggaggccaaggagggtggatcacgaggtcaggagatcgaggccatcctggctaacagtgaaaccccatctctactaaaaatacaaaaaattagccgggcgtggtagcaggcacctgtagtcccagctacttgggaggctgaggcaggagaatggcgtgaacccgggaggtggaagttgcagtgagctgagatcgtgccactgcactccagcctggacgacagagcaaggctccttctaaaaaaaaaaagggtggggggtggcgggatttgtgtggattctaattccttgtgtgggattttccttttagctgttttttttttttttttttttaaagagacaggatctcattgtcacccaggctggagtgcagtggcactatcgtagctcattgcagcctggaactgggctgaagctctcctccttcctcagcctcctgagtagctagtactacaggtgtatgccaccatgcctggcctcttttagctttttatataatatgttatgccattaacttttctctttttttttgagacagggtgttgctgtgttgttgaggctggagtacagtggtgtggtcatagctcactgtagccttgagctcctgggctcaagtgatcctcctgcctcagcctcctgagtagctgggaccacaggtgtgcaccgcaatgcccagctaatttttttatttttatttttttgagatggagtctcacactgtcgccctggctggcgtgcagtggcgtgatctcggctcactgcaacctccgcctctcaggttcaagtgatttctcctgcctcagcctccctagtagctgggattacaggcatgagccaccgtgcccggctgcccagctaattcttgtattttttatatatgtatatatacatatagtgacggtgtctgtgtattttacccaggctggtcttgaactcctggcctcaagggatcctcctgcctcagcctcccaaagtgctaggattacaggtgtgggccaccatgcctgtcctaacttttcttttcctttcttttttttggagacggagcctcactctgtcacccaggatggagtacaatggtgcgatcttggctcgctgcaacctctgcctcctgggttcaagcgattctgcctcagcctcccgagtaactgggattacaggcatgtaccaccgtgcccggctaatttttttgtatttttagtagagacggggtttcgccatgttggccagactggtcttgaactcttgacctcaagttctccgcccacctccgcctccgaaagtgctgggattacaggcatgagccaccacacctggctgtgatggctcttttttaagagacagggtctcaccctgtgactcaggctggaatgcagtggtatgatcctagctcactgcacccttgaactcctgggcttaaggaatcctcccgcctcagcctcctgtgtagctgggaccataggtttgcgctaccacccatgttgtctgggctggtctggaattcctgccctcaagtgatccttctgcttcagcctccttaagtattgggattacaggcatgagccaccatgcttagcttgtgatggctcttagtgtacatacctgggacatataactgtgccttcttaaaagtagttatctcagaatgcttagcaagcctctctttgacttgactttaaaagctttgaacactagatcctaactttttgaagtaaacttttgattttgaaatggttgaaagtcatttgaagccaagtctttggaaataataattgatatgagttgtgtgtttggtcacagtgccaatttaaactgggttgatctgtcttacatggctgttatggcactgaaggatatgaagcatttgaaatgctgacattttggaatattcatttaaaaataggctggggccggacatggctcacacttgtaatcccagcacgttgggaggctgaggcgggtggatcacctgaggtcaggagtttgagaccaacctggccaacatgacgaaaccccatctctatgaaaatacaaaaattagccaggcatagtggtgcaggcctgtagtctccgctaattgggaggctgaggtgggagaatcgcttgaatctgggaggtggaagttgcagtgggctgagatcacaccactgcactctatccagcctaggagacacagcaagacttcacctcaaaaaatgaaaataaaaatagtctgggtactgtggctcttgcctataatcctagcatttttgaagtgaggcaggaaaatcacttgagctcaggagtttgagatcagcctgggcaacatagcaagtcctgatttctacaaaaaaatttgaagcattagctgggcatggtggcatgtggaggctgagatggaggatatcaccaagcccaagaggtcaaagatgcagtgagccataatcgtgctgttgcactcaaggttgtgcaacagagtgagaccctgtctcaaaaacatacaacagttggtattaagcaattacttacagatctgtgttgaggtagattaatatggcaccaatttgggtagactggaagccatttttctgttgactagaagatcagtttcttggaatagtgcaggcagaggtataataaaggtcttctgctttgtattttcaaccatgtaaatgatctgaattttaaaaaaaattttttaaaaagcttttagattgggaaagggcataagggaacagataagattacataacaagatttgggaaacaggatatgaagagacaaattatgattaatccataaaattgacaaggactaggtgtacagtttggacattgttcagagaaggatctgaatattaaattttctcttctaaacacaatgtgaataagtattttcacgtttactgcatttcattgcaattgcttcctgaatgcctatttgacatcacagctgtctttctaataatcttattaatgtgtgcctgcaaatttgacagttttaagatttgccttggttttagccctggttggattccctagatttggaaagggtacttgtttatgaggatataatgatgtgggacatatagtaatgaatataacaaataattcctaatatgggataaggtcccctttctcccagtgagagaactcatactggctgtttagtacccatactgactgcttgatgtttcatgatgtctgctttatgaatacagtaataatatattcaccttgatactggtgaaagatcacttgtaaggaatttttggaagttaaaatttaacttccagatttcactagcttaagtcctgagtgtgagggaaataaccatctatgctgtaagaagagcagacactgttactataatgatagtagcaaaaccagaaattgtttattactatcatagtagtagcagtttcattccaagctattactatcatagtagtagcagtttcattccaagcaacttttacccttataaagcacatggggggccgggcgtggtggctcaattcctgtaatcccagcactttgggaggccgaggcgggcagatcacgaggtcaggagatcgagaccatcctggctaacacggtgaaaccccgtctctactaaaaatacaaaaaattagccgggcgcagtggcgggtacctgtagtcccagctactcgggaggctgaggcaggagaatagcgtgaacccgggaggtggagcttgcagtgagccgagatcgcgccactgcagtctagcctgggggacagagcgagactctgtctcaaaaaaaaataataataaagtacatgagattagaataagagcaatagaaaagagaaaaataacaaaaacaacttgagttccgagtttctatttaggagtagtctggataattcttcttatcctggattgttgtagcttcagaaaagagttcattaaggggtctactgaaaaggtggtgacttctaactaccttaattcagaattacttgaaagcatgctgtatttctttttcttttctttccctttccctttttgattgagtttcactctcgttgcccaggctggagtccagtggcgcgatctcggctcactgctacctctacctcctgggttcaagcgatctcttgcctcagcctcctgagtagctgggattataggcttgcatcaccacgcttggctaattttgtatttttagtagagactgaggtttcaccatgttggtcaggctggtctcaaactcctgacctcaggtgatccacccacctcggcctcccaaagtgctgggattacaaccataagccaccgcacctggccggaaaacatgctatatttctctctgggtattgtcaaactgaaaaagggtggtagaaatttctgacaagcttctttgtaaaagaataggcacaagtatggcagactggttaagaaaaaggaaatcagaatagcaaaacatggtacaataacctgtaatcatccaaaaaatgggcaaatctgaattaggagggggaaagcagaattttaatttaccatgtcaccatccttgctgaattttacagaatttgatccaaaatggcttaataagggattggaaggcatgattagtgataaattgatttgggggttctcagttgtgggagtcagtttgtttggcattatgttgatttgttatctatctctggtggagccatttaatttagatgttaatttttaaaagatgttctaggttcagacgtggtggcacatgcaaatcccagcattttaggaggctgaggtgggcagatcccctgaggtcaggagttcgagaccagcctggccagtgtggtgaaacccggtctctactaaaaatacaaaaatgagccgggcatggtggcacgtgcctgtagtcccagctactccggaggcttaggcaggagaatctgttgaacctgggaggcggaggttgctgtgaaccgagattgtgctgttgcactctagtctgggcgacagagcgagactgtctccaaaaacaaacaatgttctattagctgagacaatagtattattcatttttaaatgcaaaaaataagcttctagttagctttagcccttttagcttcagtctttttccttgagggatttaataattaaatgctgtatctgttcagtttgactatatgaaattgctgtttttgtaggtcagaagaagttgagtgtgagcaatgccaaatgggtctgcctaatactgtttacagttacattattacttcctggctgacttatgaatagtatttgttcaaatcagtatctacttactgcaccaagccctgtgagaagcagtagtgataaatagatgagaggtgagagtttgtgtcattaagaaacttggtctaatagtgaaacatatggaaagaaatgtattactattgttggctgggcacagtggctcacacctgtaatcccagcactttgggaggccaaggctggcagatcacttgaggtcaggagttagagaccaccctggccaacatggtgaaactcccatctctcctaaaacaatatacaaaaattagccaggcatggtggcgcgtgcctgtagtcccagctactcaggagactaaggcaggagaatcgcttgaacctgggaggtggaggttgcagtgagccaagattgtgccaagtgtaattggaacccctaagatgggggcaaggtgagggaagggcagtcaggattccgaaaagaagtgggcattagtctgtttattgtgcctggagagtaagattactttaggtggaggaaataatagtgtttgaagattgccagccattcagtttgtttaaaggaagatgaatggtacaagtttaaagtcctttaagttagttatctaattaatctgttgatgtactagctattgtgtcaagtgctaggagacacaaattcaatttcacagtgctagtagcttttgctgtaggcagtgagaatccattgaaaagttttgagcaatgtggtcactttcagatatatatatatatatatatttgagacggagtcttactctgtcacctaggctggagtgcagtggcgcaatcttggctcactgcaacctccgcctcctgggttcaagcaattctcctgcctcagcctcctgagtagctgggattacaggcacgcaccaccactcccggctaatttttgtatttttagtagagacggggtttcaccatgttggtcaggctggcctcgaactcctgaccgcaagtgatccacccgccttggcctcccaaagtgctgggattacaggtgtgagccactgcacccggctgtcagatttacatttttaaaggaaaagaatggttagccaggttgtagaagacagaaaatgaggcctgagtaatggcaaaggaggccagttaaaaggcaactgcataaatgttgaaaagatactactgcttgagccagggcaatgacattgggctggagaaaaagagatgactagaaagttgcaagtgtcttacctttggttaagatttaccagagttgaacattgcctctgtaaattccttagtttgaatttccttgactctacccactcttatatcctatacctttactataaccttcctggggtcattctctgtttctcaaatgttgttccttgagttcccttttcatgttacatcaatttccctggataatcttgtccagttctgttactttatatactaggcttaagacttcttcagaggccaggtatggtggctcatgcctgtaatcccagcactttgggaggccgaggcaggtggatcacctgaggtcaggagttcgagaccagcctggccagcatggtgaaaccctgtatgtacaaaaaaaatacaaaaaattagccgggtatgatggcatatgcctataatcccagctgcttggggggggctgaggcaggagaattgcctgaagccaggaggtggaggttgcagtgagccgagatcgagcattccagcctgggtaatgagagtgaaactccttctcaaaaaaacaaaaaaaaaactgagttcagaccgtatatattccatatcattgctgcaattctatgtatattaaattgaattcattctcttccaaaacctgctttttctttcttgctcttagtgaattagcattaacccaattttttgtcattagatgatatggaccatttctctaagatctccatttttttcttttctatctcgcatactgtcttcatctcttcttaacatttattggactctctgtatattattgtcacttcatctgttctgttcattacctggaagaatcatcactatttagtacaataaccttagatttcttcagtggcttcccttcacctatataatgaaataacaaactttacttcatatgtagctttttactctgtcccctgaataatgttctttctctaaatctctcattcttagtgactttgtgaaccgtagcatctttgttgcaaccactcaatacttggttctgcattatagctcaaaagcagtcatagatggtacatatacagtggatgtggctgtgttcaattaaaactttttttgttgttttttaagacacggttgtctcactttattgcccaggctggagtgcagtggcatgattatagctcattgcctccttgaattcttggactcgagcaatcctcttgcttcagcctcctgagtagctgagactacaggcatgtgctgttagcacacccagctagtttttaaatgttttgtagacatagggtctcaccatcttgctaaggctggtctcaagtgatcctcccacctctgcctcccagagtgctgcaattacaggtgtgaaccaccacaggccctcattaaaactttatttgcaaaaacagatggtggatagtaattgtttgttcacccctgctcaaacacaccttgttaaagcacacacataccaccgacctttgttcattgctgatgctcttactgataacccaccctcccagtgaagttgcttactagagtaagctcacagagggcagactctttggttttgcatctataccctgagctggtgagtagtatttttttttcataccctgagctggtgagtagtatttttttttcaatcaacttggaattaagaacttgtggaaaactggacatttcgctataggaagcattgtgatagggaggtattatgtagaaagtctgctctaggaaattgaacattaacttttcatttgagtggcatagctaaatataagttttgatgtaaagaaatttcagattgggtggtggtagtggtttaaaatacagaattttaacaaaattgcctacttggtatatcttaagagcaaaaacttttacttaggttctattaggtctaattgcctacttgggtatatcttaagagcaaaaacttttacttacgttctattaggtctggccctgtgagcatttctcaataaatatttgcataattagatgctgtgatcactcttcaaaaagaactggcaagttagattttgtgctgtgtgtctgtgtgtgtgtgtgtgtgtgtgtgtgtgtagaagagagcagtgttaaaagatcaaggctgggcgtgatggctcacgcctgtagtcccagcactttgggaggccaaggtgggtggatcacctgaggtcaggagtttgagactagcctggccaacatggcggaacctgtctctactaaaaatacaaaaattggctgggcgcggtggctcacgcctgtaatcccagcactttgggaggccgaggcgggtggatcacgaggtcaggagttccaagaccagcctggccagtatggtgaaaccccatctctactaaaactacaaaaattagctggtatggtgacgtgcacctgtagttccagctacttgggaggctgaggcagaagaatcgcttgaacccaggaggcagaggttgcagtgagccgagatctcaccattgcactccagcctgggtgacagtgagactctgtctcctatatatatatatgtgtgtgtgtgtatatatatatatatatattagctgggcctggtggcgtgtgcctgtaatcccagctatttgggaggctgaggcaggatagcttgaacccaggtggtggaggttgcagtgagctgagatcgcaccactgctgctcttcagcctgggcgacagcaagactctctcaaaaaaaagaaaagaaaagaaaaaaaaaaaagaatcagttactgaggttgaccatcccaaatctgagaatctaagatccaaaatgcttcaagatccaaaatttttcagtactgacatgatgttcaaaaaggaaatgctccttttccaataatataatggaaacattccaaaatctaaaacacttctggtcccaaacatttcagataaggatactcaacttgtatgtgtatgatgattttgtataattcaaattgccttccttagccttctttatactattcacttgttttgcttctcagggatagtcaaaacattaaatcacacaaacgaggggccaggtgcagcggctcacgcctgtaatcccagcacttcgggaggccagggcgggcagatcacaaggtcaggagatcgagaccatcctggctaacacggtgaaaccccgtctctactaaaaatacaagaaattagccgggcttggtggcatgcgcctgtagtctcagctattcgggaggctgaggcgggagaatggcgtgaaccctggaggcagagcttgcagtgagccgagatagcgccactgcactccagcctgggtgacagagcaagactcttgtctcaaaaaaaaaaaaaaaaagaacacatttcatatttaaaatctgaattgagatttttgtaacctttttttgaggacagaaggtaatgtcagccctttcctatgtgttctatcgataatgtcatttgtttctttcttttcttctcttctcttctcccctcccctcccctcccctcccctcccctctcttttcgacagtctcactctgttgcccaagctggagtgcagtggcgtgatctgggctcactgcaatctctgcctcccgggttcaagtgattctcctgtctcagcctcctgagtagctaggactaccggtgcccgcccccacacttggctaacttttttgtgtttttagtagagatgggatttcaccatgttggtcaggctggtcttgaactcctgacctcaggtaatccacctgccttggcctcacaaagtgctgggattacaggtgagagccaccgcgcccggccatgtcatttcttgttagtcttgttaaggttaagcatagcatcatgcaaatgctgtttgattcattttccctttctgatcctaaccttgtttgagtttcagggaaacttttaaattttgatcaagtaaatgaagttgctagtagtcaaagaagtaattaatattaagtaacaggaagggaaattgcattcacttcttagttcagcatttctgataatgctgatttctttctttacttttctttttttttttttgagacggagtcttgctctttcgcccaggctggggtgcagtggcacgatctcggctcactgcaacctccgtctacggggttcaagtgattctcctgccttagcctgctcagtagctgggattacaggcgtgcaccaccatgcgttactaatttttgtatttttagtagagacggggtttcaccatgttggccaggctggtatcgaactccttacctcgtgatccacctgcctcggcctcccaaagtgctgagattacagatgtgagcccctccgcaccaggaatatgctgatttatttctttgctagaagcttggcttgcttcatagctagttttataggtacatcatacatccctatttccccctcagaagtcatgatcaaactcactactctagagctcacatttaagggtaataacattttatcataaatcatttttaaatgtatagtatttgagtaaaaccttaagctgcagtaaagaagtatcttcaacttgggtgtttgcaaatagttgttttgccttctttattctaaaatatgtatgtttgctttgtttttaaagtagtgttgttactgtgactctgaagtgtattctcaaaaaaaggggaaagtgcagggataggttgagtttccagtggggaagaaaaaaggaaatgttacttataggtggttaacatgaaaagttggattaactttttcttttctttcttttttcttatttattttttaataatagacacagggtctccctatgtttcccaggctggtccctcaagtgatcctcctgctttggcctcccaaagtactgggattacaggcgtgagccactatacctggccaattttttttttcagcgtatgactaaatatagatttatctttgcagtagacaaaatgaatatcaagttattactatatacataattcttcaggaatttatttgctacaaaatatgaaatttctgtgctttaaaataaaaaatattggttgtattggatcaatttttttttttgcagtaggtcaaccaagagaaggcttgtatttggacttttaaaaaataggccattctgaaatccagaaattcgtaagataataaagaacatttaactgttcctcgttgtttgaaactaatggaataagaaattatattggagtgataagtgtgatttctgtgactagaatttccgatcgtcatctttttttttttttttttctccaggttagattgattatagttctcccctttttagacctctcaggagaaagggaattttcctgcctttctttggataggtgtctgcgcagagatttgatggacataccatacaactaagcttggacaattggcacctttaaactcccagatttggtttaatcactgtaatatcttgaatgggattttatctggataattatcttattcatcctgaattattaattgatcccagtatatggatctgacaaattttcaaaaagctgagagtactgtaaaaaatattttttaaaagtgccaggcttggccaggcgcggtggctcacacctgtaatcccagcactttgggaggccgagccgggtggatcacaagatcagaagttcgagaccaccctggctaacacggtgaaaccccgtctctactaaaaatacaaaaaattagccaggcgtggtggcaggcacctgtagtcccagttactcgggaagctgaggcaagagaatggcgtgaacccgggaggcggagcttgcagtgagctgagatcgcgccactgtactccagcctgggcgactcaaaaaaaaaagtgccagacttggtggctgaggtggaaggattgcttgagcccaatagaccagcctgagcaacatagcaagaccccatctctacaaatggcatgtgtctgtggtcccagctacctgggaggctgaggcaggattgcttgaacccaggagattgaggctgcagtgagccatgattatgccactgtactccagcctgtgctatagagcaagaccttgtccccctgtgcaaaaaaaaaaaaaaatttggtttttacagttttaatttttgctaggggagtagggagagagataggaatgtgattctaccattccctgcccctatttatacacatacaatcagaaaataataattttagatctgtatcttattttgtcctacggagggattatgttgtgccttaactgtaacccaagtctagatgtatcccatcttaatgagtttcagtttttccttttctttaattgattgctgttaaattggaatgtagttacacataatagttaagcagggttaaaataatctttttgtcctttcaaaatgatagttttattaccacagaagactacttatccttaatgtttgttatagttcatttttgttactaagtagtttgtgttaatctccagatagaatatttcctttcaaggtccaattctttggttcttgtgtaatagtcaattactgttgactatatatagccccctgaagctttcatgtatcacaggtagagtttttaactgcattctctgtgtatgtcgctataatttgtacatgtacataattttcttattttaagatgccaaactaagcacattgtagacattttggatgaaattagaacaaatgattgtgtgccattaataatagatgtggattggcattctgaccttaaaggataaaataagaggtgtggttagggctgggtgtggtggctgatgcttgtaatcccagcactttggggggctgaggtgggcggatcacttgaggttgggagttcaagaccagcctcacaaacaaggagaaaccccctctctactaaaaaaaaatatatatatacaaaattatctgagcatggtggcgcatgcctgtaatcccagctactcgggaggctgaggcaggagaatcgcttgaacccgggagggggatgttgcggtgagccgagatcgtgccattgcgctccagcctgggcaacaagagtgaaactccatgctgggggtaaaaataaataaataaataaaaataaaaaagaggtgtggtttagaggttagaactacttgcctgaatggttaaactaattaaacatcaattttaattagtcaaatttgatgaatgctttgttcaaaaaatttgggcacctcattgaggagtcagtggattaccaagaaatacttggtgttttttaaataatgatgagctgttatgagaagtattattttatctgtagcatgtgtcttgcatgtccttgcaatttgtgaagacaaaattattctggcaatttgatttcaggtaataatctacatgacacttaagaattataagagccagccgggctggcacagtggctcgcgcctgtgatcccagcattttaggaggccgaggtgggcggatcacctgaggtcaggagttcaagaccatcctggccaacatggtgaaaccccatctctactaaaaatacaaaaattagctgggcgtggtggcgggcacctgtaatcccagctactcgggaggttgagacaggagaagcgctggaacccgagaggcggaggttgcagtgagccgagatcaggccactgcactccagcctgggtaacagagcgaaactcagtctcaaaaaaacaaaagagttacaggatccaggctcacgcctgaggcaggaggaccagcctgggcaacagactccatctctaccaaagaaaaaaagaaaaattagctgggtgtgatggcatgcggctatagttgagaggctgaggtgggaggataacttgagcctgggagtttgaggctgcagtaacagagcaagaccctgtctcttaaaaaaaagaaaactataggaaaatatgaatgctttatctgaacttcatagaattttgccattttcaaccctacctccagtctggcagtaatcagtctaggatttttagatttaaaatgaaaagcatcgcttcagactttgctcaccaaaacttagtatgtaattctctttttttctttgcagaaatggaatctatttggaatttgcagaagcaaggtaagaatgattagattacttaaaatgtcactaataagtaaccactggacattatttttgggtgggattaacagatgggtggtaatttaccaaatagactttgtattttgagttatttaataactgcaatcaaaaggcactagcagctgggcagggtggctcatgcctctaatcccaacactgtgggaggccaaggcgggaggattgctgaagtccaggagttcaagaccagcctgggcagcatagccagaccccgtctctattttttaaattaaaaaaaaaaaaaaaatgtagggccgggcacggtggctcacgcctgtaatcctagcactttgggaggctgaggcgggtggatcacccgaggtcaggagttcaagaccagcctggccaacatggtgagaccctgtctctactaaaaatacaaaaattagctgggcgtggtggcaggcgcctgtaattccagctacttgggaggctgaggcaagagaatagcttgaacccaggaggcagaggttatggtgagccgagattgtgccattgcactccagcctgggcaacaagagcgaaacgccatctccaaaaaaaaagatagtattaagagtgaatacgaaaaaagaaaacagcaacaaaaagacactaccataccaggactggcgaggatggggcaatactgtaagtgaaaaaaacagatgaaagtattatttacctactagatgaagatatgaatgatttttttcccctcctggttatgaaagtaagacaagccataaatgttattaatgtaggaaaccaacaagaataagtatttccacttttggctggtctttctctgtatttgtgtggtagacaacaaacagcctaagaattgaaattcatagttcagaaaaatattagctgttataggagcctgaattgtatcctattcattttgaattgaatagtatacaattcctgaattgtatcctattcctcatttactttgctaattaatgtaagtgaatttcagatggatgtgaaattcctagaatttcaggacttgaaatgtgtagaaatttctcttattttacatattaggaaagtgaggcccagtgaggttcctgtaaactagaaagtggcaggactagaatgtagcttcccctgatttcccaatgttgctctttcttccggagttactttctgtgtatcttaccaaacaaatgaaaaaaacatagactagaaaatacaccctgcaggctgggcacggtggctcacgcctggaatcccagcactttgggaggcggaggcaggtggatcacctgaggttcaggagttcaagaccagcctggccaacatggtgaaaccccatttctattaaaacagttagccaggcgtggtggcacatgcctgtaaatcccagctactagggaggctgagccaggagaatcgcttgaacacaagagatggaggttgcagtgagctgagatcacgccattgctctccagcctgggcaacaagaacgaaacttcgtctgaaaaaaaggaaaagaaaatataccctgcaaagtagacctacctgtttttactgtaaaatggccgttaactcttaggaatgagcatgttcttcatggcagatttccaatgggtggccctaggagtcccagaaaggatattattatattatctctggactaaactagattgattcttagctgaagtggacttgagtttttctgatactattttcaggcctttaaaattttccattgggtgaccagttgtattgacttgccttttttttttttttttttaagcatgtatacttgaaaaagttcttagggaaggtagaaattatatatgtgtgtgtatatatataatataatatatataataaaataatatataataaaaacagttccctggccgggcgcggtggctcacgcctgtaatcccagcactttgggaggccgaggcgggcggatcacgaggtcaggagatcgagaccatcctggctaacacggtgaaaccccgtgtctactaaaaatacaaaaaattagccgggcgtggtagcgggcgcctgtagtcccagctactcgggaggctgaggcaggagaatggcgtgaacccgggaggcggagcttgcagtgagccgagatcgcgccactgcactccagcctgggcgacagagcgagactccgtctcaaaaaaaaaaaaaaataaaataaaataaaaaaataaaaataaaaacagttcccctccagaagaggggagcatgcagcttaaatagtaagaatttagaataaccctggagtcttcttccagacacattctaacagttttatgttttgaatctgaaagatccatagtcttttgttagtgctgagaataaaggctggtgttactgtgggaagttgagtcagtcttgattaggactgaattggcagttttgctaattaatttaacgtcaagtttttggtggcaggttttacttagatagttcccacactggttaaaataaattttgacttcatttgctgggaacagcaaaagaaaaatccaagtgtttcttttaatattggattattggtgacaagcttttttctttggctgctgtattcaaatacactgcttttgtaatcagtagaagtacataaaacccttaagtgaactcaaccatctctgatctgcaggagttgaggccctcactggctagaggaccctgtacttggaattcattggaattccaaatagctacttccaggttgagaaactggatcatacatgtgttggtacaaggaggaaatgggcttgaagttttgttttcataaaaaaattggtcagtttaaatgatggttatttgggattgttattggaatacgggcattttgagattctagaccttatttttatttatttttttaacctttctagatcccaaaaggataatcacttacaatgaagccatggatagtccagatcaatgaaggaccagactgcctattcgtaacctttctgcagcattagagccatcgttcatgggggacacaaggcttttatgctcctagatcttcaacgcagcagaggaaccataagtagaatcacaggataatatatacaaatatatatatatacatatatatatatatagttatttaaaaaaggcaactgaaagtaattagacttcttaaggaatcaaatttatttcaagagactacacatggttatttaatctccggtactgaataggttttttttcttctgttagtttttgtttttaagtgtgaatgcaagtgattaatgaatacagacttaacaagtgtggttctaaagttcctgctgtcatcaacttgggcaacaaatgacccactggaaaggcaaatccacttaaaagatctctgtatcttgttctgtgactgaagtgatacactaatcacggggaacccagaatgattcaacattttccccccactcctcccttgatctttttggttttactttaattaagccctgcgagaatgctggataaatgccttgaagttagcagggtgtatttttttagcgaatatgatttgcatgtcttgccaggagttaagcggcctctggggtgttggggaaatactttatttctttccatttattttttgtggggcggggataggggagggcattgaagttctacaattctggaatagttagttgatggtacatagttaacttggcttcggttacatattggactttaacaactgaagaatctatgcgtgtcatttaaagaaaagttgcagaacaagcaattggcttagatatacaatctggaaaaatattcctgtgcccatattttaatgtaattgtataactgggagcaaaaatatattctgcttttcaactgtaggtgctccagacttgctctccgtcactaacactaaatgtgctgttttccttgtttttcatcaaacatttaagacaaacttagacctttctgtaaattatcttttaatttctcagcaaaatctaaaaggggaagaaaaaagtccatgaaaactaaaacttttcatgtttttagccagtgagaagataataaaccctgactgtagaaggtgtgttttcatgcaaactatacttctgagcttgttagcttctaattatatcttaataaatatattttattactagagcaagatgggtttttaaggaaaataatgtgaaattctggaaattttctttggggcagagaagagcattagccctgtcttatcattacattgccatcctgttgcactgcagcttgtgtatagcatgctaaaataaatttttgtgtgtgtgtgcagaaattaagggtccaattgagattgggtgatgttagtaacataataacaagttgtctggcctgacacagcatcacatcacacacacagaaattagtatatccatgtatgtcaaatacaggttaaaatatcagggcatttatataaagagttgtagtcttctgataaaagtagactggatcccctggggtatttggggagaaagtaactactttggctctacccctagaaatgtccagttttgagtgactgtagtatggatgggttttcttgttttgttgattatttgaggcttttaaaacaagtagttcatgaaagaagctgttggactcaacatagagtagagtaactatctttttagtctggatttctgccctgcttagattttaaaagtataagcatggattgccaattccacttgatgtaaacaaaacttttttttatacataatatatatatatatatataaaataacttattgtatcagtccaggttcagaaacttgtggtaggccagttccagatagtttcatttcacctgtaaactgtatcactttgactgatattgtaattttcaaatgtataatatgtttacagatgtgccctgcatttagtctgccttgttcctattttgatttttgttgagtctcctgcctgcttgccaaaagctaggatgcttcaggcccatgtacaattgaaagcagaggcatccttgagctttaaagcattgaacaaactggaaaatgcaacataccacataactgaagtgaaaaaagtctgtgtttttgtgtttttttaaataaaaattttcaaaaagttaaaaaaaaagacatataaggttgattaaagggaaaaaaggctccagtttgttttacaggttttaaagttctgctgtgtgttcaattgccttgtgtaaccacttgtcgccttagggccagattcccctctctagtccccttttttaaatgtccattttgcttgcctggaattttaaagttcttccgtctcacaactcacaagaaactttctgggtttgtgacatacagaggttgaattgagtatatatttgaaaaggaaaaaacaaaaaacaaacccagaccccacctgaattgggctttttaacttagaagcaacacttgattaaacatctttagaaagctattgcttttctaatttccttccatatccctcaggcctcagtgttcagagaagccaaaaagaatgtatcacttctctgtctgtccaaaggtttttgagagtctcacttctaaatgaaacaatgcaacatttcactttgatttctccactgaaatttccttgattatatggttagaggtatgtagttaggaatgtctgttaactttctgagaaccctagtgccccatcatattaactgtcagtattttgggggcattaggttaatagacttaattgcctaggtacaagcaggactttgggacaaatctctttgtgctgtttggtaacacttaactctatttgttgcaatctttctccttaggtcctcacacaattccttacagagcacttattaaaaaaaaatcttaagagttgatctgttttctgattattttgtgtaagcttctaaacaaacttcagctgtgattaatttagcacatttaaataacgtgttattgtttggtataaagaattttccttcaactcagagtattagtactgtagcataaaccaaatacagtctagaggggatttttaacatccctccattataaagactgaaaaaggggtgtgtgtgtgtgtgtgtgtttatgtatgtatgtatgtgtgtg

SEQ ID NO: 580 - DNA, 134 bp, Homo sapiens
cgggcagatcacctaaggtcgggagttcgagaccagcctgaccaacatggagaaaccccgtctctactaaaaatacaaaattagccaggtgtggtggtgcatgcctgtaatcccagctactcgggaggctgagg

SEQ ID NO: 581 - DNA, 134 bp, Homo sapiens; identical to SEQ ID NO: 580

SEQ ID NO: 582 - DNA, 3201 bp, Homo sapiens
agatcccaaaaggataatcacttacaatgaagccatggatagtccagatcaatgaaggaccagactgcctattcgtaacctttctgcagcattagagccatcgttcatgggggacacaaggcttttatgctcctagatcttcaacgcagcagaggaaccataagtagaatcacaggataatatatacaaatatatatatatacatatatatatatatagttatttaaaaaaggcaactgaaagtaattagacttcttaaggaatcaaatttatttcaagagactacacatggttatttaatctccggtactgaataggttttttttcttctgttagtttttgtttttaagtgtgaatgcaagtgattaatgaatacagacttaacaagtgtggttctaaagttcctgctgtcatcaacttgggcaacaaatgacccactggaaaggcaaatccacttaaaagatctctgtatcttgttctgtgactgaagtgatacactaatcacggggaacccagaatgattcaacattttccccccactcctcccttgatctttttggttttactttaattaagccctgcgagaatgctggataaatgccttgaagttagcagggtgtatttttttagcgaatatgatttgcatgtcttgccaggagttaagcggcctctggggtgttggggaaatactttatttctttccatttattttttgtggggcggggataggggagggcattgaagttctacaattctggaatagttagttgatggtacatagttaacttggcttcggttacatattggactttaacaactgaagaatctatgcgtgtcatttaaagaaaagttgcagaacaagcaattggcttagatatacaatctggaaaaatattcctgtgcccatattttaatgtaattgtataactgggagcaaaaatatattctgcttttcaactgtaggtgctccagacttgctctccgtcactaacactaaatgtgctgttttccttgtttttcatcaaacatttaagacaaacttagacctttctgtaaattatcttttaatttctcagcaaaatctaaaaggggaagaaaaaagtccatgaaaactaaaacttttcatgtttttagccagtgagaagataataaaccctgactgtagaaggtgtgttttcatgcaaactatacttctgagcttgttagcttctaattatatcttaataaatatattttattactagagcaagatgggtttttaaggaaaataatgtgaaattctggaaattttctttggggcagagaagagcattagccctgtcttatcattacattgccatcctgttgcactgcagcttgtgtatagcatgctaaaataaatttttgtgtgtgtgtgcagaaattaagggtccaattgagattgggtgatgttagtaacataataacaagttgtctggcctgacacagcatcacatcacacacacagaaattagtatatccatgtatgtcaaatacaggttaaaatatcagggcatttatataaagagttgtagtcttctgataaaagtagactggatcccctggggtatttggggagaaagtaactactttggctctacccctagaaatgtccagttttgagtgactgtagtatggatgggttttcttgttttgttgattatttgaggcttttaaaacaagtagttcatgaaagaagctgttggactcaacatagagtagagtaactatctttttagtctggatttctgccctgcttagattttaaaagtataagcatggattgccaattccacttgatgtaaacaaaacttttttttatacataatatatatatatatatataaaataacttattgtatcagtccaggttcagaaacttgtggtaggccagttccagatagtttcatttcacctgtaaactgtatcactttgactgatattgtaattttcaaatgtataatatgtttacagatgtgccctgcatttagtctgccttgttcctattttgatttttgttgagtctcctgcctgcttgccaaaagctaggatgcttcaggcccatgtacaattgaaagcagaggcatccttgagctttaaagcattgaacaaactggaaaatgcaacataccacataactgaagtgaaaaaagtctgtgtttttgtgtttttttaaataaaaattttcaaaaagttaaaaaaaaagacatataaggttgattaaagggaaaaaaggctccagtttgttttacaggttttaaagttctgctgtgtgttcaattgccttgtgtaaccacttgtcgccttagggccagattcccctctctagtccccttttttaaatgtccattttgcttgcctggaattttaaagttcttccgtctcacaactcacaagaaactttctgggtttgtgacatacagaggttgaattgagtatatatttgaaaaggaaaaaacaaaaaacaaacccagaccccacctgaattgggctttttaacttagaagcaacacttgattaaacatctttagaaagctattgcttttctaatttccttccatatccctcaggcctcagtgttcagagaagccaaaaagaatgtatcacttctgtctgtccaaaggtttttgagagtctcacttctaaatgaaacaatgcaacatttcactttgatttctccactgaaatttccttgattatatggttagaggtatgtagttaggaatgtctgttaactttctgagaaccctagtgccccatcatattaactgtcagtattttggggtcattaggttaatagacttaattgcctaggtacaagcaggactttgggacaaatctctttgtgctgtttggtaacacttaactctatttgttgcaatctttctccttaggtcctcacacaattccttacagagcacttattaaaaaaaaatcttaagagttgatctgttttctgattattttgtgtaagcttctaaacaaacttcagctgtgattaatttagcacatttaaataacgtgttattgtttggtataaagaattttccttcaactcagagtattagtactgtagcataaaccaaatacagtctagaggggatttttaacatccctccattataaagactgaaaaaggggtgtgtgtgtgtgtgtgtgtttatgtatgtatgtatgtgtgtg

SEQ ID NO: 583 - DNA, 5877 bp, Homo sapiens
gatcccgcccccctcggagcgcccctgtggtctgacttcagcagcactttccggcaggagactgggcactcgctgtcacccgcgagctgcctccctcagcgagatctgagcatctttccggaggctaacagacctgggcttcggggtgaccactgtgcttgcctcagtttccttttctggagcaggggaaggcccggctccctgcccaaaggcggctgtgcgctaagtggcagacgctcggggagagccggcgcggggcggaccccagcgccagtagtgacaggggcgaacgccgccgggagactccagccggcgggcgagcagggtaagccaggccgtgggcgggagggcggggcagctcaccggtaaaaggcagagtccccgagtgggttccagttcgccgtgtagcagtccatggctggtgcagacggcagctgggaagcaccgaggggacacccacctagagcgggctccaggccggcacttccgcttccgcccgtccgggtcacgtggcgaggccgccgccgcggccatcaccactgtgggcagcctcacttggctgccgccccgagaccccagcccgtacctgggcttcgcgcccgccaagtgggcccagccctggctcctgcgccctgtggcggccacctccatcgccttgctttcccttcgggcactgggggtcgctcagggcgggacatgggtgaacggaagtggaagctgtgagcgtcgcagcccgaggcgccgaggcctgaggcgccgtcggggccacagcgacgctcgcatggagagcgctgggcgctgggctgtgcaccgacggctaacctggacccacggtctctgcggggcgggagctttgcagaaccgactggccgactggggcgcgggaacatgaggcttggctaggagcccgctgcgggccaggcgcgcggtgcgcaggcatacccgggtcgcgggtgaacaccgcggagccccgggacttggtaattggcgcgagcgggtgcgcgcatgcgcgggacggcggcgggcacgtggcgaggcgcagggcggcgccgcgcgggaagctccccagtgccctggaggcctgctggctggacgaccccctgcctctggtaccaagtgtgaccaaggctggcgccaccatggctctgctgccgtcacctcctccctttagcattgagcagccccggaggggctagccctgaggctgacctgcccagagtccccaccatcgcgctgcttagtggcctctccctgcagcctgtcgttgctggtggcggcatggtcttctgtctgtcgagcgaggagccgcgccgcccgctgcgaagcgacatggtccacttccaggcctcggaagtccagcagctgctacacaacaagttcgtggtcatcttgggggactccagtgagtgcctcttctagggtgacgcttccagtcccacaccttgcagcccgttcagtgtgtctggaccatttgtttccatctcacatctcttgtctgtcttctggtctgttccgtccagtaggttttctctttttatgtcccacacatcttccacaggagtcctgacaggtgtaataacctgtgcactttttagcccatccttgctcagcatttctcgccctgacagctccccataatttccatcacgaaagcgttgcattgtgtagtgtgtctcctgggtgacttggccgacttaatttctgccaggtgatcttgggtcactgtatactgctggccaggaggcacacagaacagaggcaatgccaggactttttaacctcatcttttctcctgcgtctaagtcaaccacagagctggtgtcgggcacctcagccctgggaaaatggggtcctggacttggaaggagctggggcaggctgaggtctgcctcagccttgggatctctgtctcctcccagttcagagggctgtgtacaaggacctggtgctcttgctccagaaagactcactgctcacagctgcccagctgaaagccaaggtgagggaagcttggtggccatgtcagtggtgggtgggcacagaccctggcctggcagggttctcctccctggcatgggtctgaccagtagggtggggggggtgggtagggggagctgagctttgaacaggaccagctggtggctgggggccagctgggcgagctgcacaacgggacacagtatcgtgaggtccgccagttctgctcgggctctggccaccaccttgtgcgcttctacttcctcactcgtgtttactccgagtaccttgaggatgttctggaagagctgacatatggacctgccccggacctggtgatcatcaactcctgcctctgggatctctccaggttggggcgagggaaaggggaatactggttggggctggaagtacggctgaggcagtccacccttgtgctcttgcccaccctgtgtgttatccaacagatatggtcgctgctcaatggagagctaccgggagaacctggagcgggtgtttgtgcgcatggaccaagtattgccagactcctgcctgctggtgtggaacatggcgatgcccctcggggaacgtatcactgggggtttcctcctgccagaggcaagtgactgaggcccatcaggacaagagatgggatagcagactggtagataggacaccctgctttcagaccctgctgcgttctgtggctcttagaggctgcactttctcacttagctccagcccctggcaggctccctgcggcgggatgtggttgaagggaacttctacagtgctacgctggccggggaccactgctttgatgtcctagacctccactttcacttccggcatgcagtacagcaccgtcatcgggatggtgtccactgggaccagcatgcacaccgccacctctcacacctgcttctgacccatgtggctgacgcctggggcgtggagctgcccaagcgtggctatccccctggtgagccctaccataagtgggggggtagtgatgcactggggccctcagaggacagggctcagaaacagaatgggacacagccactcaagggaagtagaggtcccttgaaggactcctgtggcttctgcatgcaccttcctcaacccctgaggagggttagatcatcggagcaatattcttgtccaagttccagttttctacagtctggctgtgtagtcatttctgtgtgcttgaaggagcttgtacaagtattgaccacataaggcagcatgttgcaagggtcctacccaacagattaacaggaaagaaatggggcatgggtgtgaggagtggaaagacagggaggaagggccatccaggcagtgtggcagaagcaaagaagcccacagctggggggtgggggtacagtcaactggcagggtgtggaacagggatgttgcatcgggaaggccagccttatggacttgggctcaatggacagtgttccataggcttcttagttcagcctcagagtcccactgtgactggtgcagcttggtgtagctctcctcgggccccatctctgggcctttggtggaggcttctgagggccccactcccccttgttttgaggcactgctccccatcacatctcaactgtaacactctgctgcagaacctctgtttccatgtcaacaccctagtccctgcatgcacacaaagagggcaccatggctgattgtctccatggctgcttctcccctgcatcgtgtccttaaagggcaagtttcctgctgcacttgttgacgactcacccctttcagccccagtgtctagcacaatttccctgtacacagtatcaacagaattgtatttgttgaatgggaggcacgagtcatgttagaaggccgattatggcagcacaagaggatgtgggggcacagagagtccaggaatatcatagagacagacctgtaacacttggtagccaggagttggagcatcagggaggtgaatacagattttggttaaacatccccattttcttgtttagatgtaataattgatccccagcaaatgatgggatgccctgaaggttgtaaggctagttttgatggcttaggcctttgaaatccaatttggagctacagaagttagggccatgaaaagggagagttgatttggggtggaaggatgagttggtgagtttggtcacagcagattgatttgaggttctttggaaatacagagtagatttgcagtcattggtacccagcagagagattaaaactgagggcacagtggcagctgtgagggagacagaacgatgctcatgctttggattggcaggaaagaggggctatggcggaaacaaaaggagatgagggcaggggcacttttaggaaggactgaggctgctggcagtgtcacatgactgttgagaagaagggaatttgttagcaagtggttacatttagtaggaaaagtgttgagggcatgggtttggattaaaggagggagtgagcaattgaggaggaagtggaaattgggcaaaacattccttttggaagtttggatggtaaaaggaagttgttggggaagggaataacaggatctttatgtttggcttatttactggtctatggggaggaggtgggcgaggaaaaagctagatacaagacctgggcaaacaaagaaggctctggagggaagtgtaggttagaacaaaggtaagtctgagaggtaagagagaaggaacacactttgggcttggcctgaaatgagagggaatgaggaaaactgggtagagggcaaggatgctccagcctggtggctctgctctccaagaggaaggaatagagctttagaagtgtggatggccagagttcagggcagcctggctcccaagcctacctaaaacaaccatcccattcctagacccgtggattgaggactgggcagagatgaatcatccattccagggaagccataggcagaccccagacttcggggagcacctggccttgctcccacccccaccttcttctttgcctcctcccatgccttttccctacccgcttcctcagccctcgccacctcccctcttcccacccctgccccaggataccccttttttcccaggccagcccttcccaccccatgaattcttcaactataatccagtggaggacttctcgatgccaccccacttaggtaggtgcttctgcagctcccccaccctcttgtacctccccttacccagcctcctatgcctaggtgagctgagaggagttgggtagctccttgtgcccctagcactgggtttggtcacagcagtccctgagtctgaaacatcatctgtaggttcattaatcagctcactggttgtcactgtttcaccgtctgaaggtaggggaaggactatcccttttttgtagatagggaaacagagaagctcacctggaggacaagagttgcttcaaggcagagctgcactcactctggccagaagcctgctcttataatgactggttcttttgtaggatgtggccctggagtgaactttgtgcctggccctctgccacctccaatccctggccctaatccccatggtcagcactggggcccagtggtccaccgggggatgccacgctatgttcctaacagcccctaccatgtgcggagaatgggggggccctgcaggcagcggctcagacactcagagagactgatccacacatacaaactggacagacggcctcctgcccattcggggacatggcctgggtagactggatcttgggctgggactggatgtgccaatggcccttcagggcctgcctggcacctcaggtactgggctagggtgtctgctatgcctggtattgttcttgtccattgctgtcaccaataaaggcatggaagaacagagtgacaaa

SEQ ID NO: 584 - DNA, 636 bp, Homo sapiens
gatcctcctaactcagcctctccagtacctgggactataggaacatgccacaaagctcggcccagtaaaatatttttaaaaaactttaatgggcaattattacatagcaagcactgttctaaatatgcactggtgataaagagaagcaagaaacatgcttttggccgggctcagtggttcacgcctgtaatcccagtactttgggaggccaaggtggatagattgcttaaggtcagaagttcaagaccagcctggccaccatggtgaaacctcacctctagcaaaaaatacaaaaattagccgggcgtggtgacaggggcctgcagtctcagccactcgggaggctgaggcaggagaatcccttgaacccgggaggcggaggttgcagtgagccgagtgcccctgcactccagcctgggcaacagaggaagactctgtcaaaaaaaaaaaaaatgctttcagccctgaaggagcctggtttagcagaagaaacctatacaaatgtcgcctaaatatacaaatagaccatacctaaaagaccctagcactgggcccagtgaggcccacaggattctattgggggagaatcaggcacagttccagaaagaacccttgaactactaagtcctgaaggat

SEQ ID NO: 585 - DNA, 3072 bp, Homo sapiens
ctccagtgaaatcttacaaggagcctttgccaattactaggaaacaattacgcaccaagtagttggattagctgtcctcagttccctttataaaactgaaaaagtctccattgtcctaagtagaccagattctgataacattcttatgctttaaaaaataaaaaaatttttaaaggcactatcattctgagaatgcaagttgaagttgaccatagttttaaagtcagttgagtatactatgtcatggtccaacaatgtgcttttaattgtaattgacacacaaaaattacacagctaatctgtgtgaatgcaaagttgccaagaaacttaacatttcagctcttccagactggcgtctgcatagatgcaatcacacaagtaaaatatattaagtccccactgctcaatgcaataggtctctggggtccgtcaggtaagtcaacttagtaaatctcattttcctctgaattaagtgattgtcagaaagtgaatcacccttccttttcccctctttaagcatgctgcagtacaaaaattctataaaaataccttttttgagtcattaacataaaatgaagaaaacagcagcagccaagaagagagatgttgaaatttaagagaggaagacagagaagaaaaatccactggataccttatgtgtgtgagtacagtacttttgtttgttcaaataactgttttatgacaaaggcactgaaagattctaacaccacttcttgggagtgcagtccacaaagttctaaacagcagacagcgcaccacagaagatgtttatgttacatcagccaaactataaaactcttgtaacacttttctgaacccagcgtttccagtgtttatagattgctttgctatctgaaagacccagttagtatttaaaatggtaaagggttaaaaaagttaatatttctccctgctagttaccaactcacagctcaaatcccaccctgcaggggaaaacagtatcgccctggacttcctggaatctaggcaggacctccacgctccaagctgcaacctgctaaagtgatcaacgttttgatttttcacagctttgaaagcctctaactggcttttccattttggatcattccaaagtctgcagcaaaatcattggttttttgatgctggggtcggggtgggaggcagtgggttgacgggggtcacttaattgttgctagtttgttcaaactgagattcactgcataaaacttttagtagaatttcctccaaaatgctggcattccccccttcaaaatgaagaaagcatggaggctgactagccttataccacagtctcactgccttttccaggcttcacccaaccatttcctctcttctctctctttacctttccagaattcaccaatctgttggaacacttctgccacgtgtgaagagttttggcagaccaaatccacatgcctgaagtgatgcccaccaacaaagacataaaaattttcaacatttcaacagccatgttggaatcatctgcagaataccgaaaaagtgcccagttggagatttcataaaaataacaggcaatcacacacgttgcaggaactgtgtacagtactgagaacaccccaatcttgaccatcagtctttctaacttgtctgtctttgtcccatccttttgaagatttgaccgaattttgaacaaggccaccaaacctgcagcaatgaacaaagttccaatgaccaaataagtaaagaggggagccaccacgaacccggtgagggcatcgagattttggtttccaacatagcacaagccagtcagttcatctgcatccaccagtctcataatcaagatgacaatggttttcactgcggggatggcccaggctgcaatgtggaaataagagctgtgcatttcaatggcttcatgaccccatttgagtcctgctgccaaaaaccaagtgagtgtcagaataacccaccaaatggagctggccattccaaaaaagtacatcagcaagaaaattattgcacatcctgtgttcttaagtccttcttggatgagaacaggttctgctgcctcttcaaaatcacaggatatcctttcccggcctacagtcagcctgacaatataagcaatgctataaatattatagcacatactgagaaatatgatggggcgctcagggtaggaaaacctagaagaatcgatcaggaaggtcagtactgtgaaggcagtggagatgaaacacaggctggcccacacagccatccagatatcagtgaactccttggctgagcggctgtataagccagcatcatagccacacttgagcacacagttcaggctccttttcacccagatgtactgatcagaattggttcccacagagtgacactcttccccaggctggatgggggttttgtgaggtaagggcacctcttcatcacctggcccttccatgcacatgtggttgtggtcgttctgtggtgggaatttgctgcagttcagactctctggccaggcaaatccaaattccttcaggacgggttcacagcgtctcttgactgaaagacacatgccgccgcatgggccaatggggatgttgatcttctctgtgcacattggcacataaacagaacaaaggaagaactggaaaagtaacaaaatgaacacacacaaaaaaaacaatgacttggaagtttgaccaaatgctcccacaaagctgagttgaatgcttccaggcaatctaggtatctacttttaaaccaacctatcgggagtctgtctgtttactctgacctcaaacaagggcgcctgataatccatcacttacatacttttcttagtttggctttagtaatcctttccagaagaatgtacataaataaataaataaaataaatagggtctgaagaattgcataagccctctttgcacaacacttgaaataaatcttaaaaaactggctttcaatctccttccattttagaaactatttgaaaaagctaaagaaactaatatgactcatttaggtggtttatttttatccccgtttctttatcattttaaaaataaaagttaaaaaaaaa

SEQ ID NO: 586 - DNA, 380 bp, Homo sapiens
cccatactgaaacaaaaaatggcccaaatgagacactgttagactcaaggatgggatgcagattgaggtctctggtcactagggatttgtttggccaggtttcctcaatgaataataatgaagcacaataggaaaatgtaaatgttaagtcgctgaaactgcagtaccagcaggggagagtccagttgctgtcctcaattcctccagcattgataaacagtctgcttggctccttacagatgttgtctatgaagtctagagttacaagtaactattttccagcatgtaaagggatccagtcttgtccttcaaaacagcttggccgctttccccaggatacatgtaattaaaaatatatatccctgcaaaagctgtttctc

SEQ ID NO: 587 - DNA, 11726 bp, Homo sapiens
ggagccggagccaagggagtccaggctgccgggggctgcagacatggagggccagagcagcaggggcagcaggaggccagggacccgggctggcctgggttccctgcccatgccccagggtgttgcccaaactggggcaccctccaaggtaagacccctgagacccagtgccccccgctttcctgatccctggttccacacaccccccccacatacactgcaggctccctggtgctcctgactgaggggctggtactttcctctgctcagcgagcaggggctaggtgaagagagcaccctgggggctgaggggcagtgacaggatgcccggagacagatgaagttagccatctccaggagcccttgggagagtcctggactgggtatcagaggacccagctgtgctccacctttgctgtgtgaccttggccaagttgcttttcctctctgagccaatgcaaaatgagggggcttgtcgctgaagactaaaactgtgacatctgggatggctaagttgttagtactggaggcggtgtgatagttggggggaagccggcacacagtgtgacacttggagccaaggagggtgcctaaaatgccacctcaaagaactgagtttgagaagggaggtggagatggagttttaggtactctgaactgagaaggatacgggacagaaacagaagtgcgtctccagaggcagggcctccctgcgccctgttaccctacctagggccatcctggggcaagtatagacattcttctgccctccttggtgaaggacactttatcctgtcttctggagacaggggacatcagagagaatagatggggaaggaggataggtctctacaggactccgtgactccccacccctcccacctgccggacataaatgggatacctgcttgcctgtcctttcaggtaggggagaaagtggaggatgtaagagggcacaacctgggcacagagagatgtgacaccaggatcaacttagaatcctggacttgctctgaatgctagattcacacttggtgaggatggactattcaacggggctagatggaattctagcaaatgttgggctcataaatgcagacaatgggagatgaagattccccagaatataatgtggccaggaaccctagaccccatcccttcattttacagacagagaaactgaggcgctgggcagagaggtacttgcctaaggtcacacagagctgggctttgaatctacacagccagtctcagctcccagctcttgctcctgagtggagctctgggaatgggtaagagaacagagagggctgtaaccaagggatttggatgtttagggggcggtggggaactgagggtttctgggcattatgaaggaagggagaggtatttaacaagctgcacctgtaggtctgtatcttgacaatagaaaaagaaaagaaacaggctgtccccagtgtgcccagacctgggatgtcaggtcagtagccgtggctgggggagcttcagggactgcagtgggagggttgcccagggaagctgccccgaatgggcagggtgtgggtgccagccaggaaggcaaggcaagtcctcaggtttaggttcacactctgcctcatttgagtcagggtctgagtttccccatctgtgaaagaggtttcagacttaaaggaggggttagggttttgtgtcctatctcctccaagacagaagttgacctgcagcagaatagattgaagtgagatagtaggaagaacttccttggaaagatgtgcctttcttagctagatgaactctgccagggtctatatggaagttggggcccaatgccctggttagggtcactctgaatctttgacttgtcctccacaaggtggactcaagttttcagctcccagcaaagaagaacgcagccctaggaccctcggaaccaaggttggctctggcacctgtagggccacgggcagctatgtcagcttcctcggaaggaccgaggctggctctggcatctccccgaccaatcctggctccactgtgtacccctgaagggcagaaaacagctactgcccaccgcagctccagcctggccccaacatctgtgggccagctggtgatgtctgcctcagctggaccaaagcctcccccagcgaccacaggctcagttctggctccgacgtccctggggctggtgatgcctgcctcagcagggccaagatctcccccagtcaccctggggcccaatctggccccaacctccagagaccagaagcaggagccacctgcctccgtgggacccaagccaacactggcagcctctggcctgagcctggccctggcttctgaggagcagcccccagaactcccctccaccccttccccggtgcccagtccagttctgtctccaactcaggaacaggccctggctccagcatccacggcatcaggcgcagcctctgtgggacagacatcagctagaaagagggatgccccagcccctagacctctccctgcttctgaggggcatctccagcctccagctcagacatctggtcctacaggctccccaccctgcatccaaacctccccagaccctcggctctccccctccttccgagcccggcctgaggccctccacagcagccctgaggatcctgttttgccacggccaccccagaccttgcccttggatgtgggccagggtccttcagagcctggcactcactcccctggacttctgtcccccaccttccggcctggggccccctcaggccagactgtgcccccacctctgcccaagccaccccgatcacccagccgttccccaagccactccccgaatcgctctccctgtgttcccccagcccctgacatggccctcccaaggcttggcacacagagtacagggcctggcaggtgcctgagccccaaccttcaggcccaagaagccccagccccagtcaccacctcctcttctacatccaccctgtcatcctccccttggtcagctcagcctacctggaagagcgaccccggcttccggtgagggggccctctcccaagaaaggtggctggggcttagctctgaggttagccattcttccagggtggatggtgtgctctacctcagcttctctctctgaggaagagtctttggggagggggttgctgggcccactctgtgacgctcagaagatagcatcccctcctaaggaacttgccgcctctcagttgatctccccagggagagtgtggcagagggacaggattcggggcctcctgtgggtccttcttagggctttggcccacacctgcctccatttagttccccagggagtcctgtgaaaggaagcttgagggtgagggagtggtgccaggactacaccctcatatgcccctgccctcaggatcactgtggtcacatggaacgtgggcactgccatgcccccagacgatgtcacatccctcctccacctgggcggtggtgacgacagcgacggcgcagacatgatcgccatagggtgaggtggcagggcatgtggaccccctcctgagcccctcgggccttccgggccctccacccatggcaggggcttccagggcacctctccaatcccatggccaccctgcccccacccctccaggttgcaggaagtgaactccatgctcaacaagcgactcaaggacgccctcttcacggaccagtggagtgagctgttcatggatgcgctagggcccttcaacttcgtgctggtaacgcacccctcaccccctggacagccagagaccctgctgaattcctggctccagctgtaccctggctcactgtggggcccgctgggcctctgtggctgggtccgtgacatgggtgggtggaggagcagacctgaaggtgggcgcgagggcgggggagttgtgttctgtcccccagccacgtggcctcccgctgcaggtgagttcggtgaggatgcagggtgtcatcctgctgctgttcgccaagtactaccacctgcccttcctgcgagacgtgcagaccgactgcacgcgcactggcctgggcggctactgggtgagcctgtgagcaggcccagaagaggatgggacatgaagggggctttagattagtccccccgccccatgcacagcaaggtccccttcccatcctccaccctttaccctgcggcccagcccccccatgcaccacccaataccccatcctattcctctatacccccgcccttttctctccccactgtgtcccagcgttgttcctcatttctgtaggacccacccaccttccacccacatctcctctctaacccccgctcccagtgcctcacctcctggcctaagccccgcccatgagccatccgaccctgcctccctagggtaacaagggtggcgtgagcgtgcgcctggcggccttcgggcacatgctctgcttcctgaactgccacttgcctgcgcatatggacaaggcggagcagcgcaaagacaacttccagaccatcctcagcctccagcagttccaagggccgggcgcacagggcatcctggatcatgagtatgggctggggtggggccaaatagagcttgggtggggctagtgatgggggtttttgtaccaccttgggtggggcttatggagagaggcagggcctatggggtttagtgcccacccaaactagttgtaggaacacgaaagcagagagcagttggatggggaggggcggagcttgtagggtggagctttgctgaggggccccgccttgctgaaggtcagaacctaatttcctgtagaccggtccctctgcttttcctctgccctttggtgggctggaggctctggcaccactcacccactcactacatcccctcgggttggatgggctggaaggatctgggctgagcccttatcctccatggacctgttgacaccccccactgccccccacatctctcccatcccccaccccaaacagcctcgtgttctggttcggggacctgaacttccgcattgagagctatgacctgcactttgtcaagtttgccatcgacagtgaccagctccatcagctctgggagaaggaccaggtggggtccttgtccccagaagcacacagagcatgtcccaggacacgcctgtaccttagactatggtccctgtcctcacctgccccaccccctccctgggcacagcagagcccaagctgttgtccaatctgctctcctggaccccccacagctcaacatggccaagaacacctggcccattctgaagggctttcaggaggggcccctcaacttcgctcccaccttcaagtttgatgtgggtaccaacaaatacgataccaggtgagctcagtccgaggagggactgaggggaagtgggctgaggtcttctcgaacagggagactttgggaagaggggcaggaggcaaggtggagggttacatcttgatccccagcccctgaaacttggggtacccctgctcactgcagtgccaagaaacggaagccagcttggacagaccgtatcctatggaaggtcaaggctccaggtgggggtcccagcccctcaggacggaagagccaccgactccaggtgacgcagcacagctaccgcagccacatggaatacacagtcagcgaccacaagcctgtggctgcccagttcctcctgcaggtgagttctggcctcatcctccccgcatgaaatccccaggcccaactcggcataccactgcccctcaccattaccctttgtataaccccttgtacctgccctcagcagcatccatttgttgtaacagtggaaatggggttgcaatctacattttcagatgaggaagctgaggctcagacacatggcatcacctgcccagggtcacccaactagtaagaggaacagttaggatttgaacccaagtgagtctggtttcagagcccatgccttttctttttttttttttttttttttttgagacagagtctcattctgtcacccaggctggagtgcagtggcacgatcttagctcactgcaagctccgcctcccgggttcaagtgattctcctgcctcagcctcctgagtagctgggattacatcacccgccaccacgccaggctaatttttgtatttttagtggagacagggtttcaccatgttggccaggctggtcttgaactcctgacctcctgatccacccaccttggcctcccaaagtgctgggattacaggcgtgagctaccgtgtctggccaactttttttttttttttttttttctttgagacggagtcttgctcagccgccccaggctggagtgcagtggcacaatcttggctcactgcaaccaccatctcctgggtccaagcgattctcccgtctcagcctcccaagtagctgggattacaggcacccgccgtcatgcccggctaatttttgtattttagtagagacagggtttcaccgtgttggccaggctggtcttgaactgctgacctcaggtgatccacccacctcagcctcccaaagtgctaagattacaggcatgagccactgtgcccggcgccctttttttttttttttttttttaatgcagtctcactctgttgcccaggctggagtgcagtggcgtggtctcggctcactgcaacctctacctcctgggttcaagtgattctcctgcctcagcctcctgagtaactgggattacagctgcccgccaccacgcctggctaatttttgtatttagtagagatggggttttgccatgttggccaggctggtctcgaactcctgacctccggtgatctgcccacctcggcctcccaaagtgctgggattacaaggtgtgagccaccacacccagccttagagcccgtgccttttctgctaatctctaactcctgtcttctgagaaaggtttagagtaatttatcttaaaattcatttataggctggcgcagtggctcacacctgtaatctcaacactttgagaggctgaggtggaaggatcacttcagctcaggagtttaagaccggcctgagcaacacagtgagacactgtctttaaaaaaaatcaaaaaaaggccgagcgcagtggctcacgcctgtaatcccagcactttgggaggctgatgtgggcggatcacatgaggccaggagtttgagaccagcctggccaacatggcgaaacccatctctactaaaaatacaaaaattagcctggcgcagtggtgcatgcctgtaatcccagttgcttgggaggctgaggcacaagaatcacttgaacctgggaggcagaggttgcagtgagccagtatcgtgccactgcactccagcctgggtgacatgagcaagactgtgtctcagggaaaaaataaaaataaaaataaaatttagctaggtggtgcacacctgtattcccagctatttatgaggctgaggtgggaagatcactggagcttggaagatctagtctgctgtgagctgtgatcgtaccactgcactccagcccaggcaacagagcaagaccttgtctcaaaaaaaaaaaaaaattcacatatgcatcatcattttcactactagtgtcttaaaaataacaaagaaaagatataaaaattcacatatataataagaccagcaaaatcaaactccatgtaacattcattcatattcattcattcgttatttactgagtacttaactgtcttaccatatgccaagcattatgagagtgtgtagtgatggggagggagagcaaagatataaaaaatacaaagctgaactcttaagtagttactataatttatattgtatttaggattgaggttcctggttgccgacatcaaaatgggaaatcctagaatctcagaaccagacctgtgagaccaatttggcccactccctttttttctgtggcgggatctgaggctcctcatggggtaggcacatgccccaaaccatacacaggctctgcagtggcagagcagggtagatcccatcttttcagccctgaaacccaactctgggctcttcaagtctcttgatctgataagagggagcccagcaggccagaaaatgtttttcctggtaactttgtcacatggccagtcagtgggacattggccaatatctttagctgggaatggaaatatccccacgcttggcctgccatgacctctggcaaaagtgttgggcatgaagatttaacccacaattagggacctcacctgaaaaatcactccttttgacaccccatcctgtccttcccacctcctccaggactctgtccctttaaaaacatttcccaaccaggtgcagtggctcacgcctgtaatcccagcactttgggaggctgaggcagacggatcactaggtcaggagttcgagaccagcctggccaacacagtgaaaccctctctctactaaaaatacaaaaattacctgggtgtggtggtgcgcacctgtagtcctagctactcgggaggctgaggtagaggaattgcttgaacccgggaggcggaggttgcagtgagttgagatggcaccactgcactccagcctgggctacagagcgagactctgtctcaaaaaaaaaaaaaaaattcccattgagtacctactacatgccaggcctgtgtagtgcactttacatatgtcatccttttgaatgcctcagtaggccctgagatgtcccagttttcctctctgttttactggtgagggaaactgaggctcagagaacttaagtctcttagccaaggcaatgcagtcagaatagggctcagtaggggttttgatgctgcaaggccttggagggcattttcaaaggtctacccttgcccgcccctgctgttaggaacacaggaacagggaaagaatgtgccagttacttctggaacagattggctcggaagctgagggagggaaacctgaaactaggtaaacaggggatcagacaaagatctggtgttggcaacaactcagtccttccctgagggacagaggtggggtcaatatcctggcagcctgccacctcagcagctccacccattcaggtggcgcccctggtgggtctgggttgaccttggggaaaggatactcgtggttataactttccttcatggactgatgacaaggtaatagttagtaaccgcttagtacttagactcagttggagaaactgaaccttgggatggttagagcctgccctggggtaacatagcgagttagcagtagagcctggaagtggactgaggtctccatcctcccacgcagagctcttcttgcctgctcaggaatattcagcttaccccaaatacccagtgcatcataggattttattggtcttccttgctagcatagagacaaatcatttattgagcacttactggtatactgggaaatttatgggatgctttgcaaatggtgtctcactgaatctgctgaacaactccaagagtaaaataagagtctctgagtttggccgggcacggtggctcatgcctataatcccagcactttgggaggctgaggtgggtggatcatttgaggtcaggagttcaagaacagcctggccaacatggtgaaacgctgcctctactaaaaatacaaaaattagccaggcgtgatggcggtacctgtggtctcagctactggggaggctgagacaggagaatcacttgaacccgggaggtggaggttgcagtgagccgagattgcaccactgcactccagcctgggtgacagagcgagactccatctcagaaaaagaaaaaaaaaaaaaagagtctctgagtttacagatgagggccctggcattcagagaggctgaggaactcacccagcctgtcaacggcagaaccagagccaaatccaggatttgctagcttcaaagctatgttctcactcactccctaaggaggctgtgggcagaaggaaccctgggctgggaggcagcacagggcttggtatttatactagacctgttctgcctcagtttcccagtctgtaaagtggccctttgtctcaggcaatttgtgctaagacccaagagccttaagtgtgtgggatactagagggtctcccctgatgtggccccctgcccctgccttgcctggacagtttgccttcagggacgacatgccactggtgcggctggaggtggcagatgagtgggtgcggcccgagcaggcggtggtgaggtaccgcatggaaacagtgttcgcccgcagctcctgggactggatcggcttataccgggtgagaggggcagtggtggtcagcgactcagggaagaaaggggcctggaggagcagctgaacagcatggtggggtcactggcttgtccagatcttgatgccacactgggagactgctgggatcagacattatagggtcacaacactgattccacaacactgatcccccaggtgggtttccgccattgcaaggactatgtggcttatgtctgggccaaacatgaagatgtggatgggaatacctaccaggtacttaaaaggagtgggagagtcagggcaagtccttgttgcctttgggacctcagaactcaccttgggggctctcaggtggcctccctgacccccaacttaggcttatacccctgggcctaccaggtaacattcagtgaggaatcactgcccaagggccatggagacttcatcctgggctactatagtcacaaccacagcatcctcatcggcatcactgaacccttccaggtaagtaggccagactgctgggctgggggtgcctaaagacttttgtcaaatgccacagcctctacattctgctccttgagttcagacaaataacctgacctcccaagatctgccaacgagagaggcagacctcgggaggtcaggcctcagtggctgggttggggagcagggcgccccagtgaccagcatttcccccagatctcgctgccttcctcggagttggccagcagcagcacagacagctcaggcaccagctcagagggagaggatgacagcacactggagctccttgcacccaagtcccgcagccccagtcctggcaagtccaagcgacaccgcagccgcagcccgggactggccaggttccctgggcttgccctacggccctcatcccgtgaacgccgtggtgccagccgtagcccctcaccccagagccgccgcctgtcccgagtggctcctgacaggagcagtaatggcagcagccggggcagtagtgaagaggggccctctgggttgcctggcccctgggccttcccaccagctgtgcctcgaagcctgggcctgttgcccgccttgcgcctagagactgtagaccctggtggtggtggctcctggggacctgatcgggaggccctggcgcccaacagcctgtctcctagtccccagggccatcgggggctggaggaagggggcctggggccctgagggtggggtaggcagatgggccaaggtgaccaccattctgcctcaatcttttgcaagcccacctgcctctctcctgctgctcctccagctgtatctgcacctgcctctctgtcctggccaggggtggacaactggggtcccccaaaactcagtcctggcacctcaactgtgacaatcagcaaagccccacccaggcccccatctgggatgatgggagagctctggcagatgtcccaatcctggaggtcatccattaggaattaaattctccagcctca

SEQ ID NO: 588 - DNA, 432 bp, Homo sapiens
caccccaatcctggattcagacacagacatttctgtgacatccctaacttcccacctgctacctcaggccacagcacccaggcactagggctcccctaggcaggtttttgaggcatgtattatttttgcaacacggacatacatgtacctcctcctggtactgcctggggctgctgcaataagttaccctttccccattctcatctgtatgtgaagttccctggcaaggccaaagcccagggcatcagaatgagcttcctgaacaccacatccaggcatagaagagttgtgtcatacatagctcaaggttacccagaacagcaggagatgtggtccagcatttgggccttgagatccccccattcatcctcttgattgtccacaacagcctctgccatgcttcagtctaacctacggaggggaggctgagat

SEQ ID NO: 589 - DNA, 1782 bp, Homo sapiens
cccagcaagcacacccttttcttaatctcattagaatataaacacaaatgttatgatcttttatttaggataaatttcctcttttaaatgtttttgtttattcaaaagaaaacttcacaaagttactattactagttaaaatatatattagaagtgcctgatttttgtcagagattcttacaaacaatattaaaaacaaacttgaaaagtatctactacagaagcacttagactatcacagaaaaatacaatgaagagttaaatgtctgagataagaccagcaagcttatagttataaagaaaaacacactgtacaatgtttgggggggaaatctgttgtttatagaaaagctttacctttttcttatttatcctcagataacgttgtgaaatctgctcatcagtaaggatgatatggaaagaattctctttttctatctatggtttatttacatattaaaattttactcagtttattaagtacacatatgataccacactagatgcaaatatatatacaggctatgacagtcaatgttcaatttaatactggtcaataaagtgaatttattcaaatgtaacaacttcacttgaattttttggatcacacatatcctatataaagccatctggtttctaatattatgcacaacacattccattttaattataacattcatctacaagaaaaacaaggaaaacaattcaaaactatgttagtaattagttcttgtttggtccattgtacgcaatcaggaaagtataggacttaattagttgctatcaaattgaagcaatgaaaaaggttaaaaatcaaagtacttaaaataaaaatatggaaataaccccccctccccaatactaaagggacacaaaacaacaactactgtcccatcaagcaaaagtggaaaacaaacagagcatgtgtgtaacctcacttaccatctttttgttattctacttcaacgggtcaagaaaggtgaagagagagaaggtagaagtaagagtcagaaaaggcctaaataaaatcctcactgaaatgtttaaacatacaagcaatagagacaattaggttgaggtcagatgcagtactactatatttaatggagttaataattagggccaaattaacatggacagttattcctgaatgcaaattaactcattaaacgatttaaatttccatttttcagtctaccacattttagctaacaagacacaaaaagtataagtcaaaatactaagcacaggaattccaaaaagtaagcttctttaattcattactgaacttaagaactttaattaagaaaaataaatgataacagcaaaggtctagctgagtaggcagagtgttagatagctcagggttgtttttccaagctctagtgttcaagttaaatttatttgacacaggtatcttttgctgttttctactcgaagaataatttaacttgataggcttacaagattgcacagagtgaacagaattgagccaatagaatacagaatgacaaaccatacaagcaaatgctgctagggaattccttggcaaaaatgttttattagcatactgacaaatttgatttctatcacttggccttaaacacgaagaaagtgggcatgaagagatgtgtagttatttgtgcctatgttgcaaaataaatttatggctatacatgatatttcttcatacctcaaaaattttattgtccagtatataaaaaagccattctttaaaaacctgacactgaataaaaagtatagccttcaacttcattaaac

SEQ ID NO: 590 - DNA, 98 bp, Homo sapiens
gagtctcactcttgcccaggctggaatgcagtggcgtgatctcggctcactgcaacctctgcctcccgggttcaagcgattctcctgcctcagcttcc

SEQ ID NO: 591 - DNA, 169 bp, Homo sapiens
aaaatacaaaaattatccaggcgaggtggtgcacacgtgtagtcccagttactcgggaggctgaggtgggaggatggcttgaacctgggaggtgaagattgcagtgagctgagatcacaccactgcattcagtctggataatagaacaagactctatctcaaaaaaaaa

SEQ ID NO: 592 - DNA, 170 bp, Homo sapiens
aaaatacaaaaattatccaggcaaggtggtgcacgcgtgtagtcccagttactcgggaggctgaggtgggaggatggcttgaatctgggaggtgaagattgcagtgagctgagatcacaccactgcattcagtctggataatagaacaagactctatctcaaaaaaaaaa

SEQ ID NO: 593 - DNA, 7734 bp, Homo sapiens
attgttcagtcactaccttagagcctgttttattttttcttaattttattgactcatttatatctcagccctttttattacaaattatttattgtttagtcactgccttagagcctgttttattttttcttaattttattaaaggataatattgatgatgaaatgtcttacgatgatcatttagaggtttattttgaacaactggcaattccaggaatgatggaataaagcatacgaagtagaaggactggaacctccagaaaaagtactttaagttacctacaggtgatcctagtcaggtatgttacagtcttaatggcttttcagaaatttgacagaaaatcactattgatctcactggatgtttacatgaattttaagcctttggttttcttttaactctgttttttacaggtatgaattgataagaaatgcctgcaccttccctccttcctatctttcccttgcctacagaaaattaaaaggcaaaacaatagacatctgcatattcttcattcagatcaaccagtggctagcatttgccaccttttgcagtttctttctctttccataagtactttcttctctgaatcatttgaaagtaagttgcaaagagcatggtgttttaccccaacacttcagcatttatctcttgtgaataatgacatgttctatgtaattacagttctaccatctaactataatacagtaatttgatgtacagcccatattcagatttacctaattgtctccaaaatgttctttatttttgttttagatccacagtttaatcaaagattaaccttgcctttggttgtcacatctctctattcttttactttggagtagttctttcaatacatgaaacattttgaaaaatctaggctctttgttttgtggagtgacccataatctagatatatctggttgcttttttcttctgactagaatagattgagcattttggcaagaatacagattaaacagtgttctcatgaatggatccagattaaacagggaataatgcctaattcagattaggcagtgttgcgtacttaccacctcacaccaggagatgtttgcgtctgtttgtcccacgattgctgatgctatgtttaataattttggttgagatagtgtcaactggacatctccttgtgagggtagcttttcccttttgttattagtcatctgtggaatgagacatcaaagcactgtgaacatcttactccccggcaaacttcacgagctggtttcagcgtcattgctgaaggctcttggaaacattgcttacacccgtggttccaatggtgatttttctcattccttttacattgattacctgcctccttgagtgaggtagatgttgtctgctccccatgttttcccttcaaatgtttaattttaatttaaatgattaatacagctaagttattctttcaacaggcaaatgaaaacagtagcctaaagtgtcagtttcaaccagaaaataacagctctgatttctcatggctcatactcgtctgaaacgactcaggtagaggctgaggaaggccgtgttgtttgtctacctgggactagtaagtatagaaatagaattcctttgttcttaaattctacctttgactttacttttaaaatataatttctttggtacgatttagctcatgcctataatcctagcattttgggaggccaaagagggagaattgcttgagcccaggagtttgagaccagactctacacacacacacacacacacacacacacacacacacacacacacacgcgcacacgaagcgggaatggtggcatgcgactgagaccccagctacctgggaggctgaggttggaggatcatttggacccaggaggtggaggctgcagtgaaccatgattgtgccactgtactccagcctgggtgacagagcaagaccctgtctcacaaaagaaaaagaagaagagatcatctattagtcttcttgatttttgttaaaatgtgttatgtgatagttgataagctttatgcatatgtcaatctgtggccatttaattttgggctaaggacttgttctattatagcacagtaatcattttactaaatagtgactatttgtcattaaaaacaatatatttagttttaatacagttgaatactcacaaatttctgggggaacttggtcaggacatttcaactgagaattgtcaggcaccttctcactgataggcatgctgctcggtggtgcagctcataagcagacaacccccttcacgtaatttagtaggaaaatgacagaaatacttgtgtaactataaagtaaagcagaattctggttattgaatcacagcacctactgaaagaagttctcaagttctgattgagttctaaaattttttgaagattggaattcttcatatgtaagtaaaaacaatttctgatgacccatttctagtccatcttctaaagaagtatttaatctgggccaggcacagtggctcacgcctgtaatcccagcactttgggaggccggggtgggtggatcatgaggtcaagagatcaagaccatcctggccaacatggtgaaaccccatctctactaaaaacacgaaagttagctgagcatggtggcgcgtgcctgtagtcccagctactcgggaggctgaggcaggagaatcacttgaacctgggaggtgggggctacagtgagctgaaattgcgccactgcactccagcctggcaacagagcaagactccatctgaaaaaaaaaaaaaaaaaaaaaaaagaagtatttagtctaagctgggcatgatggctcactcctgtaatcccagcactcttagaggccaaggtatgagggttactataaaccaggagtttgacaccagcctaggcaacaatagcaagaccccatttctacaaaaaaaaatttaaaaattagctgtgcaggaggctgagttgggaggatcacttgagcttaggagttagaggttgtagaaagctatgatcataccactgcactccaggctggatgacagtgggccctgtctctaaaacacaaaaaaaaaccaacaaaaaaagtgtttaatccataagatgaccacatttataggaggctcccggcaatcttagcctgaagccatgaaggaagacgcagtgtgaaggcaagtgcaggctggcctctggcagctgaggatcaggacaggatgtggagtgaacatccacatcaaagctttattgcttggattggaaaaaaaattcctatctgtaggtcagccttaaaatacaccatttcataaaatattgattgtctttcccatattttgagcccatgcaatttgtgctacctgagggaacagtattgtgtccttgatttggtgagatcagtagctttcttatcttattgagtgacagctacagaactcagaaacagaagctgcatattaagcaaatttatatctttcttgttataatattattgtgtataagaaatagagatggccgggtgcggtggctcacgcctgtaatctcagcactttgggaggctgaggcagatggatcacacggtcaggagtttgagaccagcctggccaacatggtgaaaccctgtctctactaaaaatacaaaaggcaataagaggttctatgtggactttgaaggtcgtctctatcaatttgaggttggaaagaacagttttgttgacatcctttagctgtgttacaagtacaattttgttttttactcaggcaaaagaaaatgtgtgtgtgtgttaaatacagtcagccctctttatctgtgggtcctgcatccttgctttctaccaacctcagatcaaaaatattccagaaaaaaaaggatggttgcatctgtactgaatatgtacaagctttttttcttgtcattctttatgcaataaagtataacaaccatttacgttgcatttccattgtattaggtattgtgggtaatctagagatgatttgaaggatattggagggtgtgtccaggctgcaggcaagtactatggcattttatgtcagggacacctacagatttttgtctccagccatggttcctgtatagtttaacatttccacacgctgagggtgtgatgggtctgagttgggttggtcccccatgtttgaggaagtgtgcccatcatgattgtacacccttgttgtaaacttcggatatgtctattttgatatttaaaacattttcaggttaagtctgaaaaatgccaagatagtaacaatattttaaaagggaattcagaagtattactataataatagaactcattattagaacattctaatagtagaaaaggaagtctatttattttataaaattgtcagttcagcttaagatctaatagtcttttccaattagcagcaacttaattgagactacctcaaaagaagaatttaacatttatttttgtagaaaaaaagcaattttaaaatagcctgggaaaacttaggtaagttttccttaatcctgactcctaatttgtggctagaagtggcaatgatatgaacataagttgtgctatttgttaatatattgcttttcataaatcaatcccttttttgtaattaggtaaaaagagaagagaaagacattcttgattttggtgactagagttgtagatgctggaagctttgccactaacattgatgaaccagatgcatgtcaccagcccatcacggtgattcttaatgccgttaagtatgaacatacagtaaaagactgttgatagaatacatcggtcttatgaaatgaaatgtgttggttaaggattttttaaacgaatttcacattacacaactggctttactaaatctgagtcttgtatttctgaacagggcaccatgggcccggcactgccacgttttccaaggaacctgccggagctcctgcggaagctgctcctcaggcgatggagtcccttcgctggtaggcccttcttcagtcaccacaggatgcctgccattcatgaacaagaaggagaggacgggctttgaataaaaaacaggtaagtttccaaactgctttttttcatcaagatttcaatcttggctgggcaaagtggctcacgcctgtaatctcagcattttgggagaccaaggcgggcagatcatgaggtcaggagatagagaccatcctggccaacatcatctcctcagcacccagctcagtcatttagacaaagaaaatatgtaagatggccgagcacggttgctcacgcctgtaatcccagcactttgggaggctgaggtgggcggatcacgaggtcaggaggtcaggagatcgagaccgtcctggctaacacggtgaaaccccatctctactaaaaatacaaaaaaaaaaaaaaattagctgggcatggtggcaggcacctctagtcccagctactcgggaggctgaggcaggagaatgacgtgaagccaggaggcggagcttgcagtgagctgagatcgtgctactgcactccagcctaggcaacagagcgagactccttctcaaaaaaaaaaagaaaagaaagaaaaagaaaacacgtaagaaatagttgccaaaataattgaatacaggatcttcaactgagattattttctttgttaggatccaggaaatatttgtgaggccatttggacttcagtgtgaaatggtgttaaaagatgaagtcatttattcaagaagtaaacctctgccacctggactgtgcgcagacatttcattgattttgtttaataaacattttctggctttgggaggtgtctctcttggtagaacacagtgtcaaagatggacaagatggacacatagtccattatttggtattgtttgtgtatgggagcagaccacaaattaatgtttggagaacaattttgtcataacacactgttgaggctcagttgtacagaactggaaaagtcttcagcttggcacatgtcctgattcagcctttgtttaacatacattccaatccggattctatcttcactggctacaaagaccacctgatacgtgcaccacgacacaggagctgctggagagggggtagtgttatcacctcaaacccacagccatatttttcaaaagccagcttagagagaggtgtactgatagctgcatagagaacatgcagtccatccattcttcccagtgatgtacatttctcaatcagtaaccacgtggtataccagccttgagtgtcacatctcccaaccataccaaatggatcacctaactggaggtggggggggccctcagaaatgagatttcgtatttactgtaaaattgccttattttttcttttgaggtggagtctcactctgttgcctgggctggagtgcaatggtgtgatcactgctcactgcaacctccgcctcctgggttcaagcagttctcctgcctcagcctcccaagtagctgcaattacaggtgcatgccaccactcccagcaaatttttatatttttagtggagacagggtttcaccatgttgaccaggctggtctcaaactcctgacctcaggtgatctgcccaccttggcctcccaaagttctgggattaaaggtacgagccaccgcaactggctgagaatctttttatttgctgatttgtctcttgtgtattttctttgttcagatgtctcttcagatctttttctcacttttaaattgttttttaattgttaagaattttctgtctagtttagatataagccctttatcagacatgtgttttgcaaatattttctcctagtctgtggcttgtattctgtctcttaacactcattttatttttacttttggaactaaagaagaagaatggtcagctttccattattcttgtaacagtaatggcagaaccaagtctgctaatgctacactgagcaaagaaagtcacctggtgaagtccaacattaatgaaatggggtagtacatgcaggcagcgttgggggtggggagggaacaaatgcttcttgagagtaatataatctgccataccatccaggaacctacaatggctatctattaccttattctctggtttgtttaatgttcgaatctttccgaaagatccttcaacctttctggaagaatctaatctgataacaccatcaaaaacacattacttcttttggcataatttaaattgtaagacatcattcacatttatcaatgttacatatataagaactcacccaccatattcttccttgaggaattacagcatgtaattctataatcatttttataatcgtctaacaattttataatggattggttgcttactatcaattttttaaaagtcatggcttctccagtcatttcttgcttatcgaaattatttcatgagatgggtctctccttgtatatttgaaaatgaggtttgcttccttctacttaaaaaacaacttgaacatacctgtttggatcacatggtcttgtcctgataacttggaagaggttgcttcagcattgttcttattgttgtggtggttattattaatattgtttcatattctgtttaaaaaattaaaattttacacaagaccaatgtcttcttttcaattccagtacatttttcagaagtaactaatgctattggctttgtgcattgtaatttcagaccattttatatgtctttagttatatgtacagtatacacacatatgtgtcatattattccattttttctagcattaaacattgctatggaaaa

SEQ ID NO: 594 - DNA, 294 bp, Homo sapiens
gagactccacctcggaaaaaaaaaaaaaaagccagtgccaacttagaccatgactgagagctcttggtttatcttatccttgctgagctgggtgttacaacattgaagccttctgcagtgtcctccctccctttttctctctttctctctctctcctccctttcttccttttacttctcttatgataggctcgtctgtacttttttgatagaggtaaccatttgccacaccattttctgaagggcctgctctcttccccattcatttgtgatggcacatttatcctaccctaag

SEQ ID NO: 595 - DNA, 98 bp, Homo sapiens
catattcttcattcagatcaaccagtggctagcatttgccaccttttgcagtttctttctctttccataagtactttcttctctgaatcatttgaaag

SEQ ID NO: 596 - DNA, 407 bp, Homo sapiens
gtcccagctactcaggaggctgaggcaggagaatggtgtgaacccaggaggtggagcttgcagtgagccgagatcacgccactgcactccagcctaggtgacagagtgagactccacctcgaaaaaaaaataaataaataaaagccagtgccagcttagaccatgactgagagctcttggtttatcttatccttgccgagctgggtgttacaacattgaagccttctgcagtgtcctccctccctttttctctctttctctctctctcctccctttcttccttttacttctcttaggataggctcgtctgtacttttttgatagaggtaaccatttgccacaccattttctgaagtgcctgctctcttccccattcatttgtgatggcacatttatcctaccctaag

SEQ ID NO: 597 - DNA, 640 bp, Homo sapiens
aaattgtaagcgttaatattttgttaaaattcgcgttaaatttttgttaaatcagctcattttttaaccaataggccgaaatcggcaaaatcccttataaatcaaaagaatagaccgagatagggttgagtgttgttccagtttggaacaagagtccactattaaagaacgtggactccaacgtcaaagggcgaaaaaccgtctatcagggcgatggcccactacgtgaaccatcaccctaatcaagttttttggggtcgaggtgccgtaaagcactaaatcggaaccctaaagggagcccccgatttagagcttgacggggaaagccggcgaacgtggcgagaaaggaagggaagaaagcgaaaggagcgggcgctagggcgctggcaagtgtagcggtcacgctgcgcgtaaccaccacacccgccgcgcttaatgcgccgctacagggcgcgtccattcgccattcaggctgcgcaactgttgggaagggcgatcggtgcgggcctcttcgctattacgccagctggcgaaagggggatgtgctgcaaggcgattaagttgggtaacgccagggttttcccagtcacgacgttgtaaaacgacggccagtgaattgtaatacgactcactatagggc

SEQ ID NO: 598 - DNA, 606 bp, Homo sapiens
gttatatttttgttaratcagctcattttttaaccaataggccgaaatcggcaaaatcccttataaatcaaaagaatagaccgagatagggttgagtgttgttccagtttggaacaagagtccactattaaagaacgtggactccaacgtcaaagggcgaaaarccgtctatcagggcgatggcccactacgtgaaccatcaccctaatcaagttttttggggtcgaggtgccgtaaagcactaaatcggaaccctaaagggagcccccgatttagagcttgacggggaaagccggcgaacgtggcgagaaagkaagggaagaaagcgaaaggagcgggcgctagggcgctggcaagtgtagcggtcacgctgcgcgtaaccaccacacccgccgcgcttaatgcgccgctacagggcgcgtccattcgccattcaggctgcgcaactgttgggaagggcgatcggtgcgggcctcttcgctattacgccagctggcgaaagggggatgtgctgcaaggcgattaagttgggtaacgccagggttttcccagtcacgacgttgtaaaacgacggccagtgaattgtaatacgactcactatagggc

SEQ ID NO: 599 - DNA, 628 bp, Homo sapiens
aagcgtaatatttgtaaaattcgcgttaaattttgtaaatcagctcattttttaaccaataggccgaaatcggcaaaatcccttataaatcaaaagaatagaccgagatagggttgagtgttgttccagtttggaacaagagtccactattaaagaacgtggactccaacgtcaaagggcgaaaaaccgtctatcagggcgatggcccactacgtgaaccatcaccctaatcaagttttttggggtcgaggtgccgtaaagcactaaatcggaaccctaaagggagcccccgatttagagcttgacggggaaagccggcgaacgtggcgagaaaggaagggaagaaagcgaaaggagcgggcgctagggcgctggcaagtgtagcggtcacgctgcgcgtaaccaccacacccgccgcgcttaatgcgccgctacagggcgcgtccattcgccattcaggctgcgcaactgttgggaagggcgatcggtgcgggcctcttcgctattacgccagctggcgaaagggggatgtgctgcaaggcgattaagttgggtaacgccagggttttcccagtcacgacgttgtaaaacgacggccagtgaattgtaatacgactcactatagggc

SEQ ID NO: 600 - DNA, 640 bp, Homo sapiens; identical to SEQ ID NO: 597

SEQ ID NO: 601 - DNA, 513 bp, Homo sapiens
gagtgttgttccagtttggaacaagagtccactattaaagaacgtggactccaacgtcaaagggcgaaaaaccgtctatcagggcgatggcccactacgtgaaccatcaccctaatcaagttttttggggtcgaggtgccgtaaagcactaaatcggaaccctaaagggagcccccgatttagagcttgacggggaaagccggcgaacgtggcgagaaaggaagggaagaaagcgaaaggagcgggcgctagggcgctggcaagtgtagcggtcacgctgcgcgtaaccaccacacccgccgcgcttaatgcgccgctacagggcgcgtccattcgccattcaggctgcgcaactgttgggaagggcgatcggtgcgggcctcttcgctattacgccagctggcgaaagggggatgtgctgcaaggcgattaagttgggtaacgccagggttttcccagtcacgacgttgtaaaacgacggccagtgaattgtaatacgactcactatagggc

SEQ ID NO: 602 - DNA, 612 bp, Homo sapiens
ttcgcgttaaatttttgttacaatcagctcattgtttaaccaataggccgaaatcggcaaaatcccttataaatcaaaagaatagaccgagatagggttgagtgttgttccagtttggaacaagagtccactattaaagaacgtggactccaacgtcaaagggcgaaaaaccgtctatcagggcgatggcccactacgtgaaccatcaccctaatcaagttttttggggtcgaggtgccgtaaagcactaaatcggaaccctaaagggagcccccgatttagagcttgacggggaaagccggcgaacgtggcgagaaaggaagggaagaaagcgaaaggagcgggcgctagggcgctggcaagtgtagcggtcacgctgcgcgtaaccaccacacccgccgcgcttaatgcgccgctacagggcgcgtccattcgccattcaggctgcgcaactgttgggaagggcgatcggtgcgggcctcttcgctattacgccagctggcgaaagggggatgtgctgcaaggcgattaagttgggtaacgccagggttttcccagtcacgacgttgtaaaacgacggccagtgaattgtaatacgactcactatagggc

SEQ ID NO: 603 - DNA, 462 bp, Homo sapiens
caacgtcaaagggcgaaaaaccgtctatcagggcgatggcccactacgtgaaccatcaccctaatcaagttttttggggtcgaggtgccgtaaagcactaaatcggaaccctaaagggagcccccgatttagagcttgacggggaaagccggcgaacgtggcgagaaaggaagggaagaaagcgaaaggagcgggcgctagggcgctggcaagtgtagcggtcacgctgcgcgtaaccaccacacccgccgcgcttaatgcgccgctacagggcgcgtccattcgccattcaggctgcgcaactgttgggaagggcgatcggtgcgggcctcttcgmtattacgccagctggcgaaagggggatgtgctgcaaggcgattaagttgggtaacgccagggttttcccagtcacgacgttgtaaaacgacggccagtgaattgtaatacgactcactatagggc

SEQ ID NO: 604 - DNA, 640 bp, Homo sapiens; identical to SEQ ID NO: 597

SEQ ID NO: 605 - DNA, 640 bp, Homo sapiens; identical to SEQ ID NO: 597

SEQ ID NO: 606 - DNA, 654 bp, Homo sapiens
aataccgcatcaggaaattgtaagcgttaatattttgttaaaattcgcgttaaatttttgttaaatcagctcattttttaaccaataggccgaaatcggcaaaatcccttataaatcaaaagaatagaccgagatagggttgagtgttgttccagtttggaacaagagtccactattaaagaacgtggactccaacgtcaaagggcgaaaaaccgtctatcagggcgatggcccactacgtgaaccatcaccctaatcaagttttttggggtcgaggtgccgtaaagcactaaatcggaaccctaaagggagcccccgatttagagcttgacggggaaagccggcgaacgtggcgagaaaggaagggaagaaagcgaaaggagcgggcgctagggcgctggcaagtgtagcggtcacgctgcgcgtaaccaccacacccgccgcgcttaatgcgccgctacagggcgcgtccattcgccattcaggctgcgcaactgttgggaagggcgatcggtgcgggcctcttcgctattacgccagctggcgaaagggggatgtgctgcaaggcgattaagttgggtaacgccagggttttcccagtcacgacgttgtaaaacgacggccagtgaattgtaatacgactcactatagggc

SEQ ID NO: 607 - DNA, 414 bp, Homo sapiens
tgaaccatcaccctaatcaagttttttggggtggaggtgccgtaaagcactaaatcggaaccctaaagggagcccccgatttagagcttgacggggaaagccggcgaacgtggcgagaaaggaagggaagaaagcgaaaggagcgggcgctagggcgctggcaagtgtagcggtcacgctgcgggtaaccaccaccaccgccgcgcttaatgcgccgctacagggcgcgtccattcgccattcaggctgcgcaactgttgggaagggcgatcggtgcgggcctyttcgctattacgccagctggcgaaagggggatgtgctgcaaggcgattaagttgggtaacgccagggttttcccagtcacgacgttgtaaaacgacggccagtgaattgtaatacgactcactatagggc

SEQ ID NO: 608 - DNA, 647 bp, Homo sapiens
  misc_feature (29)..(29): n equals a,t,g, or c
cgcatcaggaaatgtaagcgttaatattntgtaaaattcgcgttaaatttttgttaaatcagctcattttttaaccaataggccgaaatcggcaaaatcccttataaatcaaaagaatagaccgagatagggttgagtgttgttccagtttggaacaagagtccactattaaagaacgtggactccaacgtcaaagggcgaaaaaccgtctatcagggcgatggcccactacgtgaaccatcaccctaatcaagttttttggggtcgaggtgccgtaaagcactaaatcggaaccctaaagggagcccccgatttagagcttgacggggaaagccggcgaacgtggcgagaaaggaagggaagaaagcgaaaggagcgggcgctagggcgctggcaagtgtagcggtcacgctgcgcgtaaccaccacacccgccgcgcttaatgcgccgctacagggcgcgtccattcgccattcaggctgcgcaactgttgggaagggcgatcggtgcgggcctcttcgctattacgccagctggcgaaagggggatgtgctgcaaggcgattaagttgggtaacgccagggttttcccagtcacgacgttgtaaaacgacggccagtgaattgtaatacgactcactatagggc

SEQ ID NO: 609 - DNA, 640 bp, Homo sapiens
aaattgtaagcgttaatattttgttaaaattcgcgttaaatttttgttaaatcagctcattttttaaccaataggccgaaatcggcaaaatccsttataaatcaaaagaatagaccgagatagggttgagtgttgttccagtttggaacaagagtccactattaaagaacgtggactccaacgtcaaagggcgaaaaaccgtctatcagggcgatggcccactacgtgaaccatcaccctaatcaagttttttggggtcgaggtgccgtaaagcactaaatcggaaccctaaagggagcccccgatttagagcttgacggggaaagccggcgaacgtggcgagaaagsaagggaagaaagcgaaaggagcgggcgctagggcgctggcaagtgtagcggtcacgctgcgcgtaaccaccacacccgccgcgcttaatgcgccgytacagggcgcgtccattcgccattcaggctgcgcaactgttgggaagggcgatcggtgcgggcctcttcgctattacgccagctggcgaaagggggatgtgctgcaaggcgattaagttgggtaacgccagggttttcccagtcacgacgttgtaaaacgacggccagtgaattgtaatacgactcactatagggc

SEQ ID NO: 610 - DNA, 640 bp, Homo sapiens
aaattgtaagcgttaatattttgttaagattcgcgttaaatttttgttaaatcagctcattttttaaccaataggccgaaatcggcaaaatcccttataaatcaaaagaatagaccgagatagggttgagtgttgttccagtttggaacaagagtccactattaaagaacgtggactccaacgtcaaagggcgaaaaaccgtctatcagggcgatggcccactacgtgaaccatcaccctaatcaagttttttggggtcgaggtgccgtaaagcactaaatcggaaccctaaagggagcccccgatttagagcttgacggggaaagccggcgaacgtggcgagaaaggaagggaagaaagcgaaaggagcgggcgctagggcgctggcaagtgtagcggtcacgctgcgcgtaaccaccacacccgccgcgcttaatgcgccgctacagggcgcgtccattcgccattcaggctgcgcaactgttgggaagggcgatcggtgcgggcctcttcgctattacgccagctggcgaaagggggatgtgctgcaaggcgattaagttgggtaacgccagggttttcccagtcacgacgttgtaaaacgacggccagtgaattgtaatacgactcactatagggc

SEQ ID NO: 611 - DNA, 571 bp, Homo sapiens
aataggccgaaatcggcaaaatcccttataaatcaaaagaatagaccgagatagggttgagtgttgttccagtttggaacaagagtccactattaaagaacgtggactccaacgtcaaagggcgaaaaaccgtctatcagggcgatggcccactacgtgaaccatcaccctaatcaagttttttggggtcgaggtgccgtaaagcactaaatcggaaccctaaagggagcccccgatttagagcttgacggggaaagccggcgaacgtggcgagaaaggaagggaagaaagcgaaaggagcgggcgctagggcgctggcaagtgtagcggtcacgctgcgcgtaaccaccacacccgccgcgcttaatgcgccgctacagggcgcgtccattcgccattcaggctgcgcaactgttgggaagggcgatcggtgcgggcctcttcgctattacgccagctggcgaaagggggatgtgctgcaaggcgattaagttgggtaacgccagggttttcccagtcacgacgttgtaaaacgacggccagtgaattgtaatacgactcactatagggc

SEQ ID NO: 612 - DNA, 640 bp, Homo sapiens; identical to SEQ ID NO: 597

SEQ ID NO: 613 - DNA, 639 bp, Homo sapiens
  misc_feature (88)..(88): n equals a,t,g, or c
aattgtaagcgttaatattttgttaaaattcgcgttaaatttttgttaaatcagctcattttttaaccaataggccgaaatcggcaanatcccttataaatcaaaagaatagaccgagatagggttgagtgttgttccagtttggaacaagagtccactattaaagaacgtggactccaacgtcaaagggcgaaaaaccgtctatcagggcgatggcccactacgtgaaccatcaccctaatcaagttttttggggtcgaggtgccgtaaagcactaaatcggaaccctaaagggagcccccgatttagagcttgacggggaaagccggcgaacgtggcgagaaaggaagggaagaaagcgaaaggagcgggcgctagggcgctggcaagtgtagcggtcacgctgcgcgtaaccaccacacccgccgcgcttaatgcgccgctacagggcgcgtccattcgccattcaggctgcgcaactgttgggaagggcgatcggtgcgggcctcttcgctattacgccagctggcgaaagggggatgtgctgcaaggcgattaagttgggtaacgccagggttttcccagtcacgacgttgtaaaacgacggccagtgaattgtaatacgactcactatagggc

SEQ ID NO: 614 - DNA, 397 bp, Homo sapiens
atcaagttttttggggtcgaggtgccgtgaagcattaaatcggaaccctaaagggagcccccgatttagagcttgacggggaaagccggcgaacgtggcgagaaaggaagggaagaaagcgaaaggagcggacgttagggcgctggcaagtgtagcggtccgtgcgcgtaaccaccacacacgctgcgcttaatgcgccgctacagggcgcgtccattcgccattcgaggtgcgcaactgttgggaagggcgatcggtgcgggcctcttcgctattacgccagctggcgaaagggggatgtgctgcaaggcgattaagttgggtaacgccagggttttcccagtcacgacgttgtaaaacgacggccagtgaattgtaatacgactcactatagggc

SEQ ID NO: 615 - DNA, 648 bp, Homo sapiens
gcatcaggmaattgtaagcgttaatattttgttaaaattcgcgttaaatttttgttaaatcagctcattttttaaccaataggccgaaatcggcaaaatcccttataaatcaaaagaatagaccgagatagggttgagtgttgttccagtttggaacaagagtccactattaaagaacgtggactccaacgtcaaagggcgaaaaaccgtctatcagggcgatggcccactacgtgaaccatcaccctaatcaagttttttggggtcgaggtgccgtaaagcactaaatcggaaccctaaagggagcccccgatttagagcttgacggggaaagccggcgaacgtggcgagaaaggaagggaagaaagcgaaaggagcgggcgctagggcgctggcaagtgtagcggtcacgctgcgcgtaaccaccacacccgccgcgcttaatgcgccgctacagggcgcgtccattcgccattcaggctgcgcaactgttgggaagggcgatcggtgcgggcctcttcgctattacgccagctggcgaaagggggatgtgctgcaaggcgattaagttgggtaacgccagggttttcccagtcacgacgttgtaaaacgacggccagtgaattgtaatacgactcactatagggc

SEQ ID NO: 616 - DNA, 434 bp, Homo sapiens
gggcgatggccccactaccgtgaaccatcaccctaatcaagttttttggggtcgaggtgccgtaaagcactaaatcggaaccctaaagggagcccccgatttagagcttgacggggaaagccggcgaacgtggcgagaaaggaagggaagaaagcgaaaggagcgggcgctagggcgctggcaagtgtagcggtcacgctgcgcgtaaccaccacacccgccgcgcttaatgcgccgctacagggcgcgtccattcgccattcaggctgcgcaactgttgggaagggcgatcggtgcgggcctcttcgctattacgccagctggcgaaagggggatgtgctgcaaggcgattaagttgggtaacgccagggttttcccagtcacgacgttgtaaaacgacggccagtgaattgtaatacgactcactatagggc

SEQ ID NO: 617 - DNA, 624 bp, Homo sapiens
tattttgttaaaattcgcgttaaatttttgttaaaccagctcattttttaaccaataggcggaaatcggcaaaatcccttataaatcaaaagaatagaccgagatagggttkagtgttgttccagtttggaacaagagtccactattaaagaacgtggactccaacgtcaaagggcgaaaaaccgtctatcagggcgatggcccactacgtgaaccatcaccctaatcaagttttttggggtcgaggtgccgtaaagcactaaatcggaaccctaaagggagcccccgatttagagcttgacggggaaagccggcgaacgtggcgagaaaggaagggaagaaagcgaaaggagcgggcgctagggcgctggcaagtgtagcggtcacgctgcgcgtaaccaccacacccgccgcgcttaatgcgccgctacagggcgcgtccattcgccattcaggctgcgcaactgttgggaagggcgatcggtgcgggcctcttcgctattacgccagctggcgaaagggggatgtgctgcaaggcgattaagttgggtaacgccagggttttcccagtcacgacgttgtaaaacgacggccagtgaattgtaatacgactcactatagggc

SEQ ID NO: 618 - DNA, 509 bp, Homo sapiens
gttgttccagtttggaacaagagtccactattaaagaacgtggactccaacgtcaaagggcgaaaaaccgtctatcagggcgatggcccactacgtgaaccatcaccctaatcaagttttttggggtcgaggtgccgtaaagcactaaatcggaaccctaaagggagcccccgatttagagcttgacggggaaagccggcgaacgtggcgagaaaggaagggaagaaagcgaaaggagcgggcgctagggcgctggcaagtgtagcggtcacgctgcgcgtaaccaccacacccgccgcgcttaatgcgccgctacagggcgcgtccattcgccattcaggctgcgcaactgttgggaagggcgatcggtgcgggcctcttcgctattacgccagctggcgaaagggggatgtgctgcaaggcgattaagttgggtaacgccagggttttcccagtcacgacgttgtaaaacgacggccagtgaattgtaatacgactcactatagggc

SEQ ID NO: 619 - DNA, 654 bp, Homo sapiens
aaatacgcatcaggaaattgtaagcgttaatattttgttaaaattcgcgttaaatttttgttaaatcagctcattttttaaccaataggccgaaatcggcaaaatcccttataaatcaaaagaatagaccgagatagggttgagtgttgttccagtttggaacaagagtccactattaaagaacgtggactccaacgtcaaagggcgaaaaaccgtctatcagggcgatggcccactacgtgaaccatcaccctaatcaagttttttggggtcgaggtgccgtaaagcactaaatcggaaccctaaagggagcccccgatttagagcttgacggggaaagccggcgaacgtggcgagaaaggaagggaagaaagcgaaaggagcgggcgctagggcgctggcaagtgtagcggtcacgctgcgcgtaaccaccacacccgccgcgcttaatgcgccgctacagggcgcgtccattcgccattcaggctgcgcaactgttgggaagggcgatcggtgcgggcctcttcgctattacgccagctggcgaaagggggatgtgctgcaaggcgattaagttgggtaacgccagggttttcccagtcacgacgttgtaaaacgacggccagtgaattgtaatacgactcactatagggc

SEQ ID NO: 620 - DNA, 546 bp, Homo sapiens
  misc_feature (20)..(20): n equals a,t,g, or c
ttataaatcaaaagaatagnccgagatagggttgagtgttgttccagtttggaacaagagtccactattaaagaacgtggactccaacgtcaaagggcgaaaaaccgtctatcagggcgatggcccactacgtgaaccatcaccctaatcaagttttttggggtcgaggtgccgtaaagcactaaatcggaaccctaaagggagcccccgatttagagcttgacggggaaagccggcgaacgtggcgagaaaggaagggaagaaagcgaaaggagcgggcgctagggcgctggcaagtgtagcggtcacgctgcgcgtaaccaccacacccgccgcgcttaatgcgccgctacagggcgcgtccattcgccattcaggctgcgcaactgttgggaagggcgatcggtgcgggcctcttcgctattacgccagctggcgaaagggggatgtgctgcaaggcgattaagttgggtaacgccagggttttcccagtcacgacgttgtaaaacgacggccagtgaattgtaatacgactcactatagggc

SEQ ID NO: 621 - DNA, 654 bp, Homo sapiens; identical to SEQ ID NO: 606

SEQ ID NO: 622 - DNA, 7793 bp, Homo sapiens
gctggggtggtcgttttgaatggatgaggatgacggatcaggaatagagccagcctgggcccatttgtcctgtcactgtctgtgttacatgaggttccttcttctctcactttttccccactctgctactgaaacaggaatctttctcaaatgagtgttttgtatttcttgcccattcgtatagagaagggttgcctggcgcaatttgatcagggcaggagagggatactatgggatgttctagtcgaagtgtatgtatctgcctgttgcttatgattcacagtattcctgctggaagggttcatttttctgaggcttgaggagaagttgcttgtccaggattctgttcttccttgggtccttggattctcacgctgctgtcgtttttcctgttcagtcctaatccagacctctgtggtctgtcacatagcaccctcctccctctctgtgagtctcctgcttggctctgtcatattcctctttttttccttttctagaaagaaaagtcaaaatcgaacagttcagcagcccgagaacctaatggctttccttctgatgcctcagccaattcctctctccttcttgaattccagggtgagttgcatctctgtgtcttccttgcaggagaatgaaaacttggatgaatgcattaataagaagaattggccaggtgcagtgactcacacctgtaacctcagcactttgggagtctgaggcgggcagatcacctgaggtcaggagttcaagacgagcctggccaatatggtgaaacccagtctctactaaaaatacaaaaagttagctgagcgtggtggcgcgtgcctgtaatcccagctactcgggggtctgagacaggagaatcgcttaaacccaggaggtggaggttgcggtgagccgagattgcgccactgcactccagcctgggctgcagagtgagactccgtctcaaaaaaaaaaaaaaagaattctgtgtatcaattcagtgcctgctgtttcgctggtattttgcgaggcacttgacctaaatcttttcatttaaacttcacgataactctgcaagataggtaatggtattctcattttccagttaaggaaactgaggctcagagaggttaagttacgtgtctaaagttacataacttgtaagtgacagactccatgtcaggtcctggttgtccgaatcagaagcttttttttagattgtacttcattttttattttttattttttgtagagacagagtctggctatgttgtccaggctggttgtgaactcctggcctcaagcagtcccccagccttgacctcccaaggtacaagcatgagccactgcacctggcctagactgtatgttttatcatagtcgcttagagtaggctacccaaagccgaagcttctgcttacccactgttaggacatgttctgcctcctaaaccaatcccgccggatcatcaccgtagtcatgatactgccttttacacctacctgctaggtactgtctacgaagcacttttactttactttctcatttttacccatgtatcagcctgtgatataaaccaggcagttattatcatccctatttaaggaaactgatgctcagggaggaacagtgttttgtctaagctcaaaagtgacagttttattcatttggtgacaaaatgctacttccattttagtgtgggtattaaaggtctttataggagtcaagactagcatgagtttatgactttctcttcaaaaccagattggagctaacccagcgtgtagttattccttccccacctctttcccaggccccaccaaggtcaaccatgtgctgttggaaagggaacaccaacgtgtgttcagtagtcagaaggctctgggagacatatgaggctccatttcctcagtctggccaccatctcctccttttcatttagtaaacacttaatgaactcccactgtatgcaggtaccgtgcgttgcactggggagtcaaggacaagtgagccacagagcctgtccacagaggctcatgggaggaagcacgtgtgcgaaatgataaatgcaggcgtgcacaggctatcacaggagagtaagagagggtgggcatttccacctatgcgagccagggaggtagggctccgcggaagaagtgatgtcggggctgtgttgggaggtctgaggctttccaggacaagagaaggcagcctagccaaggaacagctgggcagaagcacccatgcatgacgaagctcttgggttagggtccagtctgcctggagctgaggatgcttgtaggagaacagtaggcactgaggccagagatcagaaaggacttcctatgttgcgataaggccagctcctgcctctcctaagaagtactgggtatggctgggcgtggtggctcatgcctgtaatcccagcactttgggaggctgaggcaggtggattacctgaggtcaggagttcgagaccagcctgaccaacatggtgaaaccccgtctctaataaaaatacaaaattacccaggcgtggtggcgcaagcctgtaatcccagctactcaagaggctgaggcaggagaatcagttgaacccaggaggcagaggttgtggtgagctgagatagcaccattgcactccagcctgggcaacaagagcgaaactcggtctcaaaaaaaaaaaaaaaaaaagtactgggtatgacatttctcccttaggcagcagtggagcgtcgaagggtttagaaaggtctctctggcagtggtttgcagttcagtttaaggtacgtgagactggaggcagggcagtgaggtatgtggctgttgcaggaggccaggctggagatgatgaggcttgaactgaagcagtaggagaggaaggaatgagcacaaatgataccagagcaggagggggaaacactttggtgactggctactgtaggtgcagcggaggaatgcattggtgactcttactttttttctttttttttaattttaatttttattttttgagacggagtctcgccatgtcacccaggctacagtgcaatggcacgatctcagctcactgcaacctccacctcccgggttcaagcgattttcctgcctcagcctcccaagtaactgggattacaggcgcgtgctatcatgcccggctaatttttgtattttcagtagagacggggtttcaccatgttggccaggctggtctcaaacttctgacctcaagtgatccgcccaccttggcctcccaaagtgctgggattacaggcgtgagccactgcactcggcctggtaactcttttttttttttttttttttttttttgagacagagtctcgctctgttgctcaggctggagtgcaatggcgcgatctcggctcactgcaagctctgccttctaggttcatgccattcttctgcctcagcctcctgagtagctggaactacaggtgcccaccaccacagccggctaattttttgtaattttagtagagacggggtttcaccgtgttagccaggatggtctcgatgtcctgaccttgtgatctgcccacctcggcctcccaaagtgctgggattacaggcgtgagccaccgtgcctggcctcggcctggtaactcttaagttttgcaccttgatggtgactttaagccttcaggcagaactcccaggtgctaatccgtcagtccggcagccgaagcctgagctcaccaccttcagacaccaccagcctccttcagatgcccaaggatgcctgacaaatgtcattttctacacatcttatgatgtgagaaggattgagaagtactgaccagagacacagctacatccctcccttccacaagctgcaatcagtggataataaagaagagtttaataagcatatcctgaccttcctaaagtgtaatgttgcataaacataaagattctggctgcctctggtgcttagaatctatgtcgtgtaggccgggcacaatgattattatactcagttgtatccttggctgcctaaagtgatgccaggcccttggctctgtccagagttcctcttgaggaaaatgaccacgctcagctgctgcctttgttctgtttggttttcagacgaaaacagcaaccagagttccgtgtctgacgtctatcagcttaaggtggacagcagcaccaactcaagccccagcccccagcagagtgagtccctgagcccagcacacacctccgacttccgcacggatgactcccagcccccaacgctgggccaggagatcctggagggtgagtcgtggttggccgaggatgagtttcctagaagggccttgctttctgctcttgttgtgtctcgtctttagagtaacaggctcgagagagcacctcagagccaggcagcaccaagccctttctcgatagcttaggaatgattatagtttcccctttcacagagggaagggagaaaacaagcattagagttgcgtgccaggctgtgtggaaggaacttgagtatttgacgcctgctataattctctcaaaaatcctgtgaggtggcagctattgtcttcttttacagatgaggaaaatggacattcaaagcttagaaaggttaaattgggctgggcatggtggctcacacctgtaatcccagcactttgggaggtcgaggtgagcgggtcacttgaggccaggagttcaagaccagcctgaccaacatggcaaaaccgtctctactaaaaacataaaaaatttagttgggcgtggtggcatgtgcctgtaatcccagctactccggaggctgaggcagaagaatcacttgaacccaagaagcagaggttacagtgagctgagatcacaccagtgtattcttgcctgggcaacagagtgagactccatctcaaaaaaaaaagacctggcgcggtggctcacacctgtaatcccagcactttgggaggccgaagtgggtggatcacctgaggtcaagagttagagaccagcctgaccaacatggtgaaaccccatctctactaaaaatacaaaaattagccaggcatggtggcgcaagcctgtaatcccagctactcgggaggctgaggcaggagaatcacttaaacccaggaggcagaggttgcagtgagccaagatcgcaccagggcactccagcctggcgacagagctagacttcatctcaaaaaaaaacagagaaaggttaaatcgcttgtctgagatcacatagccagtctagtaactgttggaatgaatgtcactttaagtccttctattttcagcatttatgctgtctgcattacatgctaaatttttttcttttctttttttttttttttttttttttaaagagatagggtcttgctctgttgcccaggctagaatgcagtggctgaatcctagctcactgcagtcttgaactcctggggtcaagtgatcctcttgcctcagactccgtagtagtaggactgtaagcctttgccaccatgcctggctttcttttaattttctgtagaaatggagtctcactatgttgcccaggctggtcttgaactcctgggcttcaagtgatcctcccacctcagcctccagagtagctgggattataggtgtgagccaccatgcccgacccaggtttcttgttataatatggatatatagatgtgtcttaggcccttgttaccttctcctgtgctgtgacctgttaacagccaactacaaaatggaacttgtttctccatgggaaatgccaattgtagttaatatttattgtgttcttactatttggcatgtgctgttcttagctcctgtgttttattacttcatctcgtcctcatagcaactctcagaaaactgggagattgagttagagttgtgatgtttgggctagaggatgacaagatgagctgctttgtcggttccagatatctccagcccagcagagatggccctctgcagtctagccgtattttgcccttccaccattcttggctgtgacctggtccagctgggccctgaatgaatgtttgcttctcaggccagtattctcccctcctcaccaagccacctccacacagctctaaggaagctcccccaggtccaggcctcaggggagccctgccctcaggccgaccctactgccttttcagagccctccctgccctcctcggaagttgctgatgaacctcctaccctcaccaaggaagaaccagttccactagagacacaggtaagcaatcactttgagttttccagttttttgtttttttggtttaaggcagggtctcgctgttgcccagactagagtgcagtggtgcgatcctggctcactacaacctccactgcctcctgggttcaagcaattctcctgtttcagcctcctgagtagctgggattacaggcgcccactaccacacctggctaatttttgtatttttagtagagatggggtttcactatgttggccaggctagtctcgaactcctgagcccaagtgatccacccatctcagcctcccaatgtgctgggattataggtgtgagccactgtgcccggccaggcttcccagtttctaagtcaaaaaaccaggaaagactgtggatgtggggttggatctgcagcgccggaaatgagtcccagggttgtaggcaggggaggatgtttgatcatctgctggaaggagcagagtggacatcccattataattcgggtgggtgggaaggttctggttgggaggggtggccctggcattccatgctctgcctgctcctaggtcgttgaggaagaggaagactcaggtgccccgcccctgaagcgcttctgtgtggaccaacccacagtgccgcagacggcgtcagaaagctagcaccatcccggccctccgcctcctggccctgcctctatttattgcattctggttctggccgcgccgcgttgctggggtaagggcaagcactggggtcaagagcctgcacacatgagccttccgggctggaaggctggcgtaggacttggggctgtagcatcatcttcctgaccctggcacctgtgtctacttgctcccgagaagaggagcgctcatgtcttttttgcaccccaagttggctggagcatcggccaccccaagattcatctgtgacctccaggcagcagtctctgctccagaatctctggacggagctgctggcagcttctgcgagaagagagagatgtggaaggcaccttctagaagagagcgtgcctcaggttacttgaacttgaacggagactgtagactcccggactttcccctaggactgggggccctgtaggctgctgttggaggactgggtagagacattggagggaagggaagggcttttctccacacaagggcagagagtccgtctagatttcttgctgtcctgccagctctgcccatgcctgaggtggtcctacctctcacgggcaccctagctgctgacagccctttgtggccgccgtccccatcccctgccctcagcacacacatctgcacacacgcagctttgttctcacctctacctgtcattccagcatccctgcctcttgtcacaaactgccccagcaagaatttgaggttctgacaacagtacccatcccccacagtaccccttcagctcagtttctagaaagctcccttttctttgaaatctgcatgttgaattgaactttgtgattttattttttgtttcaaaaaagtttaagaaaatggaaatgggcaacagtgagtgaagacatattttagcactgaatagaatatttttaaaattaaactatttgaaatatgtcctgtt

SEQ ID NO: 623 - DNA, 141 bp, Homo sapiens
gagatggagtctcgctctgtcacccaggctcgagtgcagtggcacgatcttggctcactgcaagctctgcctcctgggttcacgccattctcctgcctcagcctcccaagtagctgggactacaggcacccgccaccacgc

SEQ ID NO: 624 - DNA, 215 bp, Homo sapiens
atctcggctcaccgcaagctccgccacccgggttcacaccattctcctgcctcagcctcccgagtagctgggactacaggcgcctgccaccacgcccagctaattttttgtatttttagtagagacggggtttcactgtgttagccaggatggtctcgatctcctgacctcatgatctgcccgcctcggcctcccaaagtgctgtgattacaggc

SEQ ID NO: 625 - DNA, 3014 bp, Homo sapiens
ccgatgcccaggatgccctcaggccctgtctcatgatgactcccacttccacgagcggcacaagtgcatcaacttcttcgtgaaggtgtacggctacatgcccctcctgtacacgcagttcagggtggattctgtgctcttcaagacacgcctgccccatgacaagaccaagtgcttcaagttcatctaggggcagcgcacggtctggggaagaggatgagcagagggaggaagatggctcccaaggttcctaggcattgcaggaccttgggcacatctgctggtgggtggcccagagcctctgctggaaggggcagcaggaggagtggaaggaaaccgctgcctttatcttgaagtcagccacactgggcctggagccctgggcggagtccccggggttccccacacagggcactgactgatagcttacactgaggactgtggcgactctgcagagtcactcacaccgttcgtacgcccaggacagctggttcgtggtttttacattcaataacaactattatgattatttaaaaagagaaagtttcagatttgccattcaaggcttatttatatatatgtgtgtgtatataaatacatgcacacacttgcatacatatatatttttggctgggggagtgtgagttttgcctttctaagggagggaccgcgcaggctcctttgttctgtattctggcggagatgggtcctggccttgtgtcactggcttatccttaaagatcatctcccatcctccccagcgccatctgtgtgcagcaaccagaaagggatgaacttggccctcttgcgggcctggacaaggtctcttccttaccctttctgttgccagtcagcaacctgtaactcacattctcttcccagtgaatccctgggagcgcctgaccctggtgggctgttcagcttcctgctgctggggccagcgatttttgaggatttatctttaggccaggcttgcctccgtacttatccctgctctcccatttctctcttgtttgagagagaatgaggaagcaaagagtgagaaagaataggggctgaagacgccactcccagatggctctttctatcctgctcttctgttgaaacacacgtgctgtgggcctcaggcgtttctgaagtgctctttcttggattggacaggagatcagcagcgtgcacatctgctgtggtctgaagtggtttgcaggtcagcctcctctccctagtgtagagcaagccagtgtccttcgaggaacccacccggctggccgggaagttttacagcaaggcgcctgccttgggataattccttggtgaaattcaccttccccccgcctctgtctggagccccatcctgtgttatctgtggtttttggacccctaatgtcagcttggctgtaggactccccgaggtttggtatgtgctagaacaatgggaggctgtgatttgctgtgtaagctcacatccagccttggaatctaacgggcattcacaacccgagttaccactttccactccctgcttaggattctgttccctgggctgaaactgaaataagctaattttttgggtcatggtggcagtaggggaacctaggagggtgtgagtggcatttgtcagggatttagcccatgacgtgtttcttgaaccctactttctggaagtggagttgactctggaagttttctagcaactgaacaaaagctcaggtttgtcctggtcatgcacatgccttaagccagttccgtcttccctagaccttggcatcctgtgcttctatttcttggaatacgttctcctctgacctgcctgtaccacgtgggtcctcttcaagtactgttttgaagctgggctcttttgtgtagctcccacccacctgtagggctagctcggcttaagggaactctccccattggcaaaccggacccggccgccgccaggactgtgtttccaaaggttccccgcccccaaccccagcatcagcctgtagctcccctgctgaggcagtgtggttatgttcccagcagtgggggtcagacgcccttcctcagaactttctagttgccctctacctgactcctgacttgtattccttttagcagtagccttcttccctcggggagccaaagagtgtggtgtgtggcgctatattgtggctgctatttcatctggtttcttttaatgtgaggaactcacatactgacttcagtgggactcggtgagccggggccgtctgtgtggtgggaccccctttagcgggactcagtgagctggggccgtctgtgtggtggagccagggcctctccctttagtggagccaggttgtcgggccccgaatgtcactggtggatctaagaagggctgagtggtctgacaccaaaacatgccgcagggagggctgtggtgccggtgcttccaacaaggacagccctccttgaccctgaaaggaacactggcttgaaggactgcagacaggctctgaggggcacgccctcctcagcgagaggcagcaaggtggccacagtgtcactggtcaggtgcttctcaccacgggaaagccgccgacctgtgactcgcttgagatgggaaagcggcgccacagaccccgggtctccttggctgtctgtgggccgcccctggccaccttgtcctggctcgcagggtgcaggagcgcctcgttctctgggtggccggcttgctgctccggtttgggctgtcttaccataacaccgtcccagggctctgcaggccactgtgagcgctggctccctgggcagtgctcctccgtgtggactgtgcctcaggccagggctcaccagctggggtcctgtccggaaggatgggatctttctgggagctgcgccggacagagtggggagctcctagtttgtggggggaagctttgatatccatgccacgtccatccaccccaccccttttcgtcacgagcacaatggtcttacattggatttttgtaaaaaaataaaaataaatggagactttaactcaagca

SEQ ID NO: 626 - DNA, 3014 bp, Homo sapiens; identical to SEQ ID NO: 625

SEQ ID NO: 627 - DNA, 700 bp, Homo sapiens
ttaagactcttttgattcctgatttagaatgtattataggtgctttataattgattatgtccccagtgagactcttaagcttttttgagtacaagaacaatgccttatatgtattcatcgcccctgccaatattttacacatagtaggtcttgtcctagaggcagaaccaatttggacagcagttttaacaattcagacaccctgtaacatgttgcttctgtaacaatccatggctttggacttaagcccagtgaaagcacattagtggttatgagtttctccctgtaaggtttttcctctttgtctcctttctattttttggtacgcgagcagcctctgtctctctgtagggaagcaacagacagcttcagtgagtacaaatgttatattcacatgtggaacatagccccagagataatcatatgtaccagtgatccgtcagtagatgctattacccgtgtggttcttttatcaaaggaattaagttctcttgatgtgttaataaacagtacttttttggccagctctggagtggatgaataggtgtttggatgtctgtctagattgacagctttagattgcttttttcctgaaatctggtaattccagatttacagtgaattttctcttaagttgtgttttcaagtgatcacaccgaattggtgggcagcaattctttcttttaccaaaaaagtaaaa

SEQ ID NO: 628 - DNA, 700 bp, Homo sapiens; identical to SEQ ID NO: 627

SEQ ID NO: 629 - DNA, 354 bp, Homo sapiens
aagtattctctttttttgagacagagtctcgatcttgtcacccagactggagtgcagtggcattatctgggctcagtgcaacctccacctcccaggttcaagcagttctcctgcctcagcctgccaagtagctgatattacaggtgtgcgccagtacacccggctaattttgtatttttagcagagtcggggtttcaccatattggccaagctggtcttgaactcctgacctgaggtgatctgcccaccttggcctcccaaagtgctggaattacaggcgtgagccaccacacccagctagaagtattctttaaacagatgggtgcagtagcatttacttcatatcttgcacct

SEQ ID NO: 630 - DNA, 338 bp, Homo sapiens
atggaagcttctaggtcttctctattactgaggccatcttctgttacttgtcctcctgaaatcccccacccctagtatattgcaagacccatgggagcaatatggtaagggccatactggttttgctcaccactgttgggtataattctacacggagcctcaggaggacatcgaagttgacccacccgggatgccgaggacactgctgagagaaaattgtgcatattatttctcgttttcattgctgaatttccctagtaatctatttatcaaagtttgactcttccttctcctataattggtgattcttttgcacaaaagaaccccattattccatg

SEQ ID NO: 631 - DNA, 354 bp, Homo sapiens
aagtattctctttttttgagacagagtctcgatcttgtcacccagactggagtgcagtggcattatctgggctcagtgcaacctccacctcccaggttcaagcagttctcctgcctcagcctgccaagtagctgagattacaggtgtgcgccagtacacccggctaattttgtatttttagcagagtcggggtttcaccatattggccaagctggtcttgaactcctgacctgaggtgatctgcccaccttggcctcccaaagtgctggaattacaggcgtgagccaccacacccagctagaagtattctttaaacagatgggtgcagtagcatttacttcatatcttgcacct

SEQ ID NO: 632 - DNA, 1790 bp, Homo sapiens
ggcaaacctaacctgggatctgacgggatgcgttttgccagctcagatctcttctgctactggaaacttgcattatttacagccattaggagctccctggcttccattccactcatgactagctttacctctttgaccccactgtattattgtctagcccagttcagctgaatctttcaacacaaaatatacagggaaccccttcctggggaacttcctttgttattgaggtcttcgctgatggcttcttccatttgatactcagtctcagtcacagtaggattacggaatcttttgccagagtatcaatctacatgggtgctacacattactgaaaaaaattaggaacatggtgctagttaattcaagtcttcatgtaaaacttcttctatcatagtggacattaaaaaaaatctctctgcaaagtgcattgaccctacctctagtagatgaatgttgaacaagtagcctatctaggaagcaagtgactagcatccatgggcatcccacaggttgtagtccagccccgatcttggtggttgggattgatgttgctgccaagtccctccgtttcatgttcaggctctgcctatgttcctggtgtctggtacctgatttttcaggatgctgacatttacttcttgcccacaacaccatataccctaagtcttgccaacatctttgaatgtcttctgctggtctgtctctcctccgttgttcttttactatgtcccaagtgcatgctttgttcagtatctgcctaagtctcaggatactgattttagctttttactaggtcctgacattcccgtagtttcctcttacctttctggacatgccagacaaactctgaccttaggttctgtgaaaactggtacctgcagaattcctcagtgtttgtttatatgaaagttcattgtgcctcttgattgtgggtgagttgaggaaaaggggtaaagcagtgggcagaggttgcaacatttatttggttataggacacctttgctactggagcatcttgtagggtaatgtagttcagaacatgcatggagaaatgctaccatagaagtagtagtgacatttgggacttgaaaaaaatctaagagcaggtataattccctcaacaacagaagaacatcagtgctttagaatgtttgattttgaactttcttgatgttttctctgccgttctgtagtgttattctaattaaaatctttcctctaaactctgctcttttttttccaattgagcaaattcggcatttattgaggccctactacatgtcatatgctgttctagttgctggaaacacaaatgtgaatatggtaggcctgcccttaaacaatgaattacagtgtaaaatgaaccttttataaagctggtcctatatcaatctaattattttgtttttcttcatttcaggcctaagacagctttattttctttccactccaaataatgaagaatccccttagggcaaagaaggaatttctgagcatgttataaaaaaatagaaaataggataagttgcgtgaagatttaatatttctatacatcaaaacctaccataaacaaaattaaaaggcaaatagtaaacttggaagaacatttgtaacataaaagacaaaagtttaatatcataataaaataagcacatagtagcttttagtaaatcattgctgaatgaatgaatacatatatgaattcaaagcaatgaaaaaatcaccccaggaaaagatgtaaacatttgacataggacaagtcaccaaaaaaaaaaaaaaagaaattc

SEQ ID NO: 633 - DNA, 106 bp, Homo sapiens
tttttttgtatttttagtagaaacggggtttcactgtattagccaggatggtctccatctcctgaccttgtgatccacctgcctcggcctcccaaaatgctgggat

SEQ ID NO: 634 - DNA, 410 bp, Homo sapiens
tcatgcagggaatagaacagtgtgttctgtgggcccaaggaatacagagtgaataaataaattgataaatgatatggccaggtgactaagaaccacaaatgtaaatgtctaatacatatttggggaaataatattagcaattaaagacttacaaatagaaccatatgaaataactgttttttacttatgtgattagaaaagctttataaaaaagaggctgtccagtgctttcacaaggtgtgctgaaacaggtagtgctttggagaaagcaatttgatgataggtataggatgtctaaaaattgtttatacaaaccgtgactcagtaattcaacttctggaacttgatcccaagtaaataatcctaaatactgaaaaagcttttccacaaagatagaatatggcattgcc

SEQ ID NO: 635 - DNA, 1066 bp, Homo sapiens
tttctggacacgtggcctgtagcagcctggcatctgtggcgcctcgtgtggctgctggcatcggtgaggcatgagctatgagtgtgccagcctcgggcccttggttttgtctgcctctggcatgtttgcattggtggtggagctgacctttgccccttagagagtctcctgtggccttcaacggggaatgggggccagatgatagcgcgggccttgtgctgcgggaaaggctacttcctcagtcagaggtcatctggagggttctcccctgcggttggaagtgttcatgcaaattccagatctgtcctggcccagcttggaggtgggccttcctgactgggccatcccttgcgagcgttctcagcccacactggctccctctgcgcaggcccctacttgtgaaggagctgagccgcactcggtgggctgtcctggggcacccatgttgtgtgttttggttttgtttattttgtatctgcctggtttttccaagtctaatcaggatgtcccctggggtgacattctttgctgagagaagggcacatgcctcggttccctgggctgtagaaagccagtgctcagccttgctttctgccgcagacttggtgcccggagactcgctatcaaagtgcagtggagataatgtccaatgggaggctgaggcaggagaatggcatgaggcagagcttgcagtgagccaagatcgcaccaccgtactccagcctgggcaacagagcgaggctctgtctcaaaaaaaagaaaaaaggaaaaaaatggttatctgcatcctggttaaaatcagtaccaccacgtcccacacgtggtaacatggacttgctggataggacctccttgctccatgggcctggaagcagctgcttcagaaggaaggtggtgcggccggcggcagcggagggcgcgctgtgcagtgacgagatggtgcaggcccgtccacagccctggcccagagaaggagagacctcactgacccctgctgggcctgcctctggccatcttcattttgaaattcggtatcattgtctccagagggaatgagcagctcttt

SEQ ID NO: 636 - DNA, 692 bp, Homo sapiens
ataaaggtgaaagtagctctctagtagcctgtgacagggaggatcatcagacaggtgtttacttccttcctggattacttttccaggagacacccagatgtggcaatagctcttggggttttgggctgacgtacaggagctgaagctgtgatgtcgcgtgtccgtgtccttaggacagtgttaagtggggagctgcccccatcctgcattctcagcagatagcaggcatgtttgccagccggttggttaaacaagctctgaaaacataaacattgatggttttggtggtttcatgtgttgtcgtgtgacgtaagcagatgctaccacagcagagccagaggtgagcaagacgtagggcagagaatcccactcacagtaacacaggaactaaaacagctttttaaaatgtgtttgcaggccaggcatggcggctcaagcttataaccccagcactctgggaggccagggtgggaggatcacttgaggccagaaattcgagaccagcctgggcaacatagggagacctcaaatcaatgtttaatgacctgggtgtgggtggtgcacacctgcagtcctggctactcaagaggctgaggtgggaggatcccttcagcctggaagctcaaggctgcagtgattatgccaccacactccagcccacatgggtaacagagcaagaccctgtctctaaa

SEQ ID NO: 637 - DNA, 643 bp, Homo sapiens
tcacgagagggggcacagtcgtgcagcgggaggagcgagagtcggccactgtttgggtgccatgggtgtcctgggtagagttgagggcctcccccgggaaggataatgctgagccccaataggaaacactgccctgagctatctgatggccagccctctgtccatgggggagccatttcttttccttatctctaagctaatacccctctttcctgaggttctctcttactgcctaagctgtttggctctgggagttactggctagcttgtccccgtcgggatctcatccccatcggtatctctggcagggcttcttgaccagctcccccctggacctgcggctggagacggagttgtgccgctctctccgtcctagtttgccttttgaggcttacccactcctccacctgggctgttttaaaatgattagagcagaacctttcaatcaattctatcaaatgcatctgtagagctaagggggcggtcccttatgtgaaacctaatctttatagctaggccgatgggtgtgctcaccgccgaggcacgtcattacgatgctctttggctagtcattgtcattagaaatgtaaacactgattggggaccttcccgcaggagctgtctgggctgcctgctgtctcca

SEQ ID NO: 638 - DNA, 1118 bp, Homo sapiens
gactgcgaaggagaacgcagcaagcccaggcggcggtggaaaggctggaggacacacctaaacatgtggaatcccaatgccgggcagccagggccaaatccatatccccccaatattgggtgccctggaggttccaatcctgcccacccaccacctattaatccaccctttcccccaggcccctgtcctcctcccccaggagctccccatggcaatccagctttccccccaggtgggccccctcatcctgtgccacagccagggtatccaggatgccaaccgttgggtccctaccctcctccatacccaccgcctgcccctggaatccctcctgtgaatcccttggctcctggcatggttggaccagcagtgatagtggacaagaagatgcagaagaaaatgaagaaagctcataaaaagatgcacaagcaccaaaagcaccacaagtaccacaagcatgacaagcattcctcctcttcctcctcctcttccagcagtgattctgactgaatacaggccctggacccttccctcaagtcccaccagttctgctctcccatcaagcttcagatgccacgttgtactgggggaatgtagcccttgtgctccccaccccctacctccacctgagcctcaccctgctgttgagccctgagtggctaggggaaataggaagaggattgccatggcctggccatcttgttgctgcttggagagatcatatagctaatgaattaggcaggggagctattttttgaagatgatgaactaaatgttgaagacaagtttgagatctgtaaaatgtgattttttacttccacttataatacttgtgattggggaggtttgtggaaattcaattatgatgaaaaacctctatcttttttgtaatgttggcatacttgggggatttagtggcaaatacattccccagcaggccttttgttggttgcactaactgcaaggttgctgggaagtagagtccatttggttgatgagctttgactgcggttttggaaccttacctctcctccttagcccaatatgctgtctcgggtcctattcaaataaagttatttctcctggtctaaaaaaaaaaaaaaaaaaaaaaagaataa

SEQ ID NO: 639 - DNA, 415 bp, Homo sapiens
ttgaggaggaattatttaattattcaggtgcaccgacccagtcagattaacatccaaaggactgagccctgaacaaagagtcaagctaccttttaagcatttcgtggggctgggggagatctgtgcagggggaagcatatcacagaagtgagaaacaaagacagtcattcaattgagacatgcattatatcatttttttttcaaggaacagcatgttttacgacttgagattatctgtctagtgatcttacagctgcacagctagagaaacagagtcttcacaatgcctgggaaagggagagataaggctcactagccatagaaaaacaggcagttaattttaaaggactccagctctttctcttcctcagggggaattgggttttcttacatacaactaagttttgcttacaca

SEQ ID NO: 640 - DNA, 101 bp, Homo sapiens
tagagatgggggtttcaccgtgttagccaggatggtcttgatctcctgaccttgtgatccacccgcctcggcctcccaaagtgctgggattacaggcgtga

SEQ ID NO: 641 - DNA, 13191 bp, Homo sapiens
catttcattatctatctcttctgagcctgttgtatctggagcagagctgggcaggaggtggtaagcagaggctctggggcctcctagaccctttgcagagggaaccggagatgtcttccaagtccccaagtctggcaccacctcgtctcaatctcactttcccctccaggtctagcagacttggcctccatccacagggccttcttagcgcatgccctcttcgcacttactcccacttccctccccatccctcgatcctctgtccagaggtcccaagggcctgttcagaccctgaactctgcccagcagcccctcactctgtcctctaccagggcgccttccctggggctcctgctcatcctgcagtgcccctcccctcccaacccctgtgggggtgtcccatcactttccccagcacccacttcccacaggccttccctcctcccctgcctgctgacccggcagctcccgacagcacggccttgtttcccagggaacaatgcatctgtgtcacggacaacaatgtcctttcatgtcaggcgcactggccccggtgcacgccgggacgtggcacaaagggtgctttgtgcagctcagggatgtgagttcctggctttgccatgttggtgctgccgacccggggcctctgtccttgggtcccagttatgcaacagtcagtcgaggctgtggggctggcccaggggctttatctgtctccctctccaacttttgccaagttacccttctgggcttccgccagccaggagcccacactccctcagccctcccacacgctcctctcacctcctagctgggcttcgctgacttgaacctggccgagtttgcgggctcgggctccacggtgcgctgctgcctgctcgagggatatgacacgaagaacactcgccaggacaactccatccttaaggtaccagggatcctgccacctctgccaccctgaccacgggatggggacaaaccaggctgctcatcagaatcctctggaggagggttgttaaaaatacaggccttacctgaataggtagacatcgggaaggggcgagccctggaatcaggaaaccactatcagagggaggcctggctccgctgttggcctcagtttccccatcaagttcagagagggggccctgacagtctccagggtttggcaagcacctgcagtgggttcacgtcatgctgattgcatgccctctcttctcttgtggtcccctgacagcagccccacgagctgtggtatctttgattagtcccagcttcaaatgggagggagttaaggcacagacgttaagtcatttgcctgaagtcacagacagagctggcacctgaccaccagccagttgacttcttggcccagctcctaactcttccccaagtgacacgtggtagcctggcccccagtggattatcagtgaaaatgatggctgctgagggccccgggggcaggtttccagtggacagggcagccccacccccaggcagctgcctcgttggccttttgggaacagaaatgtctgggtgtccgtcaccagcacacctctcttcctctgtttccacacctttcacctggccgggaaaacaggctgtcctaacagcgcctctgcaaggggacccagggagagcctatggtatctggagcagagctgggcaggaggtggtgagcaggggctctggggcctcctagaccctttgcagagggaaccggagatgccagaaagggtccaggctgattgtcttgggagctggagcctttcagcctcagtcaggctgaaaagcacaggcacagtagccctgtgcacctcaggccagatcaagggagcctgggggccaggtagccttgggttcaagggaagctcccccacatcctgtctgcaaggtcttgggagtcacttcccctctctgagtcttggttccctcatcaacagccttgggctagctaggatgctttcatggccgagtgaataagccatagaaagcctcaacctagtggtcaccctttctttttttttttttttttttttgagacagagtctcgctgtcacccaggctggagtgcagtggcacaatctcagctcactgcaagctccacctcccaggttcatgccattctcttgcctcagcctcccgagtagctgggactacaggtgcccgccaccacgcccggctaatttttgtatttttagtagagatggggtttcaccgtgttagccaggatggtctcgagcccctgacctcgtgatctgcccgccttggcctcccaaagtgctgggattacaggcgtgagccacggcacccggccgaaagcctcaacggagtggtcaccctttcataagtggtgacgtcaggatctgtgctcctcttttccacttgctcatctctgcctgtcactccatctcagcctagattttagggcccaaatcttgccacatttgggctgttgttagtttgcaatggcttcatgctttttcatcagactttcaccaaaccctgcccaccacctgctgtgccaggccccatgagccctcttccctctcctgcctgctgggttgagctctgtggtccttacacagggccggggtgagtgtgtggcttcaccatggagaagctcattgtctaggcctgtagctgatggcagtccgctcactctgccaggcgcagggctgagcccaggcctcaccttgctatgccctcccctctggtctgccaggcaggccttggttccatctctgtcctccacacagggaaactgggctcagagaggttagtggctttgccagagcccccaagccaggagggggcagagagacaggattggaatccaagcccttctgaggccagagccgaaaggctgcagggggccctgcgcctgggcaggctgtgggtggtcagggcatagctgattgctcccctcgccacaggtcaccattggtatgttcctgctctctggagatccctgcttcaagacgtgagtgctggcacaggcctagggagcggatgggagcccagtcccgggcactaggggtggaggaacagggactctgggtgtcctctgttttcatctggtcctgaagcagggcaccctagtcacacctgtctgtcttcccaaggccaccatcgactgccaagtccatctccatcccaggccaggattcctccctgcagctgacgtgtaagggtggtgggaccagcagtgggggcagcagcaccaactccctgactgggtcccggccccccaaggctcggcccactattctcagctcaggtacagttcctcatctgtccgcccctcccctgctagcggcccgaggggtttacctccatgtcatgcccaggtccccagggagacgctgactgaggggagagtgatggtgggagggtgtttgcatgctcctgctgggctgatgagacctgatcaccttgtgcgtgctggctgtggtgctgggccctgagatcacagctgtgccttggactgagactgatgtggcctccccatcctcaaggccctgcagtctagcagaagaaacaggcctcaatcaagccatagataaatgcatgtctacctgcaaacaggataaaagctggggaagacaggcccagaaggtgggatccatctggggccagggaaggcttccctgaggatgtagtatctgagctgcattcagggggtgaggcacagtatacctggcagagggacgtgctgggagctcttgctctcccacatactctatgactttgactggccagtttgcgtctctctgtctcagtgttctttggaaaatgggattggtaatagcaattacatcccaggtcactttggggattaactgtccacatgtgggcacctgcccagcacatggtaagcacttagtgggcactctgttttttgtttatgtttttttagacagagtcttgctctgtcgctaggctggagtgcagtggcgcaatctcacctcactgcaacctctgcctcccaggttcaagcatttctcctgcctcagcctcccgagtagctgggactacaggcgagcgccaccatgcccagatataccttttttttttttttttttttgtatttttagtagagactggatttcaccatatcagccaggatggttgccaggatggtctcagtctcctgacctcgtgatctgtctgccttggcttcccaaagtgctgggattacaggcgtgagccaccgcgcccggctgggcactctgtttttattaaattatcactggtactaatgttatgaaaaatgtgaacgagccccaacccccagaggagatggtgtggcaattaggaggagggggtgttgccaggacaggaggctctggcctgcccccaagtgtttgctgggccccctcaaccctaagcagggcccccagaggtatgagccttggactgcctccaggctgattagtgaacaaggtgtcacgtgacaaccctgatttgtcccacagaatcagttagagcacaggcctcatgtggcccagcagatgcttgccgagtgattctgcctctgggaactgagagcagtgagagaccctctgacctcaagggcccagcttccctccactcccttttccactgcagacccagctagctgaggcccagaacagaaagctgggggcttcccagcacaattactctctccagcccctggatggggttccccagaagagagatgtgtctggggactaggccaccccagcgcaggtggtgccttcgtgtgaagtagaagaggcccctcccccaggcagggtgagacttgagtgcccacttgcctctggagctggcctccccccatatgcagagaacctgttggggacttgaaaagccacatagttatggatgggcacacaggccagcctggggtgtcacaggccagcctggggtgtgttgggcgggaaggcaggtggatactcagagccctgggtaggtcccacctagtcccttttgcctcctgctggggagtgccaggaaagtctgttttgaagttgggcttatgggtgacttgggacaggactgtgggcctgtccctttgggccagaccgctcgccctcaccatgtcccttccactccaactccgctgacccaggccccttccagcctcggggcctctgccgatgctgttctctgtgcctggaaagcccttgccctcttgaggccttagctggctccctccagcaatgtgtcctggaggtctgccattaaggccgtctccttggagaagcctcccctgtccccagactgggccagacccccagtaagcactgctccctgctgtgcacctctcactgcggttgtgggtagtggaggcagtttttgttcagcgttcttcttcctcgctgacctgtggtgggcaccccacccaagtgtgccctctgtggaatgaagggacctgggttcggagggtgacctatggctcaggctggttgctgctcctctgaacctgtttttcagtctgttaaatggcgccctgccatgggaggctctgtgagggcacgttgtgaagggcgacagtgagcagcactgggtgacccctgtcacctcaccccctgccccttcctgccttccagggctgccagaggaacccgaccagaacctgtccagccctgaggaggtgttccactctggccactcccgcaactccagctatgccagccagcagtccaagatctccggtgagtggctgcctggccctgcccccgtggcctcctccttcctcgggatcccccattgtgatgctcccctgcgtcgcccctgacaggctacagcacagagcactcgcgctcctccagcctctcagacctgacgcaccgccgcaacacgtccaccagcagcagcgcctctgggggccttggcatgaccgtggagggccctgagggcagtgagcgggagcaccggcccccggagaagccgccgcggccaccccggcccctgcatctgtccgatcgctctttcaggtgaggcctactgcttggtgccccctggagaacagacctctcccggtggtgccttgaacctccgcttctttacctataacacagggaccgtaaggtccccacctcagagggttgggtggtgacgattccactagctgatggccctgaagggtgcagccatgcccggcgtgcagcaggttctgttcatggctgctcttgcggttttgtggatcagacaagagcacgatctgctaggtggccttaggaagctgacttacctgctcattgcctggcatcctcgtctataaaatcggctcatgatggcagctgcaccctattgtgcatgtgaggtttcagtgaagtacagcacggagcgcacagggacattctgagcgccgctgcggctgactggcattattgtcgtcgttctgtgcttgtacctgttactgccctgaccgttgtgacttgtccccccacgacctgacccaggcggaagaaggactcggtggagagccacccgacctgggtggacgacacgcggatcgatgcggatgccatcgtggagaagatcgtgcagagccaggatttcacagatggcagcaacaccgagggtgagccgtgctgggctggtgggggcgaggccacctgctccaagggctggccctgccgcgctcagcctccatcctctcctgtgtccccacagacagcaacctccggctgttcgtgagccgcgatggctctgccacgctgagcggcatccagcttgccaccaggtagggcaggcttagggaggggtcgtcggggcggctggggcttgggggtgagagcagagtccccacagtccactcacctggccttgaacgccaaatcttgtcgccacagtgtgaccctgggcctgtcatgtctctgaacctccctttccccatctgtcaggctgtgtggacaccaccacctcacctgggagcctggggcagtgagggcacggacaggttcggtggtttcccacagttcacaaggtcacctccagcaatgcctggtgcagggctcagcacatggcaggggcctcacacgcatttatttagaaccctcccttctacttcctcccagctccagggactcgggaagaatggtggtggtgatgcctcatgggtttactgaacaaatctttccctagcaccagctaggcactaggccctaagtgaaggcctggttcaatgcaggctgctgcctacacagcatccacagatggcaggggtagatgggaccaaagttgcgggaacgacagtttatagagtgctgcgtcacagacattcatttggagcatgttgactatgtgcctggctctccatgtgctttggctaaccaaatgaatgagcgagtgagcgaatgagcttcccacaggcgggctgctgagggcaggtggggagcccgcctaacatccacatccccagggaagaggcgtggccaggccgctgcgcagaggctaccctctcaagctgctctgctgactcctgctggccacggcctggaatggcagctatcacctcccagtagcctcctgggctgctctcgggtgggggtgagggggcggtgagcaagaaggaaactgaggggctggcttccttatgggtttgtaaacacacccctccctggccccctctgaaaatgaggaagcatcttggggaaagaaaccaatctggttgggagcgagatcacagcagagctacatgctgagccccgagagtccccgactccagggctgggcctgggctcggcagggaaaggagctgaccaggtttcctgacttcccactgccctcttggtcaccctcacatccctctgagcctcagtttcttcacctgtcaagtggggcaggatgcagtgactccctgccgaggtgaccgtgaggatggggtggcacagccagatgtgcccggaagggctctgcaggccccacagactctgatgcttactatctgtgtcactgtgggcaagggacttaccatcgctggggcacggttttagcccctttgcaacacagggctggttaacagtacctgcttgtgaaacacctccagaggcctggtccagtggagcgctcaggaaatggggtatcgagggggacatgctgacctgtctctcacctgcagggtctcttctggggtctacgagccagttgtgattgaaagccattgaggagcaggtgtccgggctggagaagagtcctgctttctctggagtccagacctgtatcattccatgaggaactttccccttcagatcacctctgcgccacatctcatccatgcctcctccatgcactccagtccacactccccgtagcatcattccattgcccctcccatccatgctgggaccctcctggcccaccaaggcccaggcaccactgtgaatattctcctctgaaccactagagggcaggccaggcaggccaggcgggcccgtgcagcttgtgggcaagaaggagctggcaaggaccggcgctgctggagactgacccagccctctggctgaggacatgcagcggctcctaaatgtagagatgcctgtggctgagggggcctctctacctgtgtccccactcactccaggagcactggctttggtcacgtcttagcagcagggccttgctccgttgttcccttgccctggtggtgggggggccagaccacctccggaatcctgccacctgtgactgtctgactgcttagtgcttcagctgtcccttccttgtgtcctgggggacctgctggcggcctcttcctgggagccatgacctcagaccccacccacactccagatcgagacccctgcctccccccggcaaatgtcctcccgctgccttgcagcctgcactttgcacatgctcacccccagcacagtcccactggcccctcacctccccttccctgagctccttcccaaggactcctggtcactgcctgctgtgcagtcagaggcccagggtccagcagcccggcgggaacgggtgctgcctcttcctccagttagctccagctcaggtctgagacccgtgctgagaaaggtctgagcaccgaccgtgccctctgcccagggctgggtcctgagcagctggttttcctgcaggaaggttggagcaagcaaagtccttctctgccctcagggtcagctgcccagactggggcggatgccagagaggcaggtgggctgtggctggactggtccggagctggcttccttaccagaaaagcctcagccttcctctggaagcatcccccgttctgggcaagggggaagggctcctttaaggggtgtgctttcccagtggggagcagtctggccctgccccctactaaagcctctgctctcagcactttcccccaagtccttgtaacttgcttgaaggtgggttctggctgccagccagtccctggacaaactctcctgccccttttaaatttcactcattttgtataaacccagcaggctggtgtttacttagccctgtagcttttttcattttttctttccgtctttcttcttgagttcacggttcaatattgcctcctcgccctggtgaggggaggtgctgcttttctgccccacctgccggctggttccagcagcgctggggcccagctggggggccgggatgggggcttctctctctgggaggggtgcaggtgccctccccaggctgggagggttccttccctagctccccatctgcccccgctggtgagagttgggcttcttggtcttggaactccctggcattgggaacagagcatttccagcatttgttgttgttttactcacctaacccttagaaaatgaatgttagaaggtgcctgccgaggcgggacagagtgttcgctcgcgctggagaaggctctgctcagccctgagagtcccttcctgccccaccgatactggcactttaaaaaggaagctgaccgcacagtgtccagacgaattggcccccagaagatggggagttctgtcctgcccttctgtgtctgcgtgacctcacccagcctaggagggaggtgcattcagggtagatttgcctctcattcaaagttctggggctttgggtggaaaacagccagctttggcgctgttggggagactcctccagaccaggaaccccagaaggagacagagcctgccacatcctcccacgccaggccctgggccagggtgattggactgagaatttggccacaaccaaattgatgctggctggaaccagaggccagaaagcctggccttgtccccatgtgggagccctgtcctcagccctcttgtccccttgagctcagtgaattcccaccaggtgcccacagctcctggacttcaaattctatatattgagagagttggagagtatatcagagatatttttggaaaggagttggtctatgcaatgtcagtttggaatcttcttgaaagtttaatgtttttattaggagatttaaagaaaataaaggtctacaatatctttaggttttttttttttcctgtttaccgcacaaactgaccacatggcatgtctatcaggatggagggtgtccatgttctcctctgtctttagggaggtgataaggagatgggcggaggggtgtttttttctttgactcccctcctttctaacagaatgttgccaccactgcttgagtgggctgtgtttgttcctctgtcccagcttctgttgtagaaaataacattgttaggggaactcaggctagtgtcagcgtcttggtttggggagaaaaaattaaatgtttcggtttttgtttcttttgctgttttgtttttaccttgttactttatcatattgactttagggtcaaaggcaacatcagaagaagtcagatatgtatagtgacattccaggggtggggaaggtgtagggatccagggttctcccggtcttggccacaggcacaatcatcaccttcatcgttccagattcctggggagaaaactgagaagatcgttacctgccagcctcatacggagcaaaagctctgtcctcagggccaagttctaaccactgctctgtagaccttctctgcaatcaagtggcctctaaggagcatgcctgaggacaaataactgcgcctcagtttcctcacctgcagatggggttatcaaataacacgagtgtgcagcctgacctgtaggaggtgtgagtgtgttcccaaactaaagccccaggctgccatcatttacaggcttggcttgccccgggcccctcacccccgtttctgaccatcccaagtctctctgggacaggcaagtcactctggttctttaataagcttggaggtgttgggaagcttcagtggtactggccaggccaggaggaatcaggccaccagggctccatctctatcctgggatagcattcaccccactcctcctcagggctgaccccgactcatggcccctttaaaccctgaaggccgattctgccccttcctctgttatatgcacaactgaggaaggaggtaaaagtgggctcctaggtgagcccaaagtctcctgagagataagggaaaagaattggactgtaggtttaaaaaagttgctcttggccgggcacagtggctcacgcctataatcccagcactttgggaggctgaggcaggaggcagatcacctgaagtcaccctgaccaacatggagaaaccctatctctactaaaaatagaaaaattagctgggcgtggtggtgagtgcctgtaatcgcagctactcaggaggctgaggtaggagaatcgcttgaacccaggaggtggaggttgcaatgagccaaaatcgcgccattgcactccagcctgagtgacagagcgagactccgtctcaaaaaaaaaaaaaaaaaaaaaagttgctcttgtcagctttgggagggcagactccatagttggagatgggcttccaaccaaccaaggagataaatgccagagggagcgaaccatgccaggctcaaagcacatctctccccaaactccccaggtggggacagcaggccaaaggcctccacataacccctcagggaggcctggagtccagatgctgtactccagtatctaaacaatcactcaatcttaaagctgacaggttcaaagctcttactttgggccgagcgcagtggcttacgcctgtaatccaggcactttcggaggctgaggtgggtggatcacctgaggtcaggagtttgagaccaacctagccaacatggtgaaaacccatctctactaaaaatacaaaaattagctgggcgtgttgacacgtgcctgtaatcccagctactcggtaggctgaggcagaagaatcgcttgaacccaggaggcagaggttgcagtgagctgagatcatgccactgcactccagcctgggtgacagagtgagactcccgtcttgggaaaaaaaaaaaaaaacaaaaaaacctctttctttgggccaagcctccactgagtgccagggatacagcagcaacctcagaccctaccctcggggctgacagggctggatcaacaattgcatcagtgaattaaaaggcacaggaggctgggcaccgtggctcacgcctgtaaacttttggaggccgagttgggaggatcgcttgagcccaggagttcgacaccagcctggataacatagaactccgtctcaaaaacaaacaaacaaacaaaaaaaacgttcccgactggcttccctgaggaacgtggcgtcccagtgagaccggatgggtgaggagcagccggcctgtgagtggtgggggaccgcgttcctatctcggagctgaagaagcgtggaagatgatctggcccaacatctctttgttctcagaggaagggccttccaagaccggggaggggcctgtgcgtgggtcccggtccgaaacgtgtctgggctgctgcgagagacagtcggtgaaggaagggaggggacatccgaagggtggcccgggaggccgggcgatggtgaggagggcgcctcctctccaccaaatcctccccatccatgcgggctagggacagaccctcccccgcccaccctaggctggaaagtgaacgttctctgcacctctcccacctacagactaagtagggcacccggtttccgtgtcggcttcaccactgactcggaatgggatctacctttctctgagcctcacttttcccatctgaaaaatggaacttccgatcccgcac

SEQ ID NO: 642 - DNA, 1316 bp, Homo sapiens
cggaaccggatgtggcttgcggctcgggtggctgagcgcgcggggaaatggtgagattggcaccgtgtgccggagataggggcgtctgggggtggggtcccgggtctgctcaggagctggggcatgggcacttggaacggggattgctctcccgcccccactattgtacggacgacaacgcggaggcctagcattctctcccagcctagaaactgatccctagtcagccctctaccatctgttgaatgggaagcttagaccgtgatcgggccgcgacgccccgcttccattagtgcgccgaaatagagggtcacttcgtcagctgagacctcccttttctccaggccacggggacagaccaggtggtgggactcggcctcgtcgccgttagcctgatcatcttcacctactacaccgcctgggtgattctcttggtatgtcattctccccgtccgctgctcaccttccccgagccctggcaccgccagagcaactactatataggctctaggcacggcgctggcttcattgcctgcctcatctcttgaactctccagaacaactctatgaggaagatgccagtggtaccgcattttatagatgagatagctgaggctaggggagaaggatctggcccaagattgcatccttagccgctacacttataactctgtttccggcttgctttgacttttgggggagttctgttccttctgggttagcctgctgactcttaggcatggcaaacgccagtgatatttgtgaaggcctttaggatatttttttcttgtgggaaaacttgttggttattgcttaagaagtgcagtgtgtctggaagtgcagaacttggtatcctttagagaaaaaatattagtgaagaagccctggaggcccaggttgggagtcagtcgaggattcctcaagtaccatttgctaggctgtgaggtgccttagggcaggtctcttgtgccctgttctcttgtccccaccaccaacctatagcaggcaccaaagcaagtgcccggtaaataccaataagaaattaaggaaagaaacaaaccacgacacccaaatgccgtaatcttaaagaaaagcaaatgcagtcccagtcctctgaatgggtcagccccttagatggaggaggtgggacgtttgggcttgggggctcggcaaggcaagcaagacacaccagagctcttccctcgatgccagccattcatcgacagtcagcatgtcatccacaagtatttcctgccccgagcctatgctgtcgccatcccactggctgcaggcctcctgctgctcctgtttgtggg

SEQ ID NO: 643 - DNA, 309 bp, Homo sapiens
ttcttttcttttctttttttttttttttttgagatggagtctcgctgtcgcccaggctggagtgcagtggcgcgatctcggctcactacaagctccgcctcccgggttcacgccattctcctgcctcagcctcctgagtagctgggactacaggtgcccgccacctcgcccggctaattttttttgtatttttagtagagacggggtttcaccgtgttcgccaggatggtctcgatctcctgacctcgtgatccgcctgccttggcctcccaaagtgctgggattacaggcgtgccaccgcgcccggcc

SEQ ID NO: 644 - DNA, 11003 bp, Homo sapiens
gctaggagacctgttctgatgatgtgtgtggtcctcaccacactgccctgcctcaccttttccatagcagtgactgaggtatggaatttttgatttcttctgctacaagattatgagattttataatttcttgttattggaatttgatagagcagcgtgctcaacaaatttcttgacatctatgtaatccaatcttcttccaggttgcaatatatgttatttaaagtactgagatcattgttacctctgtgattgtgaaggaaagtctagtagccaatttttaaaaattaattttgtgtttgtgtgtgagacagtaatgatatttgaacgtttaaaaagtgaaaaatgtgaaagttgatctatatttgtttcttctaccaacctgatgtttttcatgattgtcctcaattgtaaatgaatacaacaagatctaagggaaggaccacttacattttaatacctttgataagatgtccattgataataatttgcatgtgttatttatttgaaaataatactgagtttatgttttgactaaatatagcttcaaaagatcttggatagaaaccagcagggcaggaatatcttaggcagaactttcaggcttgtaagtacttcattatccaagaaggtcagagaagaatgccccactaatcttattgatttgcaaggtgctgtggaagataacttttattttcccaaagcatacttaatttactaaattacttaatttaccttgtgatatttcacttgtatgtgaagcaaatattcattaagtatatattacaggccaggcactgttaggtacagggcataggggacccaggaaatatggccgagtctctcatataattttctgacattagagagaaaaataaacaggcaattagaacaagtatcacaagtgttgtgagacagggcagtaccgagtaatgtatgacattagaaattacatggttgttagaatgcattgtaggtgctgctagaatacatcatagatgctaaattaggacaatgtatgaaggcatagaataattttgggaggttactcacatgtgctttgcttccagtgaactgcaacagggaatatttcaatctagatctgtcttttcccctctcaaagaccttgtaaatcatttggaaggttctcaaaagctgtaaaaatttagtttacaaccttttaagaaacatcactgcggtaaactgatggcatatctggagctcgatagccctttttggctcttttttatgatgtctcttccattgttacatctttttctttcctttcctttttttcttacttaattttcaccgaagtataacacataaacagaaaagtgcacgaaacatacaagtacagtaacaatggaataccacaaagcaaccccctgggtaagcatcgctcaagtcaaggtcaagaaggaaactttggccggctccatgcccacactcctttatttttatttattattttattttatttttgtatcagaaacccattgcttgctcactctttttttatgctcctttcaatgactccctttccctcctttccagaagtcacttctaacttgacttctgatactgcaggctagtttgtctgtttttgaaatttttccaaggagaaatcaaatgatgtctggcttcttttatttaaaatatggttgtgagggtcattcctgtttctgtaaatacctgaagctcattcgttttcagctgtagagtattacattttatgaaaagatcataatttacttatctgttctactcttggtcgccatcttggttgtttccagttttggcaattacagagaatgcggcagtgaacatctgtgaatatgtcttttggtgtgcatgagcaagcatttctgttggttatgtatgcaggagcagaactgatggatcatgagatattgaaatgttaaattgtgagagataaggtcaaacagcttttcaaacagattgtactgatttctatagcatctctatagaactcaccagcagagaaggagcattcaccagcgcttgcgttgtttcttatttttttggagacagagtctttctctgttgcccaggctggagtgcagtggtgcgtgtgatcttggctcactgcaagctccgcctcccaggttcaggcgattctcctgcctcaggctccccatcagctgggattacaggtgcccaccaccactatgggctaatttttgtatttttagtacagacggggtttcactgtgttggccaggctggtctcgaactcctgacctcaggtgatccacccgcctcggcctcccaaaatgctgagattacaggtgtgaggcacccctccaggcatcattgtgtctttttatttcagctcttctggtgggtacgatcctgaatctcactgtacttttaaattacatttctccagtaattaacaatgttgagcatcttttcatcttgcccattttttattgtgttgcttatcttttaaaaacgtatttggaagacttattttcatattcagattatacaagccttttttgattatatgtattgcaaatatctttatgtaacttgtcttcacacttttatatctttttgatgaaaagaagttcttaacttaaaaatagtccagtttattgctttcctttatggatagtgcttgggtcactcacttgtagaagattttgtcattgtgaatctgaatttcaaagtcttaaaatctttcatatatatatatttttgtttgtttgtttgtttgtttgtttgtttttgagatgaagtgttgccctattgcccaggctggactgcagtggtgcaatctctattcactgcaacctccaccttctgggttcaagtgattctcacctctcagcctcctaagtagctgggacgacaggcatgtgccaccacacccggctaatgtttgtatttttaatagagatggggtttcaacatgttggccaggctggtcttgaactcctgacctcaagtgatttacctgccttggacccctgaagtgctgggatttcaggtgtgagtcactgtgcccagcctcctaattatattttgaaagctatattgtttcttcattcttttttagattcacaatacatctggaactgatttttgtatatgttgtacagcagtgagttaatttttttccccacataacattcaatggaccgagcaccattttactaaaaaatccatccttcccacatttctctgctgtgccacctttgttataaatcaagtgtagatatacataattcctatgccaactctacactgtcttagttcttgcagctttatactagttctttatatccagaagagtaaatcttcctagcttattctttttcttccagaatttcctgcctttttaattttcatataaattttattgtcagcctgtccttttccacaaaaagttgcaacagtggttgaagttgcattgaatagtatcatttttccttccttcctccctccctccttccctacctcctttctctctctctctctctctctctctttctctcactctgttgcccaggccagtgcaatggcatgatctcagctcactgcgacctctgcctcctgggttcaagcaattctcctgcctcagtgtcctgagtagctgggaccactggcatgtgccaccatgcctggctaattttttttgtatttttagtaaagatggggtttcaccaagttggccaggctgatctcgaactcctgacctcaggtgatccacctgcctcgtcttcccaaagtgttgggattacaggtgtgaaccactgcaaccagcctacactgtttatttcattctctggcgcattaccctggctaagacctccaggacaatgttgaacagaagtggccatggtggcatctttgtcttattcctgatttcagagggaaaactttcaatatttcatcattaatacaatgctttccatagttttttgttattgtggtttgtttttgtttctgttttttgtggggcagggtcttgctctgtcacccaagctagagtgcagtgtcacagtcactagtcactgcagcctcgacctcctgggctcaagtgatcctcccatctcagcctctcgagtagctcgaaccaaagatgtgtgccaccacacccagctaatttttaaatttttcatagacttgggttctggccttgttgctcaggttggtctcgagctccaggctcaagcaatcctcccacctcagccccgcaaagtgctgggattataggtgtgagccaccacacctggccttgccgtagctttttgtaaacattttaagcagacgaaggaagtgtcccaaagtctagccagaattatctgagttctgtcttcttggaagactctaaatgttcatatttgttcttctagctctttgaggctggattcttagaagctctgctcagcagtagagttggaaggagttaccccttcaatattacagggagcccactactgttttttgcatgtatttaccaaggtctgtctttaactgaaaatatgcttccattgatatgagtccttatgacagctttagaaatgattcaaaaccttgtggcatttaaaacctgatgagttaaaaaccaaccttctagttttttagtaaatgtaattataattaatttagtgctgcattcagactattgaaagcattttgagcaaagaaagcacaataatttaatgcttgtaaatggttttctctaaacaggttcaaaagagcattaatgggtccgctgatgtcttacctgatatgttacctgacctgcccgtatctctggttctgttatccctgatcatggttgatattattgaaaaactcaggatatatcctcttagagggagtcaaaagagtaagtgttcttttaaatgtgaatattttttaaagtttgatatatttttcacatttctgccactgtgttatctgacaacatgtttaatgataccttttcttagggctaacattactgatagaagattgcaaatgaagatatctaaacataattatttttaaacctaccttgatagctagatagctgcttttgtttgctattcgcattttagtagtactgataaattaaaaattatcaaatagttaataccaaaaaccttaatgtttattccagcaagaaattatccaagtaaattattatagatgtatatttttctaggaagtctcttaaagcttatgtttaaatggattaataaaaagcttagtttggagacttttactacaggaattaatatgactgtggtagttgtgtcctagataatcatgtgtttttaattgtgaattataaaaatgccaaagatcacactaataaaaccaagatatggctgggtgcagtggctcacacctgtaatcccagcatttttggaggccaggatgggaagatggcatgagctcaggagtttgagaccagcctgagcaacatagcaagacaccatccctataaaaaaataaaatttaaagaaaactcaacaagatgtgtcacatctcctccaaagtgatgagttgaaactaaatacagattggcccttacaaaaagatattttgttaatggaatattttatttatttagtcgtaaattactccagctttcattaaatttcttgcggtagtatctgtgtttaattggcaatatttgtatgctagttactgtgtggctaagattttgtcatgttgtgcatttgaaatgggtaaggtttgtcaggttgttttctgatggggtgaatggagtcaactgagtgagcctcaggagacagcttcagagtgacggggtcaccactggggctcgtcagtcatttatgggtcagatatcagtaccttccagtcactcttgctgctcagatggaaagcaaaactgaggtggaggccactaggaagttggagaatctgagcctgtcactttgtacttcatcctcgggtgggagatgacggtctgttatggctaacataacacaggtgacatgtaggtggataagatggcagccggggccatctgttgagtggaaagcacacccaagtcacatctgccctccagagtcaagcgtatttgtcttaaactcaggagagttgggaatctccaaatcctttgctacatctctagattccttaaaaatgcaaatctatttttaaatataatttttttttcaatttgagctggggtcttgctatgttgcctaggctgacctagagttcttgagctcaggagatcctcctgcatcagcctcctgagtagctgggattctagctgtgcacggctgcacccagcgttaaattggatggtttctgatgactctgtattttccatattaatataaatttcctgtccaagttaaaaggtctttttaaaaaagaaagacacgtgtatctttttgggaataagttaataacattttatttttgttagtgatgagttgtttttttgttttgttttgttttgtttttgagacggagtcttgctctggaatgcagcggcatgacctctgctcgctgcaacctctgcctcctgggtttaagcaattctcctgcctcagcctcccgagtagctgggattgcaggcatgtgccaccatgcgtggctaatttttgtatttttagtagagacagggtttcatcatgttggccaggctggtctcgaactcctgacctcaggtgatccacccacctgggcctcccaaagtgctgggattacaggtgtgagccaccgtggctggccattagttgggtttttaaaggggaatttccttgcatccataacttcaataatgacactgagaattgaaataagacatctaaagaagaagtagatctgggggagaagactctagcacaatttgtacaactgcttctcacttgaagagcctccttcttgagctgttctccgtccaaatttaggaagattagtgtctggtttgatagttccaccgtttaataaattcacacttaaaaaaactagcagtcacttgaaatgcctttgtaaatatgaatcatacatgcttttaatttgtatgcaaagaccttgaacccaaattgtctcctacactcattttaacatgaaattaatgatataaattatgtaaattttgaatccatgaggttttctcatttattacttggaacatgaattaatatatgaatacattaacatgtaaatcttaaatacataaatctgaacctaagcaaatataccataaatatggtttcactacaggtgatacttgcaagtaaaaaaaattgactagaggcgggggatgaacaagatctagaataatttggctccctttaggaaatgtgggaaaagtgaatatgttctttgctctttccagatagtctgaaatgcatacatgtctgtcagctagcagcagtttggactttatgctagatgaaaccaacataatctacaacgttttgatttatggacactctcacagcatcctaaccatcttcattccaagctacaaaacttttatctttgtgtagcttttctttttccaaaattttaaataagttattctgctgacaaaatatgcttatgcttaaagcagtcttcaccggaccaaggaatcctttctactaacttcgtattaccagtggaaatctctcagtatcaagtaattatcatgcaacagcttctaagtgcatcgtttcatggaggtagagcagtgcatgggagcatttttctgacgcgtggatctctgtagcacggcagtctcacagatgtacgtggtacctaggaatgccaatccccagtcccgtgcagaaataacaagaatacaaaggatagcctgtgggtacaaatgagcgcaccttaatgcttccatttgaattttgctaactgaatcccatgtattaacgctcatttagcattgcaaccatacctgtttctaggacattaccatttttacggagagatagataggttgccagctctcactccaggcccagctccctggcaatcatgaccttgaaccacctagaagcaaagtgagcccccatctaaggtcttgtgattgctgctgctgctctgggcaatttcagctttgtaggcagagtgacccatcttggtggggtacacactggtttgaggctcaacagtaaagaagaggactttcatctcctcttcttcactgtcttttttctgctcccatttaattaattagttaattaattaattttttgagacagagtcttgatcctcctgcctcagcctcccaagtagctgggaatacaggagggcaccaccatgcctggctaatttttgtatttttagtagagatggggtttcaccctgttggccaggctggtcttgaactcctgacctcaagtgatctgcttgccacagcttcccaaagcactgggtttataggcatgagccaccgtgtccacctgctgctgctgttttaaaccagacccacagtgggtctcctgtgcccttatttgttggtccagacccctgactaccttgctgcatctgctttgcactcagcttttcactctcacgtgcaaacccctcagcatgctattttctaccactcctgctcggctctgctctaaatgctgttggtgctgctgttgcttgtgtctgggatattggtggatgttttgctggtgctttagactgacttcctttcttctgctagtgggaatattggcttcctgccaccgagttctagttttctaaagaggtttcaggcagagcactataataactgtttttttcttggaaacaacagccttttagcccttagagtgtatatgtaccaacaaattggctgggcttcagtgatttcaggtagtggccattctactcccctggaaaccaccatttcccctcccacttatagaactcgtggctgaatgtggcagagccagactcctttgaggcagcttttctccatgggggtctcatagatcctcaaatcaggcttagctatattgcctgaacctcaatccttgccatcgttagagtcctctccttgtcactacctagattccttaacccccatcaaaaccagtgggtgcaaacagacctatgaaagtgtccatgattagagagagagttttcagtcctaccttcaagactcatttgaataggacttgcagcccaggccagacatgctgttacaaagtgctacaatagattttaatagctaaagtactatggtgccacagatgaaggaaaacttcattttatctaaggtgatgaaggtaagagaagactaaagggaagatcttgggtttgcaggagtttgtaggtagacatggtaaagaaagctttctacatagaagaaaggttgggcctccaagaactaaggcgtgtatgtagcaaatggccatgtttgggaagtgaaaatgaagcagtgttgttgtctggggtagatacccaaggttcgtcatcttgtgccaagaagattaaggacatggacacacacaaggagtgagtttaggagcggaggtttaatagacaaaagaaagaaaggagagcagctctctctctttcgagacagaggggctcctaaatgggaattccagccatgacagagtgcaccgggttttatagacaggctttaggaggtggtgtctgatttacatagggctcagagattggttggactgggtgtgatgtttacatagcacccagaaaaggctggtcaccccaccgtaatcttattatgcaaatggactttccacttggctggtgccatgttgcctgctcctcactgtacatgcagctggcaaagagaagggaagatggagccaccattttgaccatgcctagtcccaggtggccttttcctattggcacagctgccagcattcacctgtacacgcttccagcttgcttgtctgtgtctgcagctcgattttacaggctgctgtttgttagaaaatgatttgggagtgcttttcattaaaaggaaaaccttaccaaggactcccgtaccctcatatctgcctaaataatttcttcttaactcctatatcaaaattaagcttggttggatttcacaccttgaatcaacaaacctggtgctgggaggcaagtttccttcttaaaactgactactgttcatcaaattgtcatttcagaaacctacaatgttacttcaagagtgactaaaaatttgcatgcagcccggcgtggtggctcacgcctgtaatcccagcactttgtggggctgaggttgggggtgggggggatcacctgaggtcaggagtttgagaccagcctggccaacatggtgaaaccccgtttctactaaaaatataaaaattggttggccgtggtggcatgcgcctgtaataccagctactggggaggctgaggcagaagaatcgcttgaacccaggaggcggagattgcagtgagctgagatggtaccactgcactccagcctgggtgatagaacatacctctgtctcaaaaaaaaaaaaaaaaaaaaaggaaagaaaatttgcatgcgtgtgtgtgttgtatgtgtgtgtttgggagaagggagagcttcatcatgatcaacaatatttttgtgtgtttaagagttgatgttttatgtgagatttcatttgggggaaaaaaaagcttcctctgctaaatgtttaaaaatcattaacctagggcttcattcagcattgtaaccgcacctgtttctaggacactaccatttctatgaagagatagataggttgccaactctctctccaggcccagctccctggcaatcatgactgcaccacctagaggcaaagtgagcccccatctaaggtcttgtgactactgctgctgctctgggcagtttcagctttgtaggcagagtgacccgtcttggtggggtacaaactggcttgaggctcaacacctttgaaaaacagataaaccttttaacatgccatgttgaattttttctttccaatgttgcatttttccaaaagaacacatactcattttaaaaagttataaaatagagataaacaaaaaagaaaagg

SEQ ID NO: 645 - DNA, 279 bp, Homo sapiens
gagacagagtctcgctctgtcgcccaggctggagtgcagtggcacagtcttggctcactgcaagctctgcctcccgggttcacgccgttctcctgcctcagcctcctgagtagctgggactacaggtgctcgccaccacgcccggctaatattttgtatttttagtagagacagggtttcaccatgttagccaggatggtctcgatctcctgacctcgtgatccacctgccttggcctcccaaaatgctgggattacaggcgtgagccaccgtgcccgg

SEQ ID NO: 646 - DNA, 7720 bp, Homo sapiens
agcctaacatggcagaccagagacagcgctcactgtctacctctggggagtcattgtaccacgtccttgggttggacaagaacgcaacctcagatgacattaaaaagtcctatcggtaagtggacaagtgtggcccccacatccccccaggaagacacacatgccccgtgtggtttagtctgcattttaccaagaaccattgcacatactttatcctggccgactcagcgttgaactggtcacagctcggtaacacctttgtatgtgtaatgtactccttatagcttaaagttatggtattcatgttctcttgccaacaaaaaatagcacttagtagaaactgacacactgtccacagttccatagggagtcagggtctgaacctgtttgaggcctcacaggagccgcagagcgctggcatggtcctgtggtctccttgttttagcacagtgatgacagagacccctcactctgttgtggccttctgattgagcttgaagaactgcactcttgggtacagtttcattgagtaacctgtaagagacaccatcactaatccagacaattcagatagtcctcctctcgtgtgctagcatcgtgtagttcataaaacacttcttaaagtgccatcattacgccccgccgtgcttaccgttcacttggcacttgtgcagttagcggctgggacaccagggctggccttggtgccgctgaacttagatgtgccgtggcactcacagcccttggggctccctcctctgaggctgggtcagggtgaggaggtttacctgaaacaaccgcggagcttgcttttgtctctggcccctgcagccctggagagtcggacagtgaggtggcctgggtggacctgccttccactgcacccggcagtgcgtgcgggtgggatggacgcggcggcgggtgcgggtggaacaaagtccagggtagagccaggacatggttttggtttgcaggaagcttgccttgaaatatcaccccgacaagaaccccgacaacccggaggccgcggacaagtttaaggagatcaacaacgcgcacgccatcctcacggacgccacaaaaaggaacatctacgacaagtacggctcgctgggtctctacgtggccgagcagtttggggaagagaacgtgaacacctacttcgtgctgtccagctggtgggccaaggtgagggcgagctgcctgccgtgcgggcacccgagtcactcctgccgtgcgggcacccgagtctctcctgccgtgcgggcacccgagtcactcctgccgtgcgggcacccgagtctctcctgccgtgcgggcacccgagtctctcctgccgtgcgggcgcccgagtcactcctgccgtgcgggcgcccgagtcactcctgccgtgcgggcgcccgagtcactcctgccgtgcgggcacccgagtctctcctgccatgtgggcacccgggtcactccacgcctgcagggttcccagcattgcagagcccatgcgttgatgccagcaactctacactcctgagaaaaggcttctgggcatatggagcctttctcctcacctgtgtgatgggcgaagctctgtcactggcttggtgtcctgcctggaacaagccatagcgtacagattgtcccagggaagagccgtgcggagccgccagggtttcttctgtaaatggctcccagtccttcgtgagacaggaggaaataagcctcgatgttacatccgcatttcttcgtttcctcgttttgttccaaatgtcatatatgaggccagagggttggaatcactgcatggcatttgtgagaagcctgtatttggctttgactggtcggcctcctcactagaatccttataaagtactttttatttagttaatgttagacagagtctcgctctgttgcccagactggagtgctgtggtgagatcctggctcactttaactttgaattcctgggttcaagtgatcctcccacttcagctccagaactgcaggagttgaggcgtgaaccactgtgcccagcctggaggctgctttgttttttttttgagacggagtctcgctctgtttcccaggctggagtgcagtggcgcgatcttggctcactgcaagctccacctcccgggttcacgccattctcctgcctctgcctcccgagtggctgggactacaggtgcccgccaccacgtccagctaattttttgtatttttagtagagacagggtttcaccgtgttagccaggatggtctcgatctcctgacctcgtgatccgccagcctcggcctcctggagtgctgggatgacaggcatgggccaccacgcccgtcttggaggctgcttttctttaagctgcgggtttctttctgtctctcctcctcccttcttcagttctttccttctgcttcctgtctggaaggcagtatccccacctggaacgcaccccctgccttctgctgagggcatttgggagtcctgcgcctccctctccaggggcctcggaggccatgcaacaccaccttcttctccccccaggccctgtttgtcttctgcggcctcctcacgtgctgctactgctgctgctgtctgtgctgctgcttcaactgctgctgcgggaagtgtaagcccaaggcgcctgaaggcgaggagacggagttctacgtgtcccccgaggatctggaggcacagctgcagtctgacgagaggggtgagtgcccgccccagggcccgtgtgtgtgtgtggggcagagccagaatgggccctgaatggtgtcaacctgtcttgtcaaacaggagggcactgacactgtgccgcgagtgtttgtggtggcagctgggactgttgaggtgtgaacgtggaccctgaggtaaagcaggcgcatagagctgtccccgccgtgacctgcggtagccgtagatcccagggactgcgaggcggggcagggcggcaggcagttggggcggggctgagggccgagggctggcggtgacccaaggcgacggaggaaagccgtgtggggtggaggtcagcgagtagcctctcccggtggagagtttgtccaggtgcccgaaagtcgctccacaggaccagcgttgggtgcgcgccaggctgtggccctcgtgcagtgccctgtgtgcttgcttttcagaggccacagacacgccgatcgtcatacagccggcatccgccaccgagaccacccagctcacagccgactcccaccccagctaccacactgacgggttcaactaaatccaggaggagctgtggtcagaggaggagccggcgcctggccacgccaaccttagaatcatgaactgtagtcacagagatgggaaggcagcctcctgcctgccctggccttgctggggcccctcctgcctccacgcccacccagcgtcgacccttgacccacgaagtgcgtagcatgcagtatttaaagcagtgtagctacggtcttctgtttttttcccttttttaatagcatgtatggggttctgttccatgtctgtgttgtggacattccgcggcatgaccgcgtgaactgcacggtggagctgcctcagggctgtcggtcaggttggtccagtgaggggtgactgcagccggtcaggtgggcgaggagaaggggggctgcccctttcctacctgtgcttgaggggccggaggcaggtgctgcctggcagagctgtgttaccgtcttggcctcggggtctggtccacactctgtgctcccagccttgaggctgcagtaggactctgatctcacctgccagaagagaggcggggccgcgtcctcctggcgtcaccggcgtcactgtcattccttggtgtctgtgctgggcatggttggcttgggggtctgtggtttcctgggccttgtggcagggtttctcccgtgggagaatttggtgtggaaagcataggaggccccttccgaggttgacaccgtgtcctccgcggtgtttctcgcctggtcgtctcgtcgtgtggacgctgccgttctggttctcggaggtgtgtccttcgccgtgttggggttatttgtctgtgttcctgcacttttcccgggctctgagctggattgatggggccagtctcccccctcccatcttgaggtcgttctccacattccttccagcacacctgtcctttccatagccctttttggacctttagaaccacagatgataggaccagcccaatgagccacagtcagagagtagattgtgcatgtgtgagcacccagctactggggacgggggctctcccacgacccctcctcctgtgtttgccagagctcccatctgccccactcgcctttgccccgtcatcgatgattcaggcagagccagattcgttaggtccctggaggaaggactgactggaccagagggaccctctggctcaggagggttgggtccctgggaggccggcagccaggccacagaatccacacgtggaccattgtgggtccctgggaggccggcagccaggccacggaatccacacgtggaccattgtgggtcccttgggaggccagcagccagactacggaatccacatgtggaccatgggaagtcagtctcttgcgtgtcctagaccttgtgggtggcgccctgcataggggagcagggggaacgggtctgatgtccctgtgctggctgagggctcagagctgcccgcactccgtagctcatgggatgtgctgggcctgcctttggcgccatgctgcagactccagtgggcctggtttctgcagaatgtccatggtggccgctgcagagttgcagaggtccctgtagagataaagctgaggaggaggctgtgtgtgatggctctggctcggaccaaccagatgagcctcctgaagcccccttccctgcctgcctgctgacccgtggccccagctcactcattgccctcagcagccacccgaggctgtgcagaagggtaggttcaggttgaccaggaagctgccaaaagggacatggatatgaggatacatctggacgtgcttaggaacagggtgctggttgagggcccccagctgacccctactgcagatccgcatgtggaccatgagccggctgccagcactaggtcctgggcagctttgtttgtcccacttttctttgtttcttctcactaaaatgatcacgaagacctttgacaagaggagagatatgcactgtgatattaaattagaaataatttatcaaaatcagacctctcctaaaagaataagaaattcattgtttggcccatcctgaaaggtgaggtggcgagacagtggggtgcctccgtgccgcttcgtgcagcagcaagttcagcctgagatgctggctgtactcagcctttgcaatttttgtagatgtagcttaggacgtgagttatttttccgcagactggccaagagccaggttctaagcttggacctaaggtagaaagctgcccatcgggggccctagctcagccccaccaggccctctgttgggcctgcacacagctctgtggctagaacactccaaggcccttcggtacccatcagagtgggccccttgccaggtggcttttcagttacagagtccagtggaccattttgtagaaccatgcagctccctgcggaaggtggggtagggtgggaaagaggagcaggtctggaggtttgtggaacccagtcccctgcagaatctgtaaaacctaataaatcatggttgtggccattctcacggtggtgattgtgattagacgacccccgggaagcccagacactcggggcctggagttcctccccctgcctgacctagaagcagaaccgttttcagcgctctgccctgttggctttaaggctttgtcttaatttaaggaaaaagatcctcccgggttttatttctctctttcttgagtggactgtttccctataattaaaagaggtggtgagtcctggggcagcttccgcgcctccctgtccacgtgctaacagatcaggacgcccccagcacccctgcctgcttttgctggtggcagtgacgggaccccgactcctcactctcgggccgcagacaatgctgtgagcaagtgtggccatgggcacagaatgtccctttggacgccgctgctgggggctgccaggggccctctggggtcgtgctttgaggcctgtccggttcacgagggggtccgggcagcactgactgcttccgacctgcaggaggcgtaggagcggccctgcgggccctttcacggcagctgctgctgtatagatttgtctccactcagtgacgtgggatttttttgtcttccttttggctttatttttaaactgctttagatattactgctcagtgtttgtgaactttcctagttctctatgttgttagtgcagccagcacccagtggggacctactagaaaaaggaactggcatgcacacgtgcccagcaggaaaagcttcgtcttcacgtcggctgctgccatccagaagaggccctggagcctcacgccgtcgaggctgctctcaggcgttctgttccgggcgaggcttgtgctgcaaggaagggcaccagcatgcaggctgccactggagggtccgggtgctgcgggcagagttcagcgcttgtccaccctcccttagctctgactcagtgcatcctactgtggggacatctcgtgaggggacacgaaatgactgatctcaccctttcccagtattcagagctgtgaacccctgtggcgcaggactggcctgtgtctgttattttggttgtaaatcattctcctgtggaattggcaaaagctacatttttactgtccttaccagcaacagtttgcgtcgtcacatgctgtgagtgtgggctgtggtgtgtccgtgtgtgtacatatgtgtatatgtatatatcacgcagcaggagtgtcattcatgctgctgtcccctggtgaagtgacaagtacaattaaaggtggctctgaaatggcctctggtttcttgggagtcgggcagggacctgcaggaggctttcccagcaggtgcacagaaggaagcgctgagcccactgtgtgcagagggtgtgtgcccagggcactgccacggcccccaccagcattggcctctgctctgcagggtggggtgcccatcctgggggctgtgtgtcatgctcacctgacccaggtgtgtgtcccggtgtgaaatcgaggaggggactggaagcccttccctgccttgaaacatgaaagctgattttctgagcagcagatacggtcagtggcaaagctgcatctgaagggcggcctgggaaggggccctgtgctggccccgggtccgccccagaggagtccacacagcaccacctccagaaggggctgggcccggggtcctgcaggcggcaccttttggtagagtttgtttccctggaaaatggggaaaatgtttcaagccaggtgaggggggaagttaacactgaaatatgtattgtttttaaaaatcaaatgcacacgcatggaagctgcttgtccatgcactggttttgtcactggcgtcctggaatccgaccgtgttggggtgcaggcgctgtcagactccggctgatcctggctcgagcacacacatctaagggccaggctggttccgcatggtgatctccgtcttgtatgtctgaatgttggcctaaaataaagattactgttgtaaaataaatgttttcactgcggacccca

SEQ ID NO: 647 - DNA, 6746 bp, Homo sapiens
agccaggacatggttttggtttgcaggaagcttgccttgaaatatcaccccgacaagaaccccgacaacccggaggccgcggacaagtttaaggagatcaacaacgcgcacgccatcctcacggacgccacaaaaaggaacatctacgacaagtacggctcgctgggtctctacgtggccgagcagtttggggaagagaacgtgaacacctacttcgtgctgtccagctggtgggccaaggtgagggcgagctgcctgccgtgcgggcacccgagtcactcctgccgtgcgggcacccgagtctctcctgccgtgcgggcacccgagtcactcctgccgtgcgggcacccgagtctctcctgccgtgcgggcacccgagtctctcctgccgtgcgggcacccgagtcactcctgccgtgcgggcgcccgagtcactcctgccgtgcgggcacccgagtctctcctgccatgtgggcacccgggtcactccacgcctgcagggttcccagcattgcagagcccatgcgttgatgccagcaactctacactcctgagaaaaggcttctgggcatatggagcctttctcctcacctgtgtgatgggcgaagctctgtcactggcttggtgtcctgcctggaacaagccatagcgtacagattgtcccagggaagagccgtgcggagccgccagggtttcttctgtaaatggctcccagtccttcgtgagacaggaggaaataagcctcgatgttacatccgcatttcttcgtttcctcgttttgttccaaatgtcatatatgaggccagagggttggaatcactgcatggcatttgtgagaagcctgtatttggctttgactggtcggcctcctcactagaatccttataaagtactttttatttagttaatgttagacagagtctcgctctgttgcccagactggagtgctgtggtgagatcctggctcactttaactttgaattcctgggttcaagtgatcctcccacttcagctccagaactgcaggagttgaggcgtgaaccactgtgcccagcctggaggctgctttgttttttttttgagacggagtctcgctctgtttcccaggctggagtgcagtggcgcgatcttggctcactgcaagctccacctcccgggttcacgccattctcctgcctctgcctcccgagtggctgggactacaggtgcccgccaccacgtccagctaattttttgtatttttagtagagacagggtttcaccgtgttagccaggatggtctcgatctcctgacctcgtgatccgccagcctcggcctcctggagtgctgggatgacaggcatgggccaccacgcccgtcttggaggctgcttttctttaagctgcgggtttctttctgtctctcctcctcccttcttcagttctttccttctgcttcctgtctggaaggcagtatccccacctggaacgcaccccctgccttctgctgagggcatttgggagtcctgcgcctccctctccaggggcctcggaggccatgcaacaccaccttcttctccccccaggccctgtttgtcttctgcggcctcctcacgtgctgctactgctgctgctgtctgtgctgctgcttcaactgctgctgcgggaagtgtaagcccaaggcgcctgaaggcgaggagacggagttctacgtgtcccccgaggatctggaggcacagctgcagtctgacgagaggggtgagtgcccgccccagggcccgtgtgtgtgtgtggggcagagccagaatgggccctgaatggtgtcaacctgtcttgtcaaacaggagggcactgacactgtgccgcgagtgtttgtggtggcagctgggactgttgaggtgtgaacgtggaccctgaggtaaagcaggcgcatagagctgtccccgccgtgacctgcggtagccgtagatcccagggactgcgaggcggggcagggcggcaggcagttggggcggggctgagggccgagggctggcggtgacccaaggcgacggaggaaagccgtgtggggtggaggtcagcgagtagcctctcccggtggagagtttgtccaggtgcccgaaagtcgctccacaggaccagcgttgggtgcgcgccaggctgtggccctcgtgcagtgccctgtgtgcttgcttttcagaggccacagacacgccgatcgtcatacagccggcatccgccaccgagaccacccagctcacagccgactcccaccccagctaccacactgacgggttcaactaaatccaggaggagctgtggtcagaggaggagccggcgcctggccacgccaaccttagaatcatgaactgtagtcacagagatgggaaggcagcctcctgcctgccctggccttgctggggcccctcctgcctccacgcccacccagcgtcgacccttgacccacgaagtgcgtagcatgcagtatttaaagcagtgtagctacggtcttctgtttttttcccttttttaatagcatgtatggggttctgttccatgtctgtgttgtggacattccgcggcatgaccgcgtgaactgcacggtggagctgcctcagggctgtcggtcaggttggtccagtgaggggtgactgcagccggtcaggtgggcgaggagaaggggggctgcccctttcctacctgtgcttgaggggccggaggcaggtgctgcctggcagagctgtgttaccgtcttggcctcggggtctggtccacactctgtgctcccagccttgaggctgcagtaggactctgatctcacctgccagaagagaggcggggccgcgtcctcctggcgtcaccggcgtcactgtcattccttggtgtctgtgctgggcatggttggcttgggggtctgtggtttcctgggccttgtggcagggtttctcccgtgggagaatttggtgtggaaagcataggaggccccttccgaggttgacaccgtgtcctccgcggtgtttctcgcctggtcgtctcgtcgtgtggacgctgccgttctggttctcggaggtgtgtccttcgccgtgttggggttatttgtctgtgttcctgcacttttcccgggctctgagctggattgatggggccagtctcccccctcccatcttgaggtcgttctccacattccttccagcacacctgtcctttccatagccctttttggacctttagaaccacagatgataggaccagcccaatgagccacagtcagagagtagattgtgcatgtgtgagcacccagctactggggacgggggctctcccacgacccctcctcctgtgtttgccagagctcccatctgccccactcgcctttgccccgtcatcgatgattcaggcagagccagattcgttaggtccctggaggaaggactgactggaccagagggaccctctggctcaggagggttgggtccctgggaggccggcagccaggccacagaatccacacgtggaccattgtgggtccctgggaggccggcagccaggccacggaatccacacgtggaccattgtgggtcccttgggaggccagcagccagactacggaatccacatgtggaccatgggaagtcagtctcttgcgtgtcctagaccttgtgggtggcgccctgcataggggagcagggggaacgggtctgatgtccctgtgctggctgagggctcagagctgcccgcactccgtagctcatgggatgtgctgggcctgcctttggcgccatgctgcagactccagtgggcctggtttctgcagaatgtccatggtggccgctgcagagttgcagaggtccctgtagagataaagctgaggaggaggctgtgtgtgatggctctggctcggaccaaccagatgagcctcctgaagcccccttccctgcctgcctgctgacccgtggccccagctcactcattgccctcagcagccacccgaggctgtgcagaagggtaggttcaggttgaccaggaagctgccaaaagggacatggatatgaggatacatctggacgtgcttaggaacagggtgctggttgagggcccccagctgacccctactgcagatccgcatgtggaccatgagccggctgccagcactaggtcctgggcagctttgtttgtcccacttttctttgtttcttctcactaaaatgatcacgaagacctttgacaagaggagagatatgcactgtgatattaaattagaaataatttatcaaaatcagacctctcctaaaagaataagaaattcattgtttggcccatcctgaaaggtgaggtggcgagacagtggggtgcctccgtgccgcttcgtgcagcagcaagttcagcctgagatgctggctgtactcagcctttgcaatttttgtagatgtagcttaggacgtgagttatttttccgcagactggccaagagccaggttctaagcttggacctaaggtagaaagctgcccatcgggggccctagctcagccccaccaggccctctgttgggcctgcacacagctctgtggctagaacactccaaggcccttcggtacccatcagagtgggccccttgccaggtggcttttcagttacagagtccagtggaccattttgtagaaccatgcagctccctgcggaaggtggggtagggtgggaaagaggagcaggtctggaggtttgtggaacccagtcccctgcagaatctgtaaaacctaataaatcatggttgtggccattctcacggtggtgattgtgattagacgacccccgggaagcccagacactcggggcctggagttcctccccctgcctgacctagaagcagaaccgttttcagcgctctgccctgttggctttaaggctttgtcttaatttaaggaaaaagatcctcccgggttttatttctctctttcttgagtggactgtttccctataattaaaagaggtggtgagtcctggggcagcttccgcgcctccctgtccacgtgctaacagatcaggacgcccccagcacccctgcctgcttttgctggtggcagtgacgggaccccgactcctcactctcgggccgcagacaatgctgtgagcaagtgtggccatgggcacagaatgtccctttggacgccgctgctgggggctgccaggggccctctggggtcgtgctttgaggcccgtccggttcacgagggggtccgggcagcactgactgcttccgacctgcaggaggcgtaggagcggccctgcgggccctttcacggcagctgctgctgtatagatttgtctccactcagtgacgtgggatttttttgtcttccttttggctttatttttaaactgctttagatattactgctcagtgtttgtgaactttcctagttctctatgttgttagtgcagccagcacccagtggggacctactagaaaaaggaactggcatgcacacgtgcccagcaggaaaagcttcgtcttcacgtcggctgctgccatccagaagaggccctggagcctcacgccgtcgaggctgctctcaggcgttctgttccgggcgaggcttgtgctgcaaggaagggcaccagcatgcaggctgccactggagggtccgggtgctgcgggcagagttcagcgcttgtccaccctcccttagctctgactcagtgcatcctactgtggggacatctcgtgaggggacacgaaatgactgatctcaccctttcccagtattcagagctgtgaacccctgtggcgcaggactggcctgtgtctgttattttggttgtaaatcattctcctgtggaattggcaaaagctacatttttactgtccttaccagcaacagtttgcgtcgtcacatgctgtgagtgtgggctgtggtgtgtccgtgtgtgtacatatgtgtatatgtatatatcacgcagcaggagtgtcattcatgctgctgtcccctggtgaagtgacaagtacaattaaaggtggctctgaaatggcctctggtttcttgggagtcgggcagggacctgcaggaggctttcccagcaggtgcacagaaggaagcgctgagcccactgtgtgcagagggtgtgtgcccagggcactgccacggcccccaccagcattggcctctgctctgcagggtggggtgcccatcctgggggctgtgtgtcatgctcacctgacccaggtgtgtgtcccggtgtgaaatcgaggaggggactggaagcccttccctgccttgaaacatgaaagctgattttctgagcagcagatacggtcagtggcaaagctgcatctgaagggcggcctgggaaggggccctgtgctggccccgggtccgccccagaggagtccacacagcaccacctccagaaggggctgggcccggggtcctgcaggcggcaccttttggtagagtttgtttccctggaaaatggggaaaatgtttcaagccaggtgaggggggaagttaacactgaaatatgtattgtttttaaaaatcaaatgcacacgcatggaagctgcttgtccatgcactggttttgtcactggcgtcctggaatccgaccgtgttggggtgcaggcgctgtcagactccggctgatcctggctcgagcacacacatctaagggccaggctggttccgcatggtgatctccgtcttgtatgtctgaatgttggcctaaaataaagattactgttgtaaaataaatgttttcactgcggacccca

SEQ ID NO: 648 - DNA, 297 bp, Homo sapiens
tttgtttgttttttgagatggagtctcgctctgtcacccaggctggagtgcagtggcgcgatcttggctcactgcaacctccgcctcctgggttcacgccatttaggaaaacgcatgcctcaccctcccgagtagctgggactacaggcacccgccaccacgcccggctaattttttgtatttttagtggagatggggtttcaccgtgttagccaggatggtctcggatctcctgaccttgtgatctgcccacctcggcctcccaaagtgctgggattacaggcgtgagccaccgcg

SEQ ID NO: 649 - DNA, 481 bp, Homo sapiens
tctgttccttatgatttccttgcttgcatttatgttgggtttatcctgttactttgtagcttcctgaggcggagccttaggccttgattaacgtgttgtactagtcagcattctgcagaggaacgttgccattatctgtgtctctttctaaaggagatttgttatgaggaattggcccacgtcattatggagacggaatctcatgctctgccatttgctgaagattgaggaaagcagtgggataataacagtccaaggacaggaggagacacgtggccccgctcaggctggcaggcgagaaggaaaacccaggccaactcctcctcccacccctttctattcgggacccccgtggactgggacgacactcacctgcacagggcagcgcagttggcttcatggagcccccagctcaggtgctgctcttaccaagaaacaccctcccaggcacaccctgaagtcatgtttcatctgggtgccc

SEQ ID NO: 650 - DNA, 89 bp, Homo sapiens
ttttttttttttttgagatggagtctcgctctgtcacccaggctggagtgcagtggcgcgatcttggctcactgcaacctccgcctcct

SEQ ID NO: 651 - DNA, 3482 bp, Homo sapiens
gcgccaccaccgccgagaccgcgtccgccccgcgagcacagagcctcgcctttgccgatccgccgcccgtccacacccgccgccaggtaagcccggccagccgaccggggcaggcggctcacggcccggccgcaggcggccgcggccccttcgcccgtgcagagccgccgtctgggccgcagcggggggcgcatggggggggaaccggaccgccgtggggggcgcgggagaagcccctgggcctccggagatgggggacaccccacgccagttcggaggcgcgaggccgcgctcgggaggcgcgctccgggggtgccgctctcggggcgggggcaaccggcggggtctttgtctgagccgggctcttgccaatggggatcgcagggtgggcgcggcggagcccccgccaggcccggtgggggctggggcgccattgcgcgtgcgcgctggtcctttgggcgctaactgcgtgcgcgctgggaattggcgctaattgcgcgtgcgcgctgggactcaaggcgctaactgcgcgtgcgttctggggcccggggtgccgcggcctgggctggggcgaaggcgggctcggccggaaggggtggggtcgccgcggctcccgggcgcttgcgcgcacttcctgcccgagccgctggccgcccgagggtgtggccgctgcgtgcgcgcgcgccgacccggcgctgtttgaaccgggcggaggcggggctggcgcccggttgggagggggttggggcctggcttcctgccgcgcgccgcggggacgcctccgaccagtgtttgccttttatggtaataacgcggccggcccggcttcctttgtccccaatctgggcgcgcgccggcgccccctggcggcctaaggactcggcgcgccggaagtggccagggcgggggcgacctcggctcacagcgcgcccggctattctcgcagctcaccatggatgatgatatcgccgcgctcgtcgtcgacaacggctccggcatgtgcaaggccggcttcgcgggcgacgatgccccccgggccgtcttcccctccatcgtggggcgccccaggcaccaggtaggggagctggctgggtggggcagccccgggagcgggcgggaggcaagggcgctttctctgcacaggagcctcccggtttccggggtgggggctgcgcccgtgctcagggcttcttgtcctttccttcccagggcgtgatggtgggcatgggtcagaaggattcctatgtgggcgacgaggcccagagcaagagaggcatcctcaccctgaagtaccccatcgagcacggcatcgtcaccaactgggacgacatggagaaaatctggcaccacaccttctacaatgagctgcgtgtggctcccgaggagcaccccgtgctgctgaccgaggcccccctgaaccccaaggccaaccgcgagaagatgacccaggtgagtggcccgctacctcttctggtggccgcctccctccttcctggcctcccggagctgcgccctttctcactggttctctcttctgccgttttccgtaggactctcttctctgacctgagtctcctttggaactctgcaggttctatttgctttttcccagatgagctctttttctggtgtttgtctctctgactaggtgtctaagacagtgttgtgggtgtaggtactaacactggctcgtgtgacaaggccatgaggctggtgtaaagcggccttggagtgtgtattaagtaggtgcacagtaggtctgaacagactccccatcccaagaccccagcacacttagccgtgttctttgcactttctgcatgtcccccgtctggcctggctgtccccagtggcttccccagtgtgacatggtgtatctctgccttacagatcatgtttgagaccttcaacaccccagccatgtacgttgctatccaggctgtgctatccctgtacgcctctggccgtaccactggcatcgtgatggactccggtgacggggtcacccacactgtgcccatctacgaggggtatgccctcccccatgccatcctgcgtctggacctggctggccgggacctgactgactacctcatgaagatcctcaccgagcgcggctacagcttcaccaccacggccgagcgggaaatcgtgcgtgacattaaggagaagctgtgctacgtcgccctggacttcgagcaagagatggccacggctgcttccagctcctccctggagaagagctacgagctgcctgacggccaggtcatcaccattggcaatgagcggttccgctgccctgaggcactcttccagccttccttcctgggtgagtggagactgtctcccggctctgcctgacatgagggttacccctcggggctgtgctgtggaagctaagtcctgccctcatttccctctcaggcatggagtcctgtggcatccacgaaactaccttcaactccatcatgaagtgtgacgtggacatccgcaaagacctgtacgccaacacagtgctgtctggcggcaccaccatgtaccctggcattgccgacaggatgcagaaggagatcactgccctggcacccagcacaatgaagatcaaggtgggtgtctttcctgcctgagctgacctgggcaggtcggctgtggggtcctgtggtgtgtggggagctgtcacatccagggtcctcactgcctgtccccttccctcctcagatcattgctcctcctgagcgcaagtactccgtgtggatcggcggctccatcctggcctcgctgtccaccttccagcagatgtggatcagcaagcaggagtatgacgagtccggcccctccatcgtccaccgcaaatgcttctaggcggactatgacttagttgcgttacaccctttcttgacaaaacctaacttgcgcagaaaacaagatgagattggcatggctttatttgttttttttgttttgttttggttttttttttttttttggcttgactcaggatttaaaaactggaacggtgaaggtgacagcagtcggttggagcgagcatcccccaaagttcacaatgtggccgaggactttgattgcacattgttgtttttttaatagtcattccaaatatgagatgcgttgttacaggaagtcccttgccatcctaaaagccaccccacttctctctaaggagaatggcccagtcctctcccaagtccacacaggggaggtgatagcattgctttcgtgtaaattatgtaatgcaaaatttttttaatcttcgccttaatacttttttattttgttttattttgaatgatgagccttcgtgcccccccttcccccttttttgtcccccaacttgagatgtatgaaggcttttggtctccctgggagtgggtggaggcagccagggcttacctgtacactgacttgagaccagttgaataaaagtgcacaccttaaaaatgaggccaagtgtgactttgtgg

SEQ ID NO: 652 - DNA, 1820 bp, Homo sapiens
gccgagactgcatccgccttgcgagcacagagcctcgccttcgctgctccactgccagtccacacctgccaccagctcaccatggatgatgatatcaccgcgctcgtcattgacaacggctccggcatgtgcaaggccagcttcacgggcgacaatgccgcccgggcagtcttcccctccatcgttgggcaccccaggcaccagggcgtgatggtgggcatgggtcagaaggattcctatgtgggcgacgaggcccagagcaagagaggcatcctcaccctgaagtaccccattgagcacggcattgtcaccaactgggacgacatggagaagatctggcaccacaccttctacaatgagctgcgcgtggctcccgaggagcaacccatgctgctgtttgaggcccccctgaaccccagggccaactgcaagaagatgacccagatcatatttgagaccttcaacaccccagccatgtacttggccatccagactatgctgtccctgtacgcctctggccgtaccactggcatcgtgttggactccagtgatggggtcacccacactgtgcccatctacgaggggtatgccctccccaacgccatcctgcttctggacctggctggccgggacctgactacctcatgaagatcctcaccgagcgccgctacagcttcatcaccacgcggagcgggaaatcatgcgtaacatcaaggagaagctgtgctacctcgtcctggacttcgagcaggagatggctaccgcggcttccagctcctccctggagaagagctaccagctgcccaacagccaggtcatcaccattggcaacgagtggttctgctgccccgaggcgctcttccagccttccttcctgggcatggagtcctgtggcatccacgaaactaccttcaactccatcatgaagtgtgacttggacatccgcaaagacctgtacaccagcacagtgctgtctggtggcaccactatgtaccctggcattgctgacaggatgcagaaggagattaccgccctggcgcccagcaggacgaagatcaagatcattgctcctcctgagcgcaagtactctgtgtggattggaggctccatcctggcctcgctgtccaccttccagcagatgtggatcagcaagcaggagtatgaggagtctggccctccatcgttcaccgcaaatgcttctaggcggactgtgacttagttgtgttacaccttttcttgacaaaacctaacttgtgcaggaaacaagataagattggcatggctttatttgtttttttgttttgttttgtttttttggttttttttggcttgactcaggatttaaaaactggaacagtgaaggtgacagcagtcggttggagcgagcatcccccaaagttctacagtgtggccgaggactttgattgtacattgttcttttttttaatagtcattccaaatatcatgggatgcattgttacaggaagtcccttgccatcctaaaagccaccccacttctgtctaaggagaatggcccagtcgtctaccgagtccacacaggggaggtgatagcattgctttcgtgtaaattatggaatgcaaaatttttttaatcttcgccttaatactttcttattttttttattttgaatgatgagccttcgtgcccccccccccttttttgtcccccagcttgagatgtatgaaggcttttggtgtccctgggagtgggtgaaggcagccagggcttacctgtgcactgacttgagaccagttgaataaaagtgcacacacacacacataaaaagatctacattcca

SEQ ID NO: 653 - DNA, 1820 bp, Homo sapiens; identical to SEQ ID NO: 652

SEQ ID NO: 654 - DNA, 1823 bp, Homo sapiens
accgccgagactgcatccgccttgcgagcacagagcctcgccttcgctgctccactgccagtccacacctgccaccagctcaccatggatgatgatatcaccgcgctcgtcatcgacaacggctccggcatgtacaaggccggcttcacgggcgacaatgccacccgggcagtcttcccctccatcgttgggcaccccaggcaccagggcgtgatggtgggcatgggtcagaaggattcctatgtgggcgacgaggcccagagcaagagaggcatcctcaccctgaagtaccccattgagcacggcattgtcaccaactgggacgacatggagaagatctggcaccacaccttctacaatgagctgcgcgtggctcccgaggagcaacccatgctgctgtttgaggcccccctgaaccccagggccaactgcaagaagatgacccagatcatatttgagaccttcaacaccccagccatgtacttggccatccagactatgctgtccctgtacgcctctggccgtaccactggcatcgtgttggactccagtgatggggtcacccacactgtgcccatctacgaggggtatgacctccccaacgccatcctgcgtctggacctggctggccgggacctgactacctcatgaagatcctcaccgagcgccgctacagcttcatcaccacgcggagcgggaaatcatgcgtaacatcaaggagaagctgtgctacctcgtcctggacttcgagcaggagatggctaccgcggcttccagctcctccctggagaagagctaccagctgcccaacagccaggtcatcaccattggcaacgagtggttctgctgccccgaggagctcttccagccttccttcctgggcatggagtcctgtggcatccacgaaactaccttcaactccatcatgaagtgtgacttggacatccgcaaagacctgtacaccagcacagtgctgtctggcggcaccactatgtaccctggcattgctgacaggatgcagaaggagattaccgccctggcgcccagcaggatgaagatcaagatcattgctcctcctgagcgcaagtactctgtgtggattggaggctccatcctggcctcgctgtccaccttccagcagatgtggatcagcaagcaggagtatgaggagtctggccctccatcgttcaccgcaaatgcttctaggtggactgtgacttagttgtgttacaccttttcttgacaaaacctaacttgtgcaggaaacaagataagattggcatggcttaatttgtttttttgttttgttttgtttttttggttttttttggcttgactcaggatttaaaaactggaacagtgaaggtgacagcagtcggttggagcgagcatcccccaaagttctacagtgtggccgaggactttgattgtacattgttcttttttttaatagtcattccaaatatcatgggatgcattgttacaggaagtcccttgccatcctaaaagccaccccacttctgtctaaggagaatggcccagtcgtctaccgagtccacacaggggaggtgatagcattgctttcgtgtaaattatggaatgcaaaatttttttaatcttcgccttaatactttcttattttttttattttgaatgatgagccttcgtgcccccccccccttttttgtcccccagcttgagatgtatgaaggcttttggtgtccctgggagtgggtgaaggcagccagggcttacctgtgcactgacttgagaccagttgaataaaagtgcacacacacacacataaaaagatctacattcca

SEQ ID NO: 655 - DNA, 2558 bp, Homo sapiens
  misc_feature (1424)..(1424): n equals a,t,g, or c
agcgcgcccgactattctcgcagatcaccatggatgatgatatcgccgcgctcgtcgtcgacaacggctccggcatgtacaagagccggttcgcgggcgacgatcgtccccggaccgtattcccatccatcgtggggcgccccaggcaccagctagaggagctggctggttggtacatccccgggagcgggcgggaggcaagggcgctttctctgcacaggagccttccgggtttccgggggtgcggtgcgcccgtgctcagggcttcttgtcctttccttcccagggcgtgatggtgggcatgggtcagaaggattcctatgtgggcgacgaggcccagagcaagagaggcatcctcaccctgaagtaccccatcgagcacggcatcgtcaccaactgggacgacatggagaaaatctggcaccacaccttctacaatgagctgcgtgtggctcccgaggacaccccgtgctgctgaccgaggcccccctgaaccccaaggccaaccgcgagaagatgacccaggtgagtggcccgctacctcttctggtggccgcctccctccttcctggcctcccggagctgcgccctttctcactggttctctcttctgccgttttccgtaggactctcttctctgacctgagtctcctttggaactctgcaggttctatttgctttttcccagatgagctctttttctggtgtttgtctctctgactaggtgtctaagacagtgttgtgggtgtaggtactaacactggctcgtgtgacaaggccatgaggctggtgtaaagcggccttggagtgtgtattaagtaggcgcacagtaggtctgaacagactccccatcccaagaccccagcacacttagccgtgttctttgcactttctgcatgtcccccgtctggcctggctgtccccagtggcttccccagtgtgacatggtgcatctctgccttacagatcatgtttgagaccttcaacaccccagccatgtacgttgctatccaggctgtgctatccctgtacgcctctggccgtaccactggcatcgtgatggactccggtgacggggtcacccacactgtgcccatctacgaggggtatgccctcccccatgccatcctgcgtctggacctggctggccgggacctgactgactacctcatgaagatcctcaccgagcgcggctacagcttcaccaccacggccgagcgggaaatcgtgcgtgacattaaggagaagctgtgctacgtcgccctggacttcgagcaagagatggccacggctgcttccagctcctccctggagaagagctacgagctgcctgacggccaggtcatcaccattggcaatgagcggttccgctgccctgaggcactcttccagccttccttcctgggtgagtggagactgtctcntcgctctgcctgacatgagggttacccctcggggctgtgctgtggaagctaagtcctgccctcatttccctctcaggcatggagtcctgtggcatccacgaaactaccttcaactccatcatgaagtgtgacgtggacatccgcaaagacctgtacgccaacacagtgctgtctggcggcaccaccatgtaccctggcattgccgacaggatgcagaaggagatcactgccctggcacccagcacaatgaagatcaaggtgggtgtctttcctgcctgagctgacctgggcaggtcagctgtggggtcctgtggtgtgtggggagctgtcacatccagggtcctcactgcctgtccccttccctcctcagatcattgctcctcctgagcgcaagtactccgtgtggatcggcggctccatcctggcctcgctgtccaccttccagcagatgtggatcagcaagcaggagtatgacgagtccggcccctccatcgtccaccgcaaatgcttctaggcggactatgacttagttgcgttacaccctttcttgacaaaacctaacttgcgcagaaaacaagatgagattggcatggctttatttgttttttttgttttgttttggttttttttttttttttggcttgactcaggatttaaaaactggaacggtgaaggtgacagcagtcggttggagcgagcatcccccaaagttcacaatgtggccgaggactttgattgcacattgttgtttttttaatagtcattccaaatatgagatgcattgttacaggaagtcccttgccatcctaaaagccaccccacttctctctaaggagaatggcccagtcctctcccaagtccacacaggggaggtgatagcattgctttcgtgtaaattatgtaatgcaaaatttttttaatcttcgccttaatacttttttattttgttttattttgaatgatgagccttcgtgcccccccttcccccttttttgtcccccaacttgagatgtatgaaggcttttggtctccctgggagtgggtggaggcagccagggcttacctgtacactgacttgagaccagttgaataaaagtgcacaccttaaaaatgaggccaagtgtgactttgtgg

SEQ ID NO: 656 - DNA, 216 bp, Homo sapiens
gggggccacggcgcgcgcccccagcccccgggcccagcaccccaaggcggccaacgccaaaactctccctcctcctcttcctcaatctcgctctcgctctttttttttttcgcaaaaggaggggagagggggtaaaaaaatgctgcactgtgcggcgaagccggtgagtgagcggcgcggggccaatcagcgtgcgccgttccgaaagttgccttt

SEQ ID NO: 657 - DNA, 231 bp, Homo sapiens
ggtctctgttcctgcttattggggagttcctggcctggcccttctatgtctccccaggtaccccagtttttctgggttcacccagagtgcagatgcttgaggaggtgggaagggactatttgggggtgtctggctcaggtgccatgcctcactggggctggttggcacctgcatttcctgggagtggggctgtctcagggtagctgggcacggtgttcccttgagtggggg

SEQ ID NO: 658 - DNA, 231 bp, Homo sapiens; identical to SEQ ID NO: 657

SEQ ID NO: 659 - DNA, 968 bp, Homo sapiens
tcccctaattcccagagcccctggggagaccatgggctgcaggagagcagatgagactgtggctgggtgtccagagctgctgcctgctccggcaccttcatggaatggcattggcctcaagtcctcgctgcctcttactggctgtgtgaccttgggcaggccaggtagcctcagcttcctagagaatgtatgtaatgggcttggcatacagaatatggcacatagtaggtactcaactattattattctgtatttaatagctaattggctggcatttgctcagcactctgcatacattgggccattgcgaggtctctcgcctgcatcttagtttgctaattaggtgcttatctgggaccttcctggagcaggcattctctgctccattctctcctctgtacgcgtgacagccccaacccttgttcccccagcaggagcaaaaggggttgggtatgatgacctccagctcaatgtctaaggatctctgggtttcagtttccccctcggccagctcctcctgcccctaccagccacctcccaagctggggatttcactggcccacctttgttccctgcagaatcctagagtcctccagcccttccctctctggccttcacactccacatcctcagcccagcacaggagccaattttgcaaagaggtaaagagacctcaccactgctgcaccagtctgtccatttcctagcaggcaactggcacttgtttggttttataaattaaggtttcgattcttggccaggcgcgatgcctcacacctgtaatcccagcactttgggaggccaagggtggtggattacctgaggttaggagttcaagatcagctctgccaacatggtgaaaccccatctctactaaaaatacaaaaattaaccgggcatggtggctcatgcctgtaatcccagctactcaggaggctgaggcacaagaatcatttgaacccaggagg

SEQ ID NO: 660 - DNA, 255 bp, Homo sapiens
ctttgggaggctgaggcaggaggatcacgaggtcaggagatcaagaccatcctggctaacacagtgaaaccctgtctctactaaaaaatacaaaaaattagccgggcgtggttgcgggcgcctgtagtcccagctactcgggaggctgaggcagaagaatggcatgaacctgggaggcagaggttgcagtgagccgagatcacgccactgcactccagcctgggccacagagcaagactctgtctcaaaaaaaaa

SEQ ID NO: 661 - DNA, 8473 bp, Homo sapiens
gctctacctcccgcggccgggactaccctcagagccgcgaccgccgcggcgtgcgtcccgggcctgcaaaactgtttccaaactgcccgggccggaggcgggcgcgcggggcccggggagatggctggggtctggggggccgagggtgtgtgtggacgctgggagccgcggggggaggccggcgtcgactcagaggagttgcaatcgaggtatctgcgctccggcttcctcctgcggcccgcgaccccctccccggagctgagctggggaagggagaccagggttcaccacgttagcattcgcattcctgggaggatgcagccctcgcctggacctgggcgatagacgccttcttctgtttttatttttggaggggagcgccctgtaattgtcctgaacacatgcttcccccccttcctccagccacccgcggaggagagagtcccccttttttgcatttatcttttccttcccctttctttattaaaggtccgggagtggcggcggccaatcagcgcgcggcttccattttgtgagttcaactccgaggctcccgggcttcgcgaggacgcgtttgcagccccctctgccgctcctctctggcggccgaggcgcaggagccgcctcgccggggctcggagctggtgtagctcatattggggctcttttcggggtttgtaatttggccgtgggtaggtaattggctggagcagggcggcagggcgcggcagccaatcagcgcgcggcttctatagggcttgagttattagacgctgatctcaaaacatccttcatcagacacgaaggagaggccaacagatgagggaagccatttttctgcaatggaattaaatggccaagtgggtttttcctttgttgcaaatggggaatgtttttcctttgactctaccatccagttcaggacgtctcagtgtgtttaacatttgtcaacaggcccaaggactcacagttggaagactggagaagactttttaaaaagatctggatttttccttatgacttggaatccatctttgtcttgtataactaggtcatagcacaccattcatgtcagcagttaacagttttgaattccaaaaaaacctaagtaaatgacatattttttttcctctttttgttctatgggtgggtggggggagcttggagctgtcttaatctgtattctcttgactgaacaataaatttttaaatatatctagtttcctctattaaacacttaaacctggccatcttattaactccttctctctttttaacaaggtaatgttttaaatgtatatagctttaggactagcgaaatggcagcaacaaaaaattgtgagcagttgttactcttttagtttttaaaaaaccttttacattgtaagtacccaatccattctgtcctgacgcagtacagttttgatgttaatgttgctgagatgtccttaattttccgaaccttcatctgcatgtatgtctttgtctctcttgtctaatataagccagttaagatgcttgagacgatcttgctttataaagctaaggttctagctttatgcttttgaaaatgtttacagcactaaatgctagtcagctttcttccccgtagcttgtacactttctttgaaaatcgatctatttgaagaaaaacagccctgtttttctcgtctttggtgttgggggttggggggagctggtgggtgagggaaaggaagaccttttctttgtgtagagagactaaagccgtcacaggaaactagattaaaactggaaaacaagtcctagctggttccagcaaacaccaacgttaagtggggggtattttctatggtggttgggcggctggtgcgtcttgtgccttttgtttgatttgactgtattttcgccttttgtctcttaatgacgatcacaccattgctatatccagagcagtaaacagtcctcagcgaagccgcctttttgcctacccaaccctggaaagtttgcagaagtggaaggagcagaacgtgagggtgtaacttacaaaaaggtaataagaacaaagacaccaccataacccccaaatttcccaactaaatcaaaaaatatatatgtttttacaataacgtctccaaaaccaccgcccagcttgatcttctagactccatggcaccgggctgagcgggtaagtaagaaagataaaaagtgccttttgccccttcgaggaaacccttttgcaggccaagcaagggctgcaagtgtttgggagctgagaggagaaggaggattctggagcattgtatttggcagccggagcgggcagtgggcggggggttgggacacgaagggctcttcggacccctgtgcctcttctgccccaagggcgagaagacgggcttcgcagcgaccctcgggggtccatggagccgcctgccttcgccccctcgctcttcccaggtctgaacctggatggggagaagaaattgaagtgctttggagacgggggggcttaaaacactagggagcctcatcgcccagccttgggcccactttcctttcgatcgtgaggattccgcaccccgaagccggcttctcggggctccggggcgcgcctgcgctggcaacgcgaaggaggacaaaaggccggcgtccatgttggcaccatgacgcagcatctccgcccgcagcccggagctgctgtcctcccggccgcgctcgctcctcctcccaaacaccagttttctttacaggcttcgagcccgtcgcggctgggccgggctggtctggcaggcgggcccagccgggcagggctgctttgctaatggcggcggctctctttccttccttcctcctttcctccgtccccccggtcgtggggagcccggagcaggaggcgggcccgcggccaggtcgggccccgagagcccgcggggcgcagcgctggcgaccgggtgtcgggggccgtttcgggggccgtgggcctcgggggcgtcgcgcgccgcgcctcccgcgctcgcctcagccgggcgcggcggcctgatgggcgccatttcgcgcgctgcccgtggctggggcggtggcggccgccgcgcgccgggcgggaggagcggcaggggtagggggctgggcgacccggcggcccacgcgggcaccaggaggcctcgccccggaccgcttccctctttcgtctttgtcctgcgcgggcgcccgcagccgagggccacggggtcggcggggcttcgaggccgccccgggtcccaccggctcctccggaagccgcggaccggcctggccctgaccccaggccgccccccgctgcccacccagctctgggcgcccaggtccgacctcccagtcgccctctgagagccgagtcagcgcggggcggggggtcgccccctttgtcctcactcagggcgggaggccctcggggtggccgcagacgccccgttgggcagccctccagcccagctctccaggcaggaggtgggggaagcctgggaaagcggagggggggccccgggatcccccgaggcgcggggctcccggcgaagcctcagatctccggcccttcccggggagggtgcgggcggggcgggcctttggaaatgcagatgagccgccgcccgggccggggttgaaccttctgactcagccacccccggccgcccgggccgctgggggaggggcggcgtctggggtgctccctttcagccccggagcccgtctgctgtgtattcggccggtcacatctctctcccccaacgccctgatccgccctccaccttcctctcctccaggttctgggccggagaaggggcgacgttcgggcaccccccgaatggacaatctttccttctgtcaacggcaggggcaggcctagtttgactctgacagtcctcccactaaggtaggtgtgagtacttgcccagaccgtgagggagatttggggggctctggcctgcagcccagggagggccgaaccccaaacacgccgggctggttctgcgggcccggcccaccccacccccccccccccagctgcgagcgcgtagggccgcctgctgggccgccggggccatccatccccgtctgtcagcttctgttgtcaggcatttggggcgtgtaagtctctgccgaatatagcagcatacgagaggatccacttgcaagtatttcccagttgtgtgttcttcggcggggggagggccctgggtgccgcctacttctgaaagacacaggtcactgtcagaaagcccaactgtgctgtggccttccctccagccgcccccgtggggcatgtggggtgacagtgtgagccgtcctctgatgtctggctgctagagaggcaaagaacagagacccgaggttccggccacctttctctatgaaagggccttccttgacgcttctccaccttcctgggattgttttcttctccagtccccgaatgggcaggcctgtatataagccttgtttctagaaccagacaaagctggatttgaaacctggcgagccattgaacagctatggccttgcgtaagcggtatagcctccaagcctatttctccatctccgaaaacagggctagatcagtggttcttagtctggaaccggcatcagaatcacaccggaaggggggctcactgaaaatggaccaccgggcctggtgcccaagtgtctgattcagtgggttggtccttaggactggcatttctaacaagttcccaggtgaggtgaggctgatgctgtggtctgggaacacattttgagactccagcccctagcctggtaacacctggggttttgacgcagaagtgccacgttccacgcttggcacatagtaattgatttcattctaacgctagccgacttcatgtattgaatagtttcccatctcagtgtctaagaagctccacagctggagatggcggcccttggtctcggagcccccctccttgtgatttctgctttgtgattgctttgatgaaccatttgggtccaggtgctcctgatcacaccacctcccctatttgggacttgtgccccactcccgctgtgagggctacaccgagctttgggggcctgttcggattaacaaggagatcttgctaaaggtatcttggtgctaagttaagggagatagttcgccatgggctaggatctctcagtgctggtgaccttgggtgagtgtctccctgtaaagtgataaggatgcctgctggaaagggtggtgggaggattaagtgcgttaaagaggccctcctcccaagcttttagttggcctccattgtgatcgtggttattgctgggagtggctgcagggggtgggggctgggctgcctcagagcttccccccgcaccagcccacctgctgaagcacgtgtccctgcctcagggcaaaggggaatctggcgctccctgggaaggcggccaacgcggttctcctctggagtggttgagtccagctgcaggcctttccccatccacaggggctgttccatgatggggtcaagatttgggtcacccacccatggtccggggagaagtgactccccaaggtcacaaggccaccaccaatagagccaggatggggttccaggtggcttgacttggcagccagcgcctgtgcccatggcaccccctcaccccagctgtctgggttattttgggcttcctcccgtgccagctgtctgctggcatccctgcccgggactgtctggttggaagtaactggcgtggtgctgttggctcctcctgtgagggccagggctgggtcttcaatccccgatgagccgtgctgggtccagctcctttgctgggagggaagagtgttcctgcccagactccccgctgcccaagtacagcaagagggcgaaagcacctgataaaaattgaggttcacattgttaatatcccaaaagcctcctccttctatactccctgaaacctgttttaaatttggctctgccattgaaccccgttgctctcacgttaccctctgccgcccgagggtgtggcgcctccctttagagtcttcgttgctctccgggtggggtctttactccccacctgctttggataattaagtaattgatgtacgtctccctcccagctgcaccctggagggctccagccagtttctcccctccctggatccaatcagtgagctgttgggtgctcagctgtggtctggatgtggttctcggcacggtgtcgggacccacctggctggactgtacccctctctctctgctttggtccctcttctttctttgtccccccaccatcacctcttggggcagggagggtgaggcagtttgtcctcctgctgctgttcctgctggtccctcgagggcgccccgcccaccggtcacccagcgaacgcggggcggggccgctgctggcgctgggccccagggcttgcagagagagggccacgccagcggaagggccggccaggaggtggcaggacttgccttactactgagtcgccggcatccccgcctcttccggcctctccgcccggagccctagcgtggaacatgacctttcggaccctctgggtggagacacagcctctgcctgggctgtgcagtgaggtggcaccaccatctcaggtcgtctggcccagtgcatctgtagctggcatgtgacttccagcaagctcctgcccctgagcgctgggaggagcaggtccagcaataatttttttttttttttttttgagacagagtttcgctcttgttgcccaggcaatggtgtgatctgggctcaccgcaacctccgcctccagggttcaagcgattctcctgcctcagcctccgagtagctgggattacaggcatgtgccaccacgcccggataattttgtatttttagtagagacagggtttctccatgttggtcaggctggtctcaaactgacctcaggtgatccgcccacctcggcctcccaaagtgctgggattacaggcatgagccaccgcgcctggccggacaataatgttttgagctgttgctgagtctggcttttgtgacgggaacttttagcactcaaggagtggccttgtctctggcctgtccccgagtgctcatgggcagccaaggcctggggactgctcaggcagggtagatgtatttgccaggccagctcccgtccctgggacctcagggagtagcttcatccctgaaggctgagtgtcttctgcctcatgtgggtggcccctctgcagggttctcaggcatccagggaagtgggtgccacagcgttgcctccagcctcactggggctggctggactttgctctgacaacacagcagtggctgggcccctgcaactctccagggctcagtttccctgttggccgcactatggcataggcccctgtgtggacaccgatgagctgaccccacaaatgccacccggccgctcccccaggcttcagtggcctaacagctgttgtgtcaggaaccagcttaaagaatctttcttgctttctcaaactctccaggaattcctggtgactggaagggggagtgactcaggccctcaacctctagcaggtaagggagctacctcctgggtgggcatgcccagttcctcagtgggcccagcgcggcccagcctccgaggaagctctgagcagctggcttggctccgaggtatttttagctacagatccagcccccctccatcaccacaacagtcgagtccaaatcaaacgcgctccaggcaggtggggctggggttctgccagcctcctggccagcaggggtgggtgggcagactggggccagtatcagctgttctgcctggacccaggccgggctgggaaggcacacttgtgcttatttcccgcctccacttctgtgcaagcttgtgctgtcataagcagagatcacagccccatttcttggatggagaaagtggacactgaggtctgaggcttttgaggacagtcaggagccctcctatgggctccagtgatgcactcaccagcttctggtcctcttcttccacctcttagagtgccttggctccctcctgtcgtcctggggaacctcggccccagccctgcctccccagccagtcacagctcctccctggtcaccctgagggagctcagggcccggctggtagctgggttgctctgcttctgtcccccactcctgtggagcctggcaggcaactccatgatctgaccccggttaccttgacagccctgcctggcctcccctctcatggcccagccaccccagaacctgaagaggttttctagctgccgtgcatttgccaggctgggttacccaccctactttccctgcctgccctccagtgctgccaggcctagtgtgccagccagcgctcagccttcagtaaagggttcccctgcttccaacctccattgcactgcttcccctaagactgtgacctcctggaaggctggagcacaactgcctctcaataaacgtgttgcaaaaaaggaat

SEQ ID NO: 662 - DNA, 438 bp, Homo sapiens
gatcccactctcggccatgctctcgtgcctgtctgccgtggaccggctccaggggggggtccctctgccaccctgtcgactcatctgggtggtgcagagggcagtcagcccgcccagggtgaggagtaagaggaggggtgggggttacgggtaattcagccagcagccctgatagcactgcctacagtaagtgctcaacaaataagctgttttgatcaggggatgggagagttggggggattcctgggatgaaggacatgtggctgctggcaaggaaacgcattttcttacatttcttggtgggtgtggggttatcagtctccaaagctccaggagagggaccaagttgacttcaactagagctactccaacctgcccctccctgacgacgtcttgcgtggttcacgcctctggctcctgccggaaggaggcggccgc

SEQ ID NO: 663 - DNA, 6195 bp, Homo sapiens
gtgttttctgcatcccctttttattctgtaagttccacctgttatattggctttcctagccccattgcttccgcatcttagctagtcatgctaaatgcttgaagggggaaagggagatacaagatagacaaaaccagtcccagacagatggacagacacggtggtacctcatccatcttctctgaggtcggggttctgtctccaaccaggtccaaggccacctcagctgtctggctcagaagcccagcagggtccggggggcctggctcaggtggaggccgaggcccaaggcccaggtcgagctcctcgtcctcgtcggagtctgggaggggtgttgggctgatatcctccaggccggtgctggaggggcgtgacgaggggggcgtggggccccggaagcctggctgggagttggtgccaaagggggccagtggggagagctgggaggaggaggaggagatggggctgccctccatctgcagctcggtgtccgagtccggctccctcaggaagagcagcttggtgcgctgctccttcagcagcatctcgatgcgcgagtccaggctgtcgtggggtttctctggccctgcaggggacgactccagcgtgggcgtgccagggctgtcacagggctcaggactccagccgaaggtgggccggccgcccagctccatgctgttggtgtcggggggcggcgggccgggtggcgtgcctggcttctccttggccagaggctcagcaggtggcaggggtgggggcgccggtgccctccggaactccccactgtcgcgggccccaaaagcggctgtggcggtgggctcttccgggggtggagggaagtgggccactggggtctgatacggagagaaagcagacttgaatccaggagcaggggttgcttgggcgggtggtggagtgtgggcaaatgtggctgaatcctgtggttgagccttgaacgggggaccgctgctgcccccagtgccgccgactgctccgaacgggaggtccgaggaaccccggaaagcggctgtggccccggccaccgcagtgaccgcgggagaattgtgtacataatgatgttcgtggcggcggttgtaggcgtccgtgaacttgctctcgtggcgccgggccttgaaggtcactgcagggtcctggctgaagaggtatgagggtgtgggctggcggctggagtagctggagtcctgtgagaaaggggtgcccaggcgcggtgtgagcggggtgccctgtccataggagttgggtgtgtccaggcggcagctggaataagctgtgtcctgggagaagggtgtcccaccgctattgggggtgacagaggaggagccggagccacagcctgcagacaggcctccatccttgaggcgcttcagggcatctgacagctaaggagagacagagatgtcagaccactgggggaaaacatgcaatggaacagggctattttcccttctcactctggctgctgggaagctcagagccaaactgctctagaactgcagcataaggaatggaagtgggggagattgaggaggagtgtcaggatggtactaactttttctctaatcttaggggtagccaaatatgttcagggaaccttgagggtcattcctaattccagaggaggcagagaaaaaagaagactgtaacatcttggtttaggctgggattttctttctgcctcaggctgtcagaaatcaaagaccttccaggcaggattatgaccaagaactacaatcttgtgcacgagaggatggccaagggctttgtcctcctagtcacccagtgctttaggatttaaagtgataaacagaggccaggcgtggtggctcatgactgtaaccccagcactttgggaagccgaggcaggtggatcacttgaggtcaggagttcaagaccagcctggacaacatggtgaaaccccacctctactaaccaaaaatataaaaattagccaggtgtggtggcgtgtgcctgtaatcccagctactcaggaggctgaggcaagagaatcacttgagcccaggaggtggagcttgcagtgagctgagatcgcaccactgcactccagcctggggacagactgagactctgtctcaaaaaaataaataaaacaaaaaaaaagtgatgaacaggccagtggcagctagtcagcctgatgccagggaggagctggcatgagactcgccccacgcgagagttgtccctgtgtcctggaaggcagtggtttggaaggagtcagccttgctctggaaggcagggcatgaactctggtttctgggtttaggggtagtggcatgcccaggacaccagacactaaggaccccggaaacagcaatgtttggcatcaacgtggaaaagcgggccagggcaggctctgggtctgtgggaatcacagcctgtgctggggaggggagaagccacaggaaacagaaccaatcccatggagccctactgcaggagcacttgggaaaatggggctctaggccctgctcccaattgtggggggcgtggccaggcttcacaccctcctaggccttggtctccaaagctggagtgaggtgggggtaggctgggggtcccataagagagttggtgaggctttccagaggtggggggcacatcaaagagctggcgatggggcagactgacggccataaacccacctgcagggtctcattcacgattggagagacagcgtccagctcgcccactgggagggtctggggggtgtatcggccagtgaccaacagttcatagaaccgcattcgggtttcccctgtagatgggcaggaaagggggaactcagtgaggttccaggatggggcagcccccacaaggattccaacctgtgtggcaccctggtgggtcccttgtgcccgagaccccagtcctagggaggctgtgtggccctgagttcccacccctctgcacctcgctcagggtccccacctcttcaacaaagctgctgagctgcaccatttttctgatcctgagatccagaagctcatgtctcctggggctgagactcccccaaacccaaacccagaggtgccacccgcgacgcccagcccccccccacccctgcattacctgggccatggcacccacagagccaggtcttcccctttctgctcaatacccaggggcttgcagtaagaggaagggaagcccgtgacacagaagccagagtttgttaaatatctggggccaggtgagcagcagagtttgcaacacgctctagtagcacattactgtgaactccacaggccctgaccaggctgagggccccagggtggcctggggactaccttgggcttgaaccctccacccctcagcagaaggaggcttttatagaccagggcccaggggttatcgatatttatagagcctcagaggcagctgcttacatatgcaaaaaagacacgttcctggagctacactttactggtctctttcttgaaatacaaacttagttggcagtctctgagggcttttgtgttttttttcttttcttttcttttctttttttttttttttttacagaattgaaattttgttgagacctggctgctccttaaaatgtgggcacgtgataggaaaggggttaccatgttcaattcaattatcagggagaaatcgtgctgcagccacccaaggtcctcactgcccccccaacccccagagactgagaagctagggaaaggggtgggagggactgtggactggacagaaaaagagggctgtgccctgagaggaggaacagaaccgggcacaggctcggcaagtgtgcgtggaataactgccaccaccccccggcaccggcttagagctcggtcaatacattttaatcattaaacgcaaaaaaagaaaagttctgattttcctgccttgggtttggtgtgtcccagttgtccctgaacgccatgctcacaaaattcctggaagctgcacttttgccctcccaggcagggtttcccaggggaccccggtgggctagggaccgaatgacatctccccacaagctggctggccctcaaagcactcggcaccttcttttataggtgggagcttccctaaagaggcctcaggcacactttggggaatgccctcgagtcctccaagccccttggtcctgcaggggcctccgaagacccacagggtgggaggtatggcctccccagccagctccagagagcacctagctgattccagagcaggggaggtgctgcggtctctttaagagagaggagggaagacacagtgtcaacccttgagcacccagagccgcctgcctggctcttccctcttcccggctctgctcttccccggcggctctgtcgagaaccttatcaatgaaacaacactcctggccccagattggctgccacttccagaggggaaggggcagcaaggaggtggggggacaccctggatccttagaggactctcttttcagttttcagaccttctcttgatgtatttcaaggcatcctagtggcacttcctcagtcccccacaagtaaacaaactctgtctcctcccctaacacaggcaacactggggactgtctaaacccaagccaccagggctcagagagggggcccgcgggggtgtcagcggtggggaagcctccgggtggtccctaggggtgcggtggccaaggaccggcacatttggtaaattacagactgtctcctagcaacagacaacacatttagctccacgcgactctaccctcaggagggggctaagaaataaggttgtggggggggatcccaaggaagagtgagggggggtcctccccacgctgcaggaagggtggggagggaaagggtcgggctgacaggtctccccacgctcctcccctgccaggctcacctttggtgtccagctccacgtggataatgttgcccatgacggaagtgctgtgcaagtgctgaacggcatccttggctccccggaccgtggcaaagaccaccttggcgatgcccaggtgcttcttggtcttggggttgtacaaaatctccacctcctccacctccccatacttcttgcacatgtccctcaggaagttttcacggatgttatcattcagcttggcaaatgtcacctgcttcggaggcaccgggcccacgtagaactcatcgatctggcaggggccgagggggaagggagtttgaagaacgtttaaacctaagggaaaacacaacatcccccccgccccgcccgcaactcgcccacccgttgaaaacaataaagggtaaaaaaactaaaaattaaaaaaaaaaaaaaaattttttttggaaaaaaaaaatgcacgcgggcgggcccgggaagcggaggattaaatcgtttggaacgtggaagtcctctgggttcggaaggaaaggggaaaaagaaacagtttctctttccccacccccctttctggccttctcttcctgctgccgggtcaggggcgacccctcaggcttaagaagttgtcctgtagtgggctagcgagaggggagagtctcggagccgagccccccgcggggcgtgcaggacactgtatctgcgccgtgattacagtttcacccagtgttattttgttttcagtagctgagaggggacaccctctcgccagcgctctacccctccccgccaaaacttccctggccccggacggcgggaactgggaatccggctgggctcggtcaggactggcgttattttcgaactcggggaggtgggggagggacggcggggcagtggggaggggtcctaccttgaatttgggcaccgacagctccagctccttgtttttggtccagatcccgacgacccggggatcttcgacaatttccaccgggcggttgctggacatctgtggggagaaattggggggccgggatgagagaactggtccccctccccatgggcagacccctttctcgaggcacttgtcaaactccagggctggggccccgtctgacagttggccgggggatcgggcggggggtccctggccgctaggcgcgtctccccggacacgacgcggggcacggctgggggggcgcgccggctactcaccgccaggctgaaatgctgcccatcgtagcggtacagtttatgatgcccctttttcagagccgggtcaatcatcaacttgtaacttctccaatggtggttcctcc

SEQ ID NO: 664 - DNA, 20501 bp, Homo sapiens
ctttcccatggtttggcatggacattgggggaactctagtaaagctctcgtactttgaacctattgatatcacagcagaggaagagcaagaagaagttgagagtttaaaaagtattcggaaatatttgacttctaacgtggcatatggatccaccggcattcgggatgtacaccttgaactgaaagatttaacactttttggccgaagagggaacttgcactttatcaggtttccaacccaggacctgcctacttttatccaaatgggaagagataaaaacttctcaacattgcagacggtgctatgtgctacaggaggtggtgcttacaagtttgaaaaagattttcgcacagtaggtatcttttactcaaaactgaaaattgatacctgtttttaaatatgagagtaggtttccatctagcatgttccttaattctccctgcacatgcagtgggaaatatgtatccatggttgcctttcacttggggcgttttaaacacgtttatgagatgagtaaaaattgcccggatttggtcatgttgttgcacataatatttggtaaaacttgtttagggctgtactacaaagctacaataaaaaggggatttggggactttaatgaatttggcagtgtacaaagccagatataaatgaagcttgaattattttcactattgtcctacatttacatggtttttggaatattacttattcaaataatattaatcttccagggccatctccttcccaaaccctaagtctggaaaccaatgtcttttggttagtataatggacacctgaatgaaaatctgttacccttttttttctgtttttatgctgttaatcctgccatgttcctgtgtcaaatggggtgatttgaatggatctggcaggagaactatgagtattggtttgagttatgtgctgttagcagtttgccatcttctagtcttttccattagaatgagagttcaaagagtggtttgccaagcttctagtcttttctattagaataaagaatggctctgtttaggaccactgaaatttgtttttcttgaaaatgtaaatgtgaataatttaatttctgaaaatcataagaaaatactgttaatggaatataaaggctgacgtgggaggatcacttgaggctaggagttggagaccagcctgggcaatatagtgggaccccgtctctacaaaaaataaaaaaattagctcagcatagtggcctgtgcttgtagtcccagccactcaagaggctgatgaagtgggaggattgcttgagctcttgagattgaggctgcagtgagctgtgattgagccattgcactccagcatgggtgacagtgagaccctgtctcagaaggaatataaataacttaaatggctcatagaagcgagacccatataatttgaggtaaagatctgtagtactgtatgaaaagaggtgccttgggaacacagaggagtaacaacagctagagagttgaagaggttcccagaggaagtgatatctaagctgcaatgttttataaacggtgtcttataatacgctttttactaacctgaaatgatgaatgtaatcatttcaaactagtactcaaactataatataaagacaggagattaaggtatcagttattaatcagaaattaatctatccgtgggtagattaacaaacagtatgatcattccagaggacatcatgaagtagttatatgcttgcacctatgcatagattgatcatgaataccaaagctacacatgccagattgatatggtatgttctgttggaaaataagataccataaatggcattgctgttggtgacatgaccctccaacatgctaaacaaacacttggtaaaattccaaacagtaagaagtacaattttcccttgctttatgtggtggttcaattcctagcaaatttagtatatatttaaaactacgtgggttgggcacagtggctcacgcctgtaattccagcactttgggaagccaaggtgggcggatcacttgaggttaggagctggagaccagcctgaccaatgatggtgaaacctcatctctactaaaaatacaaaaattagccaggcgtggtggcgggcgcctgcaatcccagctacttgagaggctgaggcggagaatcgcttgaacccacgaggtggaggttgcagtgagccgagatcatgccactgtactccagcctgagtgacagagctagactctgtctcaaaaatgaatgaatgaatgaatgaatggagtgactgaatccataggacgaatacttttgtatttgtatacacagacagataggtaaaataactttgttattctctagcctcagataattataaataattttcctactgccactataaaaatgactggcagaacactcaaagataatgcatagatgggataattttttggtctgcagaaatgtcacacccattaaagatgtctggcatcacaagtccctgcccactaaatgtcagtttggtccttccttcctccccatcatttagaaaactagcagtgaggtgataccaccctcactgaggaccagtggactagatgaaatcccgaaagagattctgacatgaaacaaaatgaaaatgtgggggtcatagaccatttttaatttttgtaaagtaatacaggaaaatcatatagttgagtgtttttgaatgtcatccttttttgtttttgtttgtttgttttaacagattggaaacctccacctgcacaaactggatgaacttgactgccttgtaaagggcttgctgtatatagactctgtcagtttcaatggacaagccgagtgctattattttgctaatgcctcagaacctgagcgatgccaaaagatgccttttaacctggatgatccctatccactgcttgtagtgaacattggctcaggagtcagtattttagcagtccattccaaagacaactataaacgagtgactgggacaaggtagtgacctttttggttgtattgctgcattcacattgttttatacacagaagttatgaaatcagtataataatgtcattttcaccagtaaaagagcatgtatttgcacaacagcaaaaaaaaaaaatatatatatatatatattttttttttttaagtgaaagagggtgccatgttgcccaggctgctcttgaacttctgagctcaagcaatctgcctgtctcggcctcccaaagtactgggattacaggcatgagccactgctcccagccaacagataatgtatttttataagatgtgtatgtcaagactcaaactgaaattattaaatgtttattagtcagcatcagttgggatcaaaatttccataatggtaaagtgaatttttatctagaatgagtctggtaacgttttttctagaatttaactggagcatttacttggaagcaacagtgttctattgattttaaactttattatgtttatattttgttcttttttccaaagcatttttcttctttacctattttttgactttttaatggatattaatatatgtaaacccttaaactgcagtactggggaacattgtaatttattcttataggatgaattaatgtgatttctttttgtgataacattaatgttcccaaatagcccacatacttttctgtaatacctgaaatacgaatgagaaataagatataaaactcatgattcttttatgtattttatcaacttttacagagaggtgaagattccagtttaaggaagaaagattttcaaatactttagattaatttgtgaaaaaaactcattttaattttaaagtagtaattctgtttaaattatacttaattagtactttatttttatggtggttaaaagttcacctctgttgtaattctctatgccaaagaattgtacactgctattgccttcttcggttaactctaaaagaagttcagtctgttaactaaatccaacagtgattcaggggtagaacttgctagaaatttagatgagactagggagcaaaggtttacagtttaggaattagatatgatttcattctgtgagcatatccagaagaataatagaagcaaataaatttctgtaattgacatgttggccagctggacataaatttactcattgtatttatgtgtaggtcatgtgaaatattagtgtatcatattgaattgatttcatccatgtcaggccaagtaaagaagcctttcccaaaatcatttcttggaaacgatttaaaattacaaagatgggcatggtagttcatgcctgtaattctaacactttgggaggccaaagtggaggattgcttgagaccaggagttaagaccagcctgggaaacatagtgagacccccatctctacaaaaatatatacatatatattagtccagtgtggtagtgtgcattgtagtctagctgctgcggaggctggaacaggaagattgcttgagcccaggagttcaaggatacattaggctatgatcatggtcactgcactccagcctgagggacagagtgagaccttgtctcaaaagaaaaattacagattttctctttgtaattaatatggtactgatttttaacatttattcctttttaatgcacacacaacaatttatctttggtaactacagagtgtaaggtattaggtgaagactttgggagagatttaataggtctttcctttcctcatgtttccaccaagtgatttttttctttggtttattctttgatctaacaagtttggttttactaaacaatttttgttgccttcgttatgttatttcagcactcagcattagtcataggttttttttctgtgtgttcattgaatacatgaatgatccacccttttactttagagaaagaatataatgtataaatgcaacttagcaagtttctttattttctttagccttggagggggtacctttctgggtttatgcagtttattgactggctgtgaaagttttgaagaggctcttgaaatggcatccaaaggtgatagcacacaagctgacaagctggtccgtgatatttatggaggagattatgaaagatttggtttgccaggttgggctgtagcatctaggtaagtttaacatttgtgttatttaagttacagaagttaagtaattcaagttgcttatgtttttggaaagcaatgtaacagaaagttgtaagggtgctttctcttatccagtttaggttccaagttttgaacattgatgtcatttaaaaattaagtatacattaagaagtttaccctgagtgcaccttgtaagaaacttttttttttttaatttttgagtgtctttccagtgtttatgcaaatacaaatacatatttttacttttctccccatatacaaaaggtaatctaccattatatggcatactatatatactctaaagtatccatatagaaatctttacatgttgttgaccttattttatacaggtgtaggataaattcccaaaagttggattgcaaatgcatttttgagatattgttaattatgcaaaagagcggtactgtttttcactctcaccagcggtaaatgaaagtgcctgtttcaccagtagagtgctaacttttgcatttttgctaatcagatggagaagtggtatcttaatgtaattttaatttacatttctcctaccaacactggggttaagagccttgcatattttattttctgtgagttattgttcatgttctacttttctgttggattgttatacagttgaatttatcagtcttttcttttatggcttctggatattgattcatagtaagtaagtcttctacattccaaatatataaaggaataaacccttattttcttctgatatgttaatggtggtatttttatacttaaatctttgatttacttatagtttatcttagggtattttgtgagttacagatcatgctttcatttttcaggttttttgtttttttttccagaaggccctaatgtctaataatccatctttatttcactgatttgagatggcttttttacatatgctggcttttcattctgttgatgtaccagcattatactttcagctttatagaggcataaaaagtatgttttaatctctagaagggctagtttcactcctttgcttgattttctgtatgaacttggcaaacattttctctattacaaaaatgtttttggaatctcagtaagtttacatattaacttagggacaaatgatatctttatagtaagtcttgctgttgaagaacttagcttgtctgtttgtttaaggctacttttgtgcctttcacacatttaaaaaggcctctccaaatatgtccatacatggctttttaaattgattcctaaatattttaaatttactgttctgttgtttatcagtcttgtctcccattatgcttcctaaccattgttgcttgtgcaccccaagttctttgtcagggaatccagtgccctttgatagtggactttgtctcactcttcagtaatatctcctgcctctcccttgcatagacgcttcactccgaccaaacatcttgtgatttcatagatgttttcatttctcatttctgtgtgcctttaacctttagttgcctctgcctaagatttttcttctcattttttctggctttttctggtccttttgctctgaaagccctgcctcataccttcttaacttttttctcttaccactgtaataaaagatatttttttgtttgtatttccaaggttagcctttgtttggggttagcctttgtttggattttttccctgttactgttagcgcttctcttgctgtcttttgtatgtaggcctgcattgtccattacagtagcctctagccacgtaaggcacttggcttatgagtgccacatgttgaattgatgatatttggatatattggcttaaatgaaatgtacaattaaaattaatttcacttgtttatttttacctttttaatgtggctaatagaacatatatgaaattatatattactcgtattttatttctattggacagtgctgcactagactaattcactgtttgagggactatctgtctccagcacaaagcttggtatgtcataaatgtttcttgtgactgaatgaaaaagaatttgaagttaaagctgagatacttttggaaacattttgtaattttggctaatttgttttgaatcaggtttaagtgaagatattttggtaatctttgctttcttataataactaactatgctttttttgagatgtcattttaaccttaattctttgaaaggtattactttactcttgcatagattttttttgttagtttgttttgatcttatccctatgtgtttctactttttggtcctaattttataaaaatatccaggttgtagatatatctgttaatacgtaaaatgttgctttttatcagcagatttgactttatttttcatttttctgcagttttgggaatatgatttataaggagaagcgagaatctgttagtaaagaagatctggcaagagctactttagttactatcaccaataacattggttctgtggcacgaatgtgtgctgttaatgaggtaaaaaaacaaaaaacacaaaacttgaattatcaaaaatgtgaattggagtcctatatacacctagcagggcttcttcactttccctaaggaggcctctgggattgagatgtaacccattaaatgccaagactcattaggtatatatgttacgtatccagttgctatattacttttaaagaaagtagcagataattcaaattgaaataggagaaatttattcagaattttttttcagaaaaacacaacctaaatcccttgaggatgtaaaagaaagttctaagcataagacattttgagatactttgtgaaagcattttttttagtcttaattttgcatttggaaggcagctatgctcaccactataccaccagtgcttaatgttgcatttgattagtgaaattcttggaagttttcttactgccctcggcttctttacagtgctgccttgttgcatatggatcaagcagcattgtacagggctatgaaggcattgagacctgttcttcatgatatttgagtggtgtttattgttacaagaaaagtgtgaaaaggatatactgttagattgaccatatagttgggattctttgtttggaagagaatatatatatttaattctagcttccttatataataatagatatatttgcccgtttaatttttataaatatcaaatactttaaatggattgggaagtacgcttttcgaaggaacccttcatttgttcattcattcatttattcattgagtaaatatttactgattaccagatgccagacatcgttctgggtatttggaacatattaatgaagaaaacaaagatctggctttgtggagcttgcattcattctagtgacatattaagtaaattgtgtagtgtgtattaggtgataagtgctatttttttaaaaagagaccatcaaacaggataaagaggattgggaatagggcagagagtggtagaggacaaattgctaagtaattgagtggttaaaggaaagctttattgaaaatgtgattcttaggcagaggtttgaaggaggtgagggggaaactgtgcatgtagacattttggggagaaagcttccagcagagagaacaaatatgcaaatcctctgaattattctgtatttaaatccagaacttggtctcatcagttttttaataacttagaaacttaagtgttagttggttgatggagttactagtagaccatgttgggagctgacaacaatttgagacctttattcttagccctttatgtctaaatttccactgaccaattgagttaacaataatttaggccatggtttacagtatcccaacttatgtacaaagatttctactcaaaagtcagtatagtgtgagagtcgaaataagttttctggtgattcaaacaccagttcccctttgtaagatttcctaatcatagagataatctaagaaaccaaattagtgtggaatctttgcagagagagaatgatttgatgaatcaggcaggggacggagaaagaatgctagaatcctaggggaatgcacatgccagtaccccagtcagtattactctccaattctgtagaatccacagttgcatgtcattgttcaacatgcattgcaatgtgtgggccaagtttgctacttatcaactaaatgcattttatagtacttaccatgttttgatttttttttttaatcacatcagtaatgtgtctccaaatgactttgtaagggggctatttattggccattttcaaaaacaaatctcacctgaaatcatctgctagagtctttctggaacctttttttaaaagtagactttattttttagatcagtttcaggttcacgtaaaattaagtggaaagctcagtgagttcccatataccaccttccatacacacacagcccacttccatcctcagcatcccatagtagagtgatcatgtgttacagtccataaccctgtgcacacatcatcatcacccaaagtccataatttagggttctctcttggtgttacacattttgtggattttggatgatgtgtgcagaactaatttttaaatattcaggattatacagctatatgccaggaatgtagtaggtgttatactaataaagcgtagttgtgtttttttgcattttaaaataaattttaaataaatatttagaaaccttttatattgtaaaatctattatttttacaagttttttctttgttcttttcttttagaaaataaacagagttgtctttgttggaaactttttacgtgtcaataccctctcaatgaaacttttggcatatgcactggattactggtcaaaaggtcaactaaaagcattgtttctagaacatgaggtatggtaggaaaatgttttttgtgaattttaatagcatgttttttaagagacagggtcttgctctgtcactcaggcttgagtttagtggcacaatgatggcttactgcagcctcttcctcctgggctcatcaatcctcccacctcagcctcccaagtagctgggaccacaggtatgcaccactgtgcccagaaaatttatttttattaatattttttgtggagacaggatcactctttgttgcccaggctagtctggaactcctggcctcaagcaatcctttataggtgtgagccaccatgcccagccttaagtagtagaatattggttccttcgcttcagtttcagttgtggggaagagaattacaataacctgttaggcacccccagatttttttgtattcatttactacatgcagttaagttctgatctgagcaattatcagtccacataatgttttggattaacttaacttgaatcattttgtgatcaaagtcaaatggctgtatcattacaaattagtaacagagattcaaattattctgctcttaaaagcttccatgtcttggccgggtgcggtggctcatgcctgtaatcccagcactttgggaggccaaggcggacggatcacgaggtcaggagatcaagaccatcctggctaacaacggtgaaaccccgtctctactaaaaatacaaaaaaaaattagccgggcgaggtggcgggcgcctgtaatcccagcgactcgggaggctgaggcaggagaatggtgtgaaccccagggggcggagcctgcagtgagtcgagatggcgccactgcactccagccactccagcctgggtgatagcgagactgtctaaaaaaaaaaaaaaaaaaaagcttccatgtctcattgtcactgctcacacaatacaaatcagaatggtgtgcccttgtgcaattccacatggcatgcagtgagagtgtcaggcacagccacaggaagttagtttgttttattaagtaaaggggagagggtgcagaattgctgttacagtcctggaagctttagtgtctaaaggccacacttttagaatacgtatttcagtgtgagcctatagtcccagctattcaagaggctgagatgggaggaccatgtgagcccaggaattcaaggccagcctgggcaaaatagtgagaccatgtctctaaaaataataataataaataaaaatacatatttcaaaggtgtgtagacatcaagaatacagattcagaaaattttttataatagctaacaacgcagaaattggtaggtttccaaatattattaaacaaatagattgtgcatagttgtgtgttctcaagtggttaatattatatgctaacttaaaagctgtactacataacagttatttttaaattacacagggttactttggagcagttggtgcacttcttgggctgccaaatttcagctaaagcatcaggtctctctctctgctaataaatgtcatccaagaggaactaaaaccagaggcattattactgcattgtttgtcactgggaaccaaaggataaaagagtagcataagctgctgaatgttgccatattaaaggagagaacttggtaacgtgaagtatttctcattgaaatgctttcccttttgtatatagccagtgttaaatccttaaatgcaatacagcctctgattattgagcttcctcttaaaaagatttttttattttatgtagccaacattgcagtactgtatgctcaaacacaaatcttaaagtatcggaactgtttagcttatgaaaataatcgactctgaatatttgttacaagtctgttttatgtgttttgattactagtgagcagaaaataacataccctgtattcaaaattactgaaatggcaatcaaagatgatcatttttatgtgattttagaaatgttaaggcaatactactaattattgtaggtttttttaacgtatcacccaaagcatgtatgtgatctttccccattagtatctttttctcaaatgccataattaactgaaatactattattaaattttcatgagaattctaaaatgaatcctgggaaatgcacgtttggtgatgttgcactttctgtattttacaggaattagtcaatacatgttgaaatgtttaacattttaagattggaggcttaattactgggagtctgtctaatgaagtcctgggactattgtaatggaatatgatttgagttcactgtgctctttttgtttgtttgttttggtcatatatacattcagaacttttattttaaaacaaccacaataacattaataatagaaaattcatctgtaaatattcacagtctagtcactgaaaaatgggaaaacctctaccatgccttattattaccctttgctgtttgaggagccagaaatagaggtgcagttagaggacggtcactttttccaacaaaacccactccatagccatgtggatttttatccaaaggctcaacaaccagagggaatggtgagacctgataactaaaatactgttattggcaagggtttgaaatgtgtaagaacctaggagggaaaggaagattgagcaacataggaaaaggggaagagaggctgagtgtcaccaaggtccaaactccatttataaaaatactgcaaaaccaggagttgatggtagaaatgcatatgatccatggcaggagtaaatctctccacctcctctaactctctgaaaactctagagttggagcaagtcttccatttgcttcttatccccttaaaagaatgccttccacttcccaacagcccccatcaagggaccccaagaggccaccatgctcttatctcgcactttctttcctattccccttgcctgaatctggagtggggttgagccctctgccttcaaccttaagatttaggaagttctttccccaactgtctaacttggaaaggtagatgagtctgaattttgaagtaacgaatgcaaattccactcagcagaggcaatgttatttatgtacatagggatagtggaatgagttttaatagattctgtccaaaggggtttgttcctcttatttcctctatgtaggaagttgtgtcttaggcaactttatcagtatcatggaaaatgataggcactacaatgaaatggcaggatgccaatatgagatatttcaggaataataagaaatacgtttgtttgtataaaataaactatctcaagaaagttttcaacgacagtgatagtgttcatttgtaagagagagttctagaacttcgatgtccagtgcagtagccactacccatatgtagctgttgagcatttgaaatatggttagtccaaattgagatgtgctctaaaggacaataaaaggttaaatatctcctaattttttgtattgattacatgttgaaatgttaacattggaaatattgggttaaagaaaaatacacaattaaaatgaatcttggccaggcgcagtggctcacgcctctaatcccagcactttgagaggccagggtgggcaggtcacctgaggtcaggagttcgagaccagcctggccagtgtggcaaaaccctgcctactaaaaatacaaaaattagccaggcatggtggtgcgcacctgtagtcccagctacttgggaggctgaggcaggagaattgcttgaacccaggaggaggaggctgcagtgagctgagattgtgccactgcactccagcctgggcgacagagtgagactctgtctcaaaaaaaagaatcatctgtttccaattatttttaaatgtgcttactagaaaagataaaatcacacatggtttacattttatttctattaagacagcaccgttaagaacatagagctttgaggaattgtggtattagaaccaaatctatttaccacagtgagcttacagggagttactcgagatcttaataaaaaattataatctttggcagccttcattatgattttgtgttcttattattccagtacctctagattacatatgggaaaagctaaagagccacagtggtgagatggttgctcactctagcaggtaatttcagtttgaaaggataaaatatatgaatcatagttcacattaaccaaagtacagtgatgaaataacttagactctgaccattccattttttcttaaagattgccctaaatctatagatgctaatacagtatttgccacaggtataaaacttgtagttactgtcattcaattaagattcttatctgtacagatatacaaatcagaaacttttaaaataaattgaactaatggaattttggctccaatatttagtcactacaatggaaatattaaagcaaggaacatgaagtcattgtagggttttaaaatggctactgactgacatgaattcagagtttcaaacagtctaaattctaaaaacttaactttacacgcttttcctcctaaataaccactctaataattcatacattcatatcttcaggtaaagaaaactgaattttaaacaattgaggctgggtgcagtggctcatgcctgtaatcgaatataaggacttgagtataaaatttgaaaactacatggggaaatgtctttatcatgcatctcttgatagtctactgaaaactattaagtaaacctgcggtctgtaaacaaaaaaacccatagtgatacttaccttgtgtaatgtaaacaattttttaagctctttaaagtacatctagatttactggtaatgtatagaagtcaattttatccccaagcatttctacttcctaaaccattagcaagagtctcaaaacaacttcactaaactattggacctccagtgttaacttgccaacataaaaatctgaaaaactttgtaatcactatcaaaaatacaaaagagagaataaattcccaggtaaaaggctttacaaattttggaactattatgcttttgtttactaaacactgatccttttagtaattctgcagtattgcctcagactcccacaaagtttcaaaatagctcatctattagattcctgtaacatttatttgggataaacgtggttttgttgccgttgttcataatagaataaaatatttagctttgatggttcagatgtaatacaaagaaataactaagtttgggcctgagataaatgtggtaaagcaagaatgcagagatgctgtaatgatgagtgagttttatagcattactgaggacctgaaaacttgctgccaaggacactttgaaggttttgttggctggaagaagtgtctctggaatcccactcctagctcttcttgaatatttgaaaagaattagataagggccatggggacccaggtcaccccacctcttcttttcagtttggctacaacattggagtcatcagtgctcctgagacagtcatacaggactttctcagttacactttgaaagagaggtcagaagactctccctctgaggttttgctcatgtccccctggcccttgtctgtggccatcttccccaatggtgatatgattggctcctttctgttgcactctttgtcaaccactttggcaggtgcagttcaatgcttatcataatttgttggctattactggttgccttatgggattctgcagacaagctgagttggttgaaatgctgatcctgggccactagattactggcttgtaatgcggactctgcacaagttttgtgcccatgtacattggagagatctcgcctactcccctttggggtacctttagtgctctcaaccagctggacgtcgttggtattctggagatccagatctttggtctggagttcatcttggggtctgaagagctatgcccagtgatactgggctttaccatccttccagctgtcctataaagtgtagcccttccattttgccctggaagtcgtaagtttttgctcattaacagaaaggaagagtactaatgagatccttcagcaattgtaggggactcaggatgtgtcccaggacatctaggagataagagtgctaggatgatacaagaaaagcaagtcactacactggcgctctttagagtacccagctaccaacaacccactgtcatttccatcatgctccagctctctcagtagctctctggaatcaatgttgtcttctattactcaatgagaatcttcaaggatgcaggtgttgagaagccaatctatagattagtgcaggagtggttaatattatcttcttgactgtagtctctctgtttgtggttgaaagggcaggaaggactttacatatgataggtcttgaggcatggcgttttgttctgtcctcatgattgtttctttgttattaaaggatgagtatggtgggatgagctttgtctgtagtggggctatcttggtctttgtggccttctctgaagttggaccagactccgttccctggaatactgtggccacactcttcagtttgcaatagcagtggctggttgctccaactggacctccaactttctagttggattgctcttcctgaacaattattatctagtttaagtgtgttgttgctttagggtcatggcatgcttatgtatttctgttaccatctgaccatggtactatgccaagttctcttaggggacctgaatctttccagtagaccacatttgagagagtatgagtcaactgggcatagttcccaacaacccaaaatacatacgtacttcactgaagcagatctcatgattccattgacttcatttctaaaattggactttgagcagccaatttctaaggattaaaaagaaactttaatgcattgtagacctctgtacacagaaaaatctttgtaacttttgggcttaattttcattcttaaaaaatctggtaactttttcaaatgcaaccactgtcagtttgctgtgaggctaggcaaacaacacaaggtatagaatttcccatcaccaccaccctgaccccgcgagaagattgccttttaattagagacttgtagaactagtgccttttaagttctacactcatcttttccaaagactattagtaaacttgccatgtaatttgacatggcagttccttgctcagctactctaaataaagttggaaattaggtggtctcttagtttgggtaaagtcagtactattgccagtaatatacatggtaattgaaagcccttaaagtggttcagattatttgccaaatattagactctataaaaatttctgaggttttttttcttttacctttgagtgtacatgtgattgctataatgtaaataccagtcccttaaagactgtttctataagcagaatgatgcagcacaaagtggaaaggttttcctcttattccagcagtattcttgccttcaaagagtagtccatcttgccttgatttttaaggttgttttcttggatggaaagcttaactggatagtaatttccatatgttctttataaccactctgtatattataagcaaagttttttcatattgtatctttttctgttgagcactttatgcattttagtctattgcatttgagaatgtagtttagaaattcactgtttaaagccatgtgaaaactgatagaggataatgaaaatgagtgtacattattttgaatttaacttaactgttttgtggtgggtgtgaacaaaacattagaaatatattatctttttgtgataatactctctgacctcacttaaagtgatctgccatgaggtatccatgatcaagtttatgtttattctaatacctaaggaattcagccaactttgtttctatcatcagataatctcagaaaatagtgtgttttatctatattactgcctcttttcaatatttaagagaataattgtcttctggtttctactgagcctagtaataatcactaaagacctaaaaaaggaattccttctgttaagagtatttggatagcccattcacgataatggtggtgtgaaaatcaatcatcccagcttttctgacatatctaaattttgaataattaatttccacttccaaaaaattcaaatgttttctcaaagcagtcactacttatttgcattattcctgcatattcagtgaatgtgaggtcatatttggtattgtattagaagtagtgttggtcactggtcttgcctctttgaacattatttttatttgtaaaatgagggagttggtttgttatgatgggaaatgagtcagttttcagggtcctgagaaaattgcttcattcatggctgtgtttgagataactaaagtaaattttttttcaggtatttggtgtcatgttttggagttaatatttagtgcttatataattttaagttattacataatttttattggtatatatttgataggtactaggtattggattctcaccaaaccagtagaatggtattctctcttaatatgtgattgcctgtaatggccaggtagatataccttaaagtaatatgaaaggttttatatgtatattaaaatgtttgtacttttaaatctgtaaaggttatctggaatttttactgtgttaacttcagaattatatgggcattatgactttttcattgtacaaaaaattattcataaatgttagaatacagatgttccttgacttacatagggttatgttccagtagacccattgtaaattgaaaataccgtaagttgaaaatacatttaatacgcctaacctactgaacatcccagcttagcctagcctatcttaaatgtgttctgaacacttaacgttggcctttagctgggcaaaatcatctaatacaaaacctattttataatgaagtgtttaatatctcaaataagagtattgtaccacatatcgttatcccaggataatatcagagtacaaaatttgaagtacagtttttaactgaatgtgtattgcttttgccccattataaagttgaaaaaccataagtcaaaccattgttaagtcggactgtttgtgttacatatatttgggattttttagtggccctttttaaaaagctgtttcttatttctgatcattgtgagtggggatagatgtgggaagaaccatgtctctactaaaaatacaaaaaatagccaggcttgttggcacacacctatagtcccagctactcgggagaccgaggcaggagaatcacttgaaccgggaggcagagggcagatcatgccactgtattccagcctgggcaacagagtaagactctgtctcaaaaatgaatgaatgaatgaatgaacgaatgaatgtactatgagctgatactgggatttcaggtaccgcagtttgtgctgaatgatatgtttggggtaaatcagtttttttcttatagaatttcggcgtttttgctgcaactgccactaattttgcatttaaaagaacaaaagaggaatgtatttttcaaaggagtgaatgaggttaaaatcaagattttgaatggtataaatatgcaactaattcagttgtaggatattattaaattttttattgctaaatatgtttctttcatacgttgcagtgcttacagttccaacagctttccaagaaaacatttccatatttgtgttatttgtaaagtatacataaataatgtaaaataatttgggattatttcaactttacattgtatgtctgaatttcatcgatgttgtacctggctcagtcaatagttgtcacaggtattaagccattttggaatttgccacttttttctgggtaacctgttttagtttagtttacagcatttagaaacagaaggtaactttatagaagtaacaccaatatcctagtctgcttgccccgaatataactaatagtattaggatgtaagcaatattaagatggtttttattattttttatacactgtgtgcttttactttttatttaaactacagcaaaaaactgattttttaactaaaattgaatggcgtttatcttaatgaccagttattgaccaaagtgtactcagaagatgttattatgtcccaatctaaggaatcctttaatttggggattaattttacttacacatgccatttcagtttcagttgcctcattctattacatcattcttgtcaagtctaagctttatcatgtctgaattcttttaacactgaatctgtgatgtaaaaatgtatgatgtgccataaattttattcataataaactaagttatagcctattgtaatctgtaaaacatttcttgtaaattacctaatttattttttcatttatgtacagtatcttatgtaaatttgaaaaatgtttgccatggcgcattctgtaaacattcccgtattcttttccttaatgcttatttgcatgaaggtaacttgggttttgcttgtttgtattggataaccattaagccaacttcagtttctctgcctttttttctgtagtttaaccatttctaattttgttcatattctaaatagatgttagaatcatactttttattttctactttctaaataaattatctaagttgtttactatg

SEQ ID NO: 665 - DNA, 15574 bp, Homo sapiens
agccttggagggggtacctttctgggtttatgcagtttattgactggctgtgaaagttttgaagaggctcttgaaatggcatccaaaggtgatagcacacaagctgacaagctggtccgtgatatttatggaggagattatgaaagatttggtttgccaggttgggctgtagcatctaggtaagtttaacatttgtgttatttaagttacagaagttaagtaattcaagttgcttatgtttttggaaagcaatgtaacagaaagttgtaagggtgctttctcttatccagtttaggttccaagttttgaacattgatgtcatttaaaaattaagtatacattaagaagtttacccctgagtgcaccttgtaagaaacttttttttttttaatttttgagtgtctttccagtgtttatgcaaatacaaatacatatttttacttttctccccatatacaaaaggtaatctaccattatatggcatactatatatactctaaagtatccatatagaaatctttacatgttgttgaccttattttatacaggtgtaggataaattcccaaaagttggattgcaaatgcatttttgagatattgttaattatgcaaaagagcggtactgtttttcactctcaccagcggtaaatgaaagtgcctgtttcaccagtagagtgctaacttttgcatttttgctaatcagatggagaagtggtatcttaatgtaattttaatttacatttctcctaccaacactggggttaagagccttgcatattttattttctgtgagttattgttcatgttctacttttctgttggattgttatacagttgaatttatcagtcttttcttttatggcttctggatattgattcatagtaagtaagtcttctacattccaaatatataaaggaataaacccttattttcttctgatatgttaatggtggtatttttatacttaaatctttgatttacttatagtttatcttagggtattttgtgagttacagatcatgctttcatttttcaggttttttgtttttttttccagaaggccctaatgtctaataatccatctttatttcactgatttgagatggcttttttacatatgctggcttttcattctgttgatgtaccagcattatactttcagctttatagaggcataaaaagtatgttttaatctctagaagggctagtttcactcctttgcttgattttctgtatgaacttggcaaacattttctctattacaaaaatgtttttggaatctcagtaagtttacatattaacttagggacaaatgatatctttatagtaagtcttgctgttgaagaacttagcttgtctgtttgtttaaggctacttttgtgcctttcacacatttaaaaaggcctctccaaatatgtccatacatggctttttaaattgattcctaaatattttaaatttactgttctgttgtttatcagtcttgtctcccattatgcttcctaaccattgttgcttgtgcaccccaagttctttgtcagggaatccagtgccctttgatagtggactttgtctcactcttcagtaatatctcctgcctctcccttgcatagacgcttcactccgaccaaacatcttgtgatttcatagatgttttcatttctcatttctgtgtgcctttaacctttagttgcctctgcctaagatttttcttctcattttttctggctttttctggtccttttgctctgaaagccctgcctcataccttcttaacttttttctcttaccactgtaataaaagatatttttttgtttgtatttccaaggttagcctttgtttggggttagcctttgtttggattttttccctgttactgttagcgcttctcttgctgtcttttgtatgtaggcctgcattgtccattacagtagcctctagccacgtaaggcacttggcttatgagtgccacatgttgaattgatgatatttggatatattggcttaaatgaaatgtacaattaaaattaatttcacttgtttatttttacctttttaatgtggctaatagaacatatatgaaattatatattactcgtattttatttctattggacagtgctgcactagactaattcactgtttgagggactatctgtctccagcacaaagcttggtatgtcataaatgtttcttgtgactgaatgaaaaagaatttgaagttaaagctgagatacttttggaaacattttgtaattttggctaatttgttttgaatcaggtttaagtgaagatattttggtaatctttgctttcttataataactaactatgctttttttgagatgtcattttaaccttaattctttgaaaggtattactttactcttgcatagattttttttgttagtttgttttgatcttatccctatgtgtttctactttttggtcctaattttataaaaatatccaggttgtagatatatctgttaatacgtaaaatgttgctttttatcagcagatttgactttatttttcatttttctgcagttttgggaatatgatttataaggagaagcgagaatctgttagtaaagaagatctggcaagagctactttagttactatcaccaataacattggttctgtggcacgaatgtgtgctgttaatgaggtaaaaaaacaaaaaacacaaaacttgaattatcaaaaatgtgaattggagtcctatatacacctagcagggcttcttcactttccctaaggaggcctctgggattgagatgtaacccattaaatgccaagactcattaggtatatatgttacgtatccagttgctatattacttttaaagaaagtagcagataattcaaattgaaataggagaaatttattcagaattttttttcagaaaaacacaacctaaatcccttgaggatgtaaaagaaagttctaagcataagacattttgagatactttgtgaaagcattttttttagtcttaattttgcatttggaaggcagctatgctcaccactataccaccagtgcttaatgttgcatttgattagtgaaattcttggaagttttcttactgccctcggcttctttacagtgctgccttgttgcatatggatcaagcagcattgtacagggctatgaaggcattgagacctgttcttcatgatatttgagtggtgtttattgttacaagaaaagtgtgaaaaggatatactgttagattgaccatatagttgggattctttgtttggaagagaatatatatatttaattctagcttccttatataataatagatatatttgcccgtttaatttttataaatatcaaatactttaaatggattgggaagtacgcttttcgaaggaacccttcatttgttcattcattcatttattcattgagtaaatatttactgattaccagatgccagacatcgttctgggtatttggaacatattaatgaagaaaacaaagatctggctttgtggagcttgcattcattctagtgacatattaagtaaattgtgtagtgtgtattaggtgataagtgctatttttttaaaaagagaccatcaaacaggataaagaggattgggaatagggcagagagtggtagaggacaaattgctaagtaattgagtggttaaaggaaagctttattgaaaatgtgattcttaggcagaggtttgaaggaggtgagggggaaactgtgcatgtagacattttggggagaaagcttccagcagagagaacaaatatgcaaatcctctgaattattctgtatttaaatccagaacttggtctcatcagttttttaataacttagaaacttaagtgttagttggttgatggagttactagtagaccatgttgggagctgacaacaatttgagacctttattcttagccctttatgtctaaatttccactgaccaattgagttaacaataatttaggccatggtttacagtatcccaacttatgtacaaagatttctactcaaaagtcagtatagtgtgagagtcgaaataagttttctggtgattcaaacaccagttcccctttgtaagatttcctaatcatagagataatctaagaaaccaaattagtgtggaatctttgcagagagagaatgatttgatgaatcaggcaggggacggagaaagaatgctagaatcctaggggaatgcacatgccagtaccccagtcagtattactctccaattctgtagaatccacagttgcatgtcattgttcaacatgcattgcaatgtgtgggccaagtttgctacttatcaactaaatgcattttatagtacttaccatgttttgatttttttttttaatcacatcagtaatgtgtctccaaatgactttgtaagggggctatttattggccattttcaaaaacaaatctcacctgaaatcatctgctagagtctttctggaacctttttttaaaagtagactttattttttagatcagtttcaggttcacgtaaaattaagtggaaagctcagtgagttcccatataccaccttccatacacacacagcccacttccatcctcagcatcccatagtagagtgatcatgtgttacagtccataaccctgtgcacacatcatcatcacccaaagtccataatttagggttctctcttggtgttacacattttgtggattttggatgatgtgtgcagaactaatttttaaatattcaggattatacagctatatgccaggaatgtagtaggtgttatactaataaagcgtagttgtgtttttttgcattttaaaataaattttaaataaatatttagaaaccttttatattgtaaaatctattatttttacaagttttttctttgttcttttcttttagaaaataaacagagttgtctttgttggaaactttttacgtgtcaataccctctcaatgaaacttttggcatatgcactggattactggtcaaaaggtcaactaaaagcattgtttctagaacatgaggtatggtaggaaaatgttttttgtgaattttaatagcatgttttttaagagacagggtcttgctctgtcactcaggcttgagtttagtggcacaatgatggcttactgcagcctcttcctcctgggctcatcaatcctcccacctcagcctcccaagtagctgggaccacaggtatgcaccactgtgcccagaaaatttatttttattaatattttttgtggagacaggatcactctttgttgcccaggctagtctggaactcctggcctcaagcaatcctttataggtgtgagccaccatgcccagccttaagtagtagaatattggttccttcgcttcagtttcagttgtggggaagagaattacaataacctgttaggcacccccagatttttttgtattcatttactacatgcagttaagttctgatctgagcaattatcagtccacataatgttttggattaacttaacttgaatcattttgtgatcaaagtcaaatggctgtatcattacaaattagtaacagagattcaaattattctgctcttaaaagcttccatgtcttggccgggtgcggtggctcatgcctgtaatcccagcactttgggaggccaaggcggacggatcacgaggtcaggagatcaagaccatcctggctaacaacggtgaaaccccgtctctactaaaaatacaaaaaaaaattagccgggcgaggtggcgggcgcctgtaatcccagcgactcgggaggctgaggcaggagaatggtgtgaaccccagggggcggagcctgcagtgagtcgagatggcgccactgcactccagccactccagcctgggtgatagcgagactgtctaaaaaaaaaaaaaaaaaaaagcttccatgtctcattgtcactgctcacacaatacaaatcagaatggtgtgcccttgtgcaattccacatggcatgcagtgagagtgtcaggcacagccacaggaagttagtttgttttattaagtaaaggggagagggtgcagaattgctgttacagtcctggaagctttagtgtctaaaggccacacttttagaatacgtatttcagtgtgagcctatagtcccagctattcaagaggctgagatgggaggaccatgtgagcccaggaattcaaggccagcctgggcaaaatagtgagaccatgtctctaaaaataataataataaataaaaatacatatttcaaaggtgtgtagacatcaagaatacagattcagaaaattttttataatagctaacaacgcagaaattggtaggtttccaaatattattaaacaaatagattgtgcatagttgtgtgttctcaagtggttaatattatatgctaacttaaaagctgtactacataacagttatttttaaattacacagggttactttggagcagttggtgcacttcttgggctgccaaatttcagctaaagcatcaggtctctctctctgctaataaatgtcatccaagaggaactaaaaccagaggcattattactgcattgtttgtcactgggaaccaaaggataaaagagtagcataagctgctgaatgttgccatattaaaggagagaacttggtaacgtgaagtatttctcattgaaatgctttcccttttgtatatagccagtgttaaatccttaaatgcaatacagcctctgattattgagcttcctcttaaaaagatttttttattttatgtagccaacattgcagtactgtatgctcaaacacaaatcttaaagtatcggaactgtttagcttatgaaaataatcgactctgaatatttgttacaagtctgttttatgtgttttgattactagtgagcagaaaataacataccctgtattcaaaattactgaaatggcaatcaaagatgatcatttttatgtgattttagaaatgttaaggcaatactactaattattgtaggtttttttaacgtatcacccaaagcatgtatgtgatctttccccattagtatctttttctcaaatgccataattaactgaaatactattattaaattttcatgagaattctaaaatgaatcctgggaaatgcacgtttggtgatgttgcactttctgtattttacaggaattagtcaatacatgttgaaatgtttaacattttaagattggaggcttaattactgggagtctgtctaatgaagtcctgggactattgtaatggaatatgatttgagttcactgtgctctttttgtttgtttgttttggtcatatatacattcagaacttttattttaaaacaaccacaataacattaataatagaaaattcatctgtaaatattcacagtctagtcactgaaaaatgggaaaacctctaccatgccttattattaccctttgctgtttgaggagccagaaatagaggtgcagttagaggacggtcactttttccaacaaaacccactccatagccatgtggatttttatccaaaggctcaacaaccagagggaatggtgagacctgataactaaaatactgttattggcaagggtttgaaatgtgtaagaacctaggagggaaaggaagattgagcaacataggaaaaggggaagagaggctgagtgtcaccaaggtccaaactccatttataaaaatactgcaaaaccaggagttgatggtagaaatgcatatgatccatggcaggagtaaatctctccacctcctctaactctctgaaaactctagagttggagcaagtcttccatttgcttcttatccccttaaaagaatgccttccacttcccaacagcccccatcaagggaccccaagaggccaccatgctcttatctcgcactttctttcctattccccttgcctgaatctggagtggggttgagccctctgccttcaaccttaagatttaggaagttctttccccaactgtctaacttggaaaggtagatgagtctgaattttgaagtaacgaatgcaaattccactcagcagaggcaatgttatttatgtacatagggatagtggaatgagttttaatagattctgtccaaaaggggtttgttcctcttatttcctctatgtaggaagttgtgtcttaggcaactttatcagtatcaatggaaaaatgataggcactacaatgaaatggcaggatgccaatatgagatatttcaggaataataagaaatacagtttgtttgtataaaataaactatctcaagaaagttttcaacgacagtgatagtgttcatttgtaagagagagttctagaacttcgatgtccagtgcagtagccactacccatatgtagctgttgagcatttgaaatatggttagtccaaattgagatgtgctctaaaggacaataaaaggttaaatatctcctaattttttgtattgattacatgttgaaatgttaacattggaaatattgggttaaagaaaaatacacaattaaaatgaatcttggccaggcgcagtggctcacgcctctaatcccagcactttgagaggccagggtgggcaggtcacctgaggtcaggagttcgagaccagcctggccagtgtggcaaaaccctgcctactaaaaatacaaaaattagccaggcatggtggtgcgcacctgtagtcccagctacttgggaggctgaggcaggagaattgcttgaacccaggaggaggaggctgcagtgagctgagattgtgccactgcactccagcctgggcgacagagtgagactctgtctcaaaaaaaagaatcatctgtttccaattatttttaaatgtgcttactagaaaagataaaatcacacatggtttacattttatttctattaagacagcaccgttaagaacatagagctttgaggaattgtggtattagaaccaaatctatttaccacagtgagcttacagggagttactcgagatcttaataaaaaattataatctttggcagccttcattatgattttgtgttcttattattccagtacctctagattacatatgggaaaagctaaagagccacagtggtgagatggttgctcactctagcaggtaatttcagtttgaaaggataaaatatatgaatcatagttcacattaaccaaagtacagtgatgaaataacttagactctgaccattccattttttcttaaagattgccctaaatctatagatgctaatacagtatttgccacaggtataaaacttgtagttactgtcattcaattaagattcttatctgtacagatatacaaatcagaaacttttaaaataaattgaactaatggaattttggctccaatatttagtcactacaatggaaatattaaagcaaggaacatgaagtcattgtagggttttaaaatggctactgactgacatgaattcagagtttcaaacagtctaaattctaaaaacttaactttacacgcttttcctcctaaataaccactctaataattcatacattcatatcttcaggtaaagaaaactgaattttaaacaattgaggctgggtgcagtggctcatgcctgtaatcgaatataaggacttgagtataaaatttgaaaactacatggggaaatgtctttatcatgcatctcttgatagtctactgaaaactattaagtaaacctgcggtctgtaaacaaaaaaacccatagtgatacttaccttgtgtaatgtaaacaattttttaagctctttaaagtacatctagatttactggtaatgtatagaagtcaattttatccccaagcatttctacttcctaaaccattagcaagagtctcaaaacaacttcactaaactattggacctccagtgttaacttgccaacataaaaatctgaaaaactttgtaatcactatcaaaaatacaaaagagagaataaattcccaggtaaaaggctttacaaattttggaactattatgcttttgtttactaaacactgatccttttagtaattctgcagtattgcctcagactcccacaaagtttcaaaatagctcatctattagattcctgtaacatttatttgggataaacgtggttttgttgccgttgttcataatagaataaaatatttagctttgatggttcagatgtaatacaaagaaataactaagtttgggcctgagataaatgtggtaaagcaagaatgcagagatgctgtaatgatgagtgagttttatagcattactgaggacctgaaaacttgctgccaaggacactttgaaggttttgttggctggaagaagtgtctctggaatcccactcctagctcttcttgaatatttgaaaagaattagataagggccatggggacccaggtcaccccacctcttcttttcagtttggctacaacattggagtcatcagtgctcctgagacagtcatacaggactttctcagttacactttgaaagagaggtcagaagactctccctctgaggttttgctcatgtccccctggcccttgtctgtggccatcttccccaatggtgatatgattggctcctttctgttgcactctttgtcaaccactttggcaggtgcagttcaatgcttatcataatttgttggctattactggttgccttatgggattctgcagacaagctgagttggttgaaatgctgatcctgggccactagattactggcttgtaatgcggactctgcacaagttttgtgcccatgtacattggagagatctcgcctactcccctttggggtacctttagtgctctcaaccagctggacgtcgttggtattctggagatccagatctttggtctggagttcatcttggggtctgaagagctatgcccagtgatactgggctttaccatccttccagctgtcctataaagtgtagcccttccattttgcccctggaagtcgtaagtttttgctcattaacagaaaggaagagtactaatgagatccttcagcaattgtaggggactcaggatgtgtcccaggacatctaggagataagagtgctaggatgatacaagaaaagcaagtcactacactggcgctctttagagtacccagctaccaacaacccactgtcatttccatcatgctccagctctctcagtagctctctggaatcaatgttgtcttctattactcaatgagaatcttcaaggatgcaggtgttgagaagccaatctatagattagtgcaggagtggttaatattatcttcttgactgtagtctctctgtttgtggttgaaagggcaggaaggactttacatatgataggtcttgaggcatggcgttttgttctgtcctcatgattgtttctttgttattaaaggatgagtatggtgggatgagctttgtctgtagtggggctatcttggtctttgtggccttctctgaagttggaccagactccgttccctggaatactgtggccacactcttcagtttgcaatagcagtggctggttgctccaactggacctccaactttctagttggattgctcttcctgaacaattattatctagtttaagtgtgttgttgctttagggtcatggcatgcttatgtatttctgttaccatctgaccatggtactatgccaagttctcttaggggacctgaatctttccagtagaccacatttgagagagtatgagtcaactgggcatagttcccaacaacccaaaatacatacgtacttcactgaagcagatctcatgattccattgacttcatttctaaaattggactttgagcagccaatttctaaggattaaaaagaaactttaatgcattgtagacctctgtacacagaaaaatctttgtaacttttgggcttaattttcattcttaaaaaatctggtaactttttcaaatgcaaccactgtcagtttgctgtgaggctaggcaaacaagcacaaggtatagaatttcccatcaccaccaccctgaccccgcgagaagattgccttttaattagagacttgtagaactagtgccttttaagttctacactcatcttttccaaagactattagtaaacttgccatgtaatttgacatggcagttccttgctcagctactctaaataaagttggaaattaggtggtctcttagtttgggtaaagtcagtactattgccagtaatatacatggtaattgaaagcccttaaagtggttcagattatttgccaaatattagactctataaaaatttctgaggttttttttcttttacctttgagtgtacatgtgattgctataatgtaaataccagtcccttaaagactgtttctataagcagaatgatgcagcacaaagtggaaaggttttcctcttattccagcagtattcttgccttcaaagagtagtccatcttgccttgatttttaaggttgttttcttggatggaaagcttaactggatagtaatttccatatgttctttataaccactctgtatattataagcaaagttttttcatattgtatctttttctgttgagcactttatgcattttagtctattgcatttgagaatgtagtttagaaattcactgtttaaagccatgtgaaaactgatagaggataatgaaaatgagtgtacattattttgaatttaacttaactgttttgtggtgggtgtgaacaaaacattagaaatatattatctttttgtgataatactctctgacctcacttaaagtgatctgccatgaggtatccatgatcaagtttatgtttattctaatacctaaggaattcagccaactttgtttctatcatcagataatctcagaaaatagtgtgttttatctatattactgcctcttttcaatatttaagagaataattgtcttctggtttctactgagcctagtaataatcactaaagacctaaaaaaggaattccttctgttaagagtatttggatagcccattcacgataatggtggtgtgaaaatcaatcatcccagcttttctgacatatctaaattttgaataattaatttccacttccaaaaaattcaaatgttttctcaaagcagtcactacttatttgcattattcctgcatattcagtgaatgtgaggtcatatttggtattgtattagaagtagtgttggtcactggtcttgcctctttgaacattatttttatttgtaaaatgagggagttggtttgttatgatgggaaatgagtcagttttcagggtcctgagaaaattgcttcattcatggctgtgtttgagataactaaagtaaattttttttcaggtatttggtgtcatgttttggagttaatatttagtgcttatataattttaagttattacataatttttattggtatatatttgataggtactaggtattggattctcaccaaaccagtagaatggtattctctcttaatatgtgattgcctgtaatggccaggtagatataccttaaagtaatatgaaaggttttatatgtatattaaaatgtttgtacttttaaatctgtaaaggttatctggaatttttactgtgttaacttcagaattatatgggcattatgactttttcattgtacaaaaaattattcataaatgttagaatacagatgttccttgacttacaatagggttatgttccagtagacccattgtaaattgaaaataccgtaagttgaaaatacatttaatacgcctaacctactgaacatcccagcttagcctagcctatcttaaatgtgttctgaacacttaacgttggcctttagctgggcaaaatcatctaatacaaaacctattttataatgaagtgtttaatatctcaaataagagtattgtaccacatatcgttatcccaggataatatcagagtacaaaatttgaagtacagtttttaactgaatgtgtattgcttttgccccattataaagttgaaaaaccataagtcaaaccattgttaagtcggactgtttgtgttacatatatttgggattttttagtggccctttttaaaaagctgtttcttatttctgatcattgtgagtggggatagatgtgggaagaaccatgtctctactaaaaatacaaaaaatagccaggcttgttggcacacacctatagtcccagctactcgggagaccgaggcaggagaatcacttgaaccgggaggcagagggcagatcatgccactgtattccagcctgggcaacagagtaagactctgtctcaaaaatgaatgaatgaatgaatgaacgaatgaatgtactatgagctgatactgggatttcaggtaccgcagtttgtgctgaatgatatgtttggggtaaatcagtttttttcttatagaatttcggcgtttttgctgcaactgccactaattttgcatttaaaagaacaaaagaggaatgtatttttcaaaggagtgaatgaggttaaaatcaagattttgaatggtataaatatgcaactaattcagttgtaggatattattaaattttttattgctaaatatgtttctttcatacgttgcagtgcttacagttccaacagctttccaagaaaacatttccatatttgtgttatttgtaaagtatacataaataatgtaaaataatttgggattatttcaactttacattgtatgtctgaatttcatcgatgttgtacctggctcagtcaatagttgtcacaggtattaagccattttggaatttgccacttttttctgggtaacctgttttagtttagtttacagcatttagaaacagaaggtaactttatagaagtaacaccaatatcctagtctgcttgccccgaatataactaatagtattaggatgtaagcaatattaagatggtttttattattttttatacactgtgtgcttttactttttatttaaactacagcaaaaaactgattttttaactaaaattgaatggcgtttatcttaatgaccagttattgaccaaagtgtactcagaagatgttattatgtcccaatctaaggaatcctttaatttggggattaattttacttacacatgccatttcagtttcagttgcctcattctattacatcattcttgtcaagtctaagctttatcatgtctgaattcttttaacactgaatctgtgatgtaaaaatgtatgatgtgccataaattttattcataataaactaagttatagcctattgtaatctgtaaaacatttcttgtaaattacctaatttattttttcatttatgtacagtatcttatgtaaatttgaaaaatgtttgccatggcgcattctgtaaacattcccgtattcttttccttaatgcttatttgcatgaaggtaacttgggttttgcttgtttgtattggataaccattaagccaacttcagtttctctggctttttttctggtatttaaccatttctaattttgttcatattctaaatcgatttttgaatcatactttttatttttctaactttcctaaattaattttcttagttgtt

SEQ ID NO: 666 - DNA, 20507 bp, Homo sapiens
ctttcccatggtttggcatggacattgggggaactctagtaaagctctcgtactttgaacctattgatatcacagcagaggaagagcaagaagaagttgagagtttaaaaagtattcggaaatatttgacttctaacgtggcatatggatccaccggcattcgggatgtacaccttgaactgaaagatttaacactttttggccgaagagggaacttgcactttatcaggtttccaacccaggacctgcctacttttatccaaatgggaagagataaaaacttctcaacattgcagacggtgctatgtgctacaggaggtggtgcttacaagtttgaaaaagattttcgcacagtaggtatcttttactcaaaactgaaaattgatacctgtttttaaatatgagagtaggtttccatctagcatgttccttaattctccctgcacatgcagtgggaaatatgtatccatggttgcctttcacttggggcgttttaaacacgtttatgagatgagtaaaaattgcccggatttggtcatgttgttgcacataatatttggtaaaacttgtttagggctgtactacaaagctacaataaaaaggggatttggggactttaatgaatttggcagtgtacaaagccagatataaatgaagcttgaattattttcactattgtcctacatttacatggtttttggaatattacttattcaaataatattaatcttccagggccatctccttcccaaaccctaagtctggaaaccaatgtcttttggttagtataatggacacctgaatgaaaatctgttacccttttttttctgtttttatgctgttaatcctgccatgttcctgtgtcaaatggggtgatttgaatggatctggcaggagaactatgagtattggtttgagttatgtgctgttagcagtttgccatcttctagtcttttccattagaatgagagttcaaagagtggtttgccaagcttctagtcttttctattagaataaagaatggctctgtttaggaccactgaaatttgtttttcttgaaaatgtaaatgtgaataatttaatttctgaaaatcataagaaaatactgttaatggaatataaaggctgacgtgggaggatcacttgaggctaggagttggagaccagcctgggcaatatagtgggaccccgtctctacaaaaaataaaaaaattagctcagcatagtggcctgtgcttgtagtcccagccactcaagaggctgatgaagtgggaggattgcttgagctcttgagattgaggctgcagtgagctgtgattgagccattgcactccagcatgggtgacagtgagaccctgtctcagaaggaatataaataacttaaatggctcatagaagcgagacccatataatttgaggtaaagatctgtagtactgtatgaaaagaggtgccttgggaacacagaggagtaacaacagctagagagttgaagaggttcccagaggaagtgatatctaagctgcaatgttttataaacggtgtcttataatacgctttttactaacctgaaatgatgaatgtaatcatttcaaactagtactcaaactataatataaagacaggagattaaggtatcagttattaatcagaaattaatctatccgtgggtagattaacaaacagtatgatcattccagaggacatcatgaagtagttatatgcttgcacctatgcatagattgatcatgaataccaaagctacacatgccagattgatatggtatgttctgttggaaaataagataccataaatggcattgctgttggtgacatgaccctccaacatgctaaacaaacacttggtaaaattccaaacagtaagaagtacaattttcccttgctttatgtggtggttcaattcctagcaaatttagtatatatttaaaactacgtgggttgggcacagtggctcacgcctgtaattccagcactttgggaagccaaggtgggcggatcacttgaggttaggagctggagaccagcctgaccaatgatggtgaaacctcatctctactaaaaatacaaaaattagccaggcgtggtggcgggcgcctgcaatcccagctacttgagaggctgaggcggagaatcgcttgaacccacgaggtggaggttgcagtgagccgagatcatgccactgtactccagcctgagtgacagagctagactctgtctcaaaaatgaatgaatgaatgaatgaatggagtgactgaatccataggacgaatacttttgtatttgtatacacagacagataggtaaaataactttgttattctctagcctcagataattataaataattttcctactgccactataaaaatgactggcagaacactcaaagataatgcatagatgggataattttttggtctgcagaaatgtcacacccattaaagatgtctggcatcacaagtccctgcccactaaatgtcagtttggtccttccttcctccccatcatttagaaaactagcagtgaggtgataccaccctcactgaggaccagtggactagatgaaatcccgaaagagattctgacatgaaacaaaatgaaaatgtgggggtcatagaccatttttaatttttgtaaagtaatacaggaaaatcatatagttgagtgtttttgaatgtcatccttttttgtttttgtttgtttgttttaacagattggaaacctccacctgcacaaactggatgaacttgactgccttgtaaagggcttgctgtatatagactctgtcagtttcaatggacaagccgagtgctattattttgctaatgcctcagaacctgagcgatgccaaaagatgccttttaacctggatgatccctatccactgcttgtagtgaacattggctcaggagtcagtattttagcagtccattccaaagacaactataaacgagtgactgggacaaggtagtgacctttttggttgtattgctgcattcacattgttttatacacagaagttatgaaatcagtataataatgtcattttcaccagtaaaagagcatgtatttgcacaacagcaaaaaaaaaaaatatatatatatatatattttttttttttttaagtgaaagagggtgccatgttgcccaggctgctcttgaacttctgagctcaagcaatctgcctgtctcggcctcccaaagtactgggattacaggcatgagccactgctcccagccaacagataatgtatttttataagatgtgtatgtcaagactcaaactgaaattattaaatgtttattagtcagcatcagttgggatcaaaatttccataatggtaaagtgaatttttatctagaatgagtctggtaacgttttttctagaatttaactggagcatttacttggaagcaacagtgttctattgattttaaactttattatgtttatattttgttcttttttccaaagcatttttcttctttacctattttttgactttttaatggatattaatatatgtaaacccttaaactgcagtactggggaacattgtaatttattcttataggatgaattaatgtgatttctttttgtgataacattaatgttcccaaatagcccacatacttttctgtaatacctgaaatacgaatgagaaataagatataaaactcatgattcttttatgtattttatcaacttttacagagaggtgaagattccagtttaaggaagaaagattttcaaatactttagattaatttgtgaaaaaaactcattttaattttaaagtagtaattctgtttaaattatacttaattagtactttatttttatggtggttaaaagttcacctctgttgtaattctctatgccaaagaattgtacactgctattgccttcttcggttaactctaaaagaagttcagtctgttaactaaatccaacagtgattcaggggtagaacttgctagaaatttagatgagactagggagcaaaggtttacagtttaggaattagatacgatttcattctgtgagcatatccagaagaataatagaagcaaataaatttctgtaattgacatgttggccagctggacataaatttactcattgtatttatgtgtaggtcatgtgaaatattagtgtatcatattgaattgatttcatccatgtcaggccaagtaaagaagcctttcccaaaatcatttcttggaaacgatttaaaattacaaagatgggcatggtagttcatgcctgtaattctaacactttgggaggccaaagtggaggattgcttgagaccaggagttaagaccagcctgggaaacatagtgagacccccatctctacaaaaatatatacatatatattagtccagtgtggtagtgtgcattgtagtctagctgctgcggaggctggaacaggaagattgcttgagcccaggagttcaaggatacattaggctatgatcatggtcactgcactccagcctgagggacagagtgagaccttgtctcaaaagaaaaattacagattttctctttgtaattaatatggtactgatttttaacatttattcctttttaatgcacacacaacaatttatctttggtaactacagagtgtaaggtattaggtgaagactttgggagagatttaataggtctttcctttcctcatgtttccaccaagtgatttttttctttggtttattctttgatctaacaagtttggttttactaaacaatttttgttgccttcgttatgttatttcagcactcagcattagtcataggttttttttctgtgtgttcattgaatacatgaatgatccacccttttactttagagaaagaatataatgtataaatgcaacttagcaagtttctttattttctttagccttggagggggtacctttctgggtttatgcagtttattgactggctgtgaaagttttgaagaggctcttgaaatggcatccaaaggtgatagcacacaagctgacaagctggtccgtgatatttatggaggagattatgaaagatttggtttgccaggttgggctgtagcatctaggtaagtttaacatttgtgttatttaagttacagaagttaagtaattcaagttgcttatgtttttggaaagcaatgtaacagaaagttgtaagggtgctttctcttatccagtttaggttccaagttttgaacattgatgtcatttaaaaattaagtatacattaagaagtttaccctgagtgcaccttgtaagaaactttttttttttaatttttgagtgtctttccagtgtttatgcaaatacaaatacatatttttacttttctccccatatacaaaaggtaatctaccattatatggcatactatatatactctaaagtatccatatagaaatctttacatgttgttgaccttattttatacaggtgtaggataaattcccaaaagttggattgcaaatgcatttttgagatattgttaattatgcaaaagagcggtactgtttttcactctcaccagcggtaaatgaaagtgcctgtttcaccagtagagtgctaacttttgcatttttgctaatcagatggagaagtggtatcttaatgtaattttaatttacatttctcctaccaacactggggttaagagccttgcatattttattttctgtgagttattgttcatgttctacttttctgttggattgttatacagttgaatttatcagtcttttcttttatggcttctggatattgattcatagtaagtaagtcttctacattccaaatatataaaggaataaacccttattttcttctgatatgttaatggtggtatttttatacttaaatctttgatttacttatagtttatcttagggtattttgtgagttacagatcatgctttcatttttcaggttttttgtttttttttccagaaggccctaatgtctaataatccatctttatttcactgatttgagatggcttttttacatatgctggcttttcattctgttgatgtaccagcattatactttcagctttatagaggcataaaaagtatgttttaatctctagaagggctagtttcactcctttgcttgattttctgtatgaacttggcaaacattttctctattacaaaaatgtttttggaatctcagtaagtttacatattaacttagggacaaatgatatctttatagtaagtcttgctgttgaagaacttagcttgtctgtttgtttaaggctacttttgtgcctttcacacatttaaaaaggcctctccaaatatgtccatacatggctttttaaattgattcctaaatattttaaatttactgttctgttgtttatcagtcttgtctcccattatgcttcctaaccattgttgcttgtgcaccccaagttctttgtcagggaatccagtgccctttgatagtggactttgtctcactcttcagtaatatctcctgcctctcccttgcatagacgcttcactccgaccaaacatcttgtgatttcatagatgttttcatttctcatttctgtgtgcctttaacctttagttgcctctgcctaagatttttcttctcattttttctggctttttctggtccttttgctctgaaagccctgcctcataccttcttaacttttttctcttaccactgtaataaaagatatttttttgtttgtatttccaaggttagcctttgtttggggttagcctttgtttggattttttccctgttactgttagcgcttctcttgctgtcttttgtatgtaggcctgcattgtccattacagtagcctctagccacgtaaggcacttggcttatgagtgccacatgttgaattgatgatatttggatatattggcttaaatgaaatgtacaattaaaattaatttcacttgtttatttttacctttttaatgtggctaatagaacatatatgaaattatatattactcgtattttatttctattggacagtgctgcactagactaattcactgtttgagggactatctgtctccagcacaaagcttggtatgtcataaatgtttcttgtgactgaatgaaaaagaatttgaagttaaagctgagatacttttggaaacattttgtaattttggctaatttgttttgaatcaggtttaagtgaagatattttggtaatctttgctttcttataataactaactatgctttttttgagatgtcattttaaccttaattctttgaaaggtattactttactcttgcatagattttttttgttagtttgttttgatcttatccctatgtgtttctactttttggtcctaattttataaaaatatccaggttgtagatatatctgttaatacgtaaaatgttgctttttatcagcagatttgactttatttttcatttttctgcagttttgggaatatgatttataaggagaagcgagaatctgttagtaaagaagatctggcaagagctactttagttactatcaccaataacattggttctgtggcacgaatgtgtgctgttaatgaggtaaaaaaacaaaaaacacaaaacttgaattatcaaaaatgtgaattggagtcctatatacacctagcagggcttcttcactttccctaaggaggcctctgggattgagatgtaacccattaaatgccaagactcattaggtatatatgttacgtatccagttgctatattacttttaaagaaagtagcagataattcaaattgaaataggagaaatttattcagaattttttttcagaaaaacacaacctaaatcccttgaggatgtaaaagaaagttctaagcataagacattttgagatactttgtgaaagcattttttttagtcttaattttgcatttggaaggcagctatgctcaccactataccaccagtgcttaatgttgcatttgattagtgaaattcttggaagttttcttactgccctcggcttctttacagtgctgccttgttgcatatggatcaagcagcattgtacagggctatgaaggcattgagacctgttcttcatgatatttgagtggtgtttattgttacaagaaaagtgtgaaaaggatatactgttagattgaccatatagttgggattctttgtttggaagagaatatatatatttaattctagcttccttatataataatagatatatttgcccgtttaatttttataaatatcaaatactttaaatggattgggaagtacgcttttcgaaggaacccttcatttgttcattcattcatttattcattgagtaaatatttactgattaccagatgccagacatcgttctgggtatttggaacatattaatgaagaaaacaaagatctggctttgtggagcttgcattcattctagtgacatattaagtaaattgtgtagtgtgtattaggtgataagtgctatttttttaaaaagagaccatcaaacaggataaagaggattgggaatagggcagagagtggtagaggacaaattgctaagtaattgagtggttaaaggaaagctttattgaaaatgtgattcttaggcagaggtttgaaggaggtgagggggaaactgtgcatgtagacattttggggagaaagcttccagcagagagaacaaatatgcaaatcctctgaattattctgtatttaaatccagaacttggtctcatcagttttttaataacttagaaacttaagtgttagttggttgatggagttactagtagaccatgttgggagctgacaacaatttgagacctttattcttagccctttatgtctaaatttccactgaccaattgagttaacaataatttaggccatggtttacagtatcccaacttatgtacaaagatttctactcaaaagtcagtatagtgtgagagtcgaaataagttttctggtgattcaaacaccagttcccctttgtaagatttcctaatcatagagataatctaagaaaccaaattagtgtggaatctttgcagagagagaatgatttgatgaatcaggcaggggacggagaaagaatgctagaatcctaggggaatgcacatgccagtaccccagtcagtattactctccaattctgtagaatccacagttgcatgtcattgttcaacatgcattgcaatgtgtgggccaagtttgctacttatcaactaaatgcattttatagtacttaccatgttttgatttttttttttaatcacatcagtaatgtgtctccaaatgactttgtaagggggctatttattggccattttcaaaaacaaatctcacctgaaatcatctgctagagtctttctggaacctttttttaaaagtagactttattttttagatcagtttcaggttcacgtaaaattaagtggaaagctcagtgagttcccatataccaccttccatacacacacagcccacttccatcctcagcatcccatagtagagtgatcatgtgttacagtccataaccctgtgcacacatcatcatcacccaaagtccataatttagggttctctcttggtgttacacattttgtggattttggatgatgtgtgcagaactaatttttaaatattcaggattatacagctatatgccaggaatgtagtaggtgttatactaataaagggtagttgtgtttttttgcattttaaaataaattttaaataaatatttagaaaccttttatattgtaaaatctattatttttacaagttttttctttgttcttttcttttagaaaataaacagagttgtctttgttggaaactttttacgtgtcaataccctctcaatgaaacttttggcatatgcactggattactggtcaaaaggtcaactaaaagcattgtttctagaacatgaggtatggtaggaaaatgttttttgtgaattttaatagcatgttttttaagagacagggtcttgctctgtcactcaggcttgagtttagtggcacaatgatggcttactgcagcctcttcctcctgggctcatcaatcctcccacctcagcctcccaagtagctgggaccacaggtatgcaccactgtgcccagaaaatttatttttattaatattttttgtggagacaggatcactctttgttgcccaggctagtctggaactcctggcctcaagcaatcctttataggtgtgagccaccatgcccagccttaagtagtagaatattggttccttcgcttcagtttcagttgtggggaagagaattacaataacctgttaggcacccccagatttttttgtattcatttactacatgcagttaaattctgatctgagcaattatcagtccacataatgttttggattaacttaacttgaatcattttgtgatcaaagtcaaatggctgtatcattacaaattagtaacagagattcaaattattctgctcttaaaagcttccatgtcttggccgggtgcggtggctcatgcctgtaatcccagcactttgggaggccaaggcggacggatcacgaggtcaggagatcaagaccatcctggctaacaacggtgaaaccccgtctctactaaaaatacaaaaaaaaattagccgggcgaggtggcgggcgcctgtaatcccagcgactcgggaggctgaggcaggagaatggtgtgaaccccagggggcggagcctgcagtgagtcgagatggcgccactgcactccagccactccagcctgggtgatagcgagactgtctaaaaaaaaaaaaaaaaaaaagcttccatgtctcattgtcactgctcacacaatacaaatcagaatggtgtgcccttgtgcaattccacatggcatgcagtgagagtgtcaggcacagccacaggaagttagtttgttttattaagtaaaggggagagggtgcagaattgctgttacagtcctggaagctttagtgtctaaaggccacacttttagaatacgtatttcagtgtgagcctatagtcccagctattcaagaggctgagatgggaggaccatgtgagcccaggaattcaaggccagcctgggcaaaatagtgagaccatgtctctaaaaataataataataaataaaaatacatatttcaaaggtgtgtagacatcaagaatacagattcagaaaattttttataatagctaacaacgcagaaattggtaggtttccaaatattattaaacaaatagattgtgcatagttgtgtgttctcaagtggttaatattatatgctaacttaaaagctgtactacataacagttatttttaaattacacagggttactttggagcagttggtgcacttcttgggctgccaaatttcagctaaagcatcaggtctctctctctgctaataaatgtcatccaagaggaactaaaaccagaggcattattactgcattgtttgtcactgggaaccaaaggataaaagagtagcataagctgctgaatgttgccatattaaaggagagaacttggtaacgtgaagtatttctcattgaaatgctttcccttttgtatatagccagtgttaaatccttaaatgcaatacagcctctgattattgagcttcctcttaaaaagatttttttattttatgtagccaacattgcagtactgtatgctcaaacacaaatcttaaagtatcggaactgtttagcttatgaaaataatcgactctgaatatttgttacaagtctgttttatgtgttttgattactagtgagcagaaaataacataccctgtattcaaaattactgaaatggcaatcaaagatgatcatttttatgtgattttagaaatgttaaggcaatactactaattattgtaggtttttttaacgtatcacccaaagcatgtatgtgatctttccccattagtatctttttctcaaatgccataattaactgaaatactattattaaattttcatgagaattctaaaatgaatcctgggaaatgcacgtttggtgatgttgcactttctgtattttacaggaattagtcaatacatgttgaaatgtttaacattttaagattggaggcttaattactgggagtctgtctaatgaagtcctgggactattgtaatggaatatgatttgagttcactgtgctctttttgtttgtttgttttggtcatatatacattcagaacttttattttaaaacaaccacaataacattaataatagaaaattcatctgtaaatattcacagtctagtcactgaaaaatgggaaaacctctaccatgccttattattaccctttgctgtttgaggagccagaaatagaggtgcagttagaggacggtcactttttccaacaaaacccactccatagccatgtggatttttatccaaaggctcaacaaccagagggaatggtgagacctgataactaaaatactgttattggcaagggtttgaaatgtgtaagaacctaggagggaaaggaagattgagcaacataggaaaaggggaagagaggctgagtgtcaccaaggtccaaactccatttataaaaatactgcaaaaccaggagttgatggtagaagtgcatatgatccatggcaggagtaaatctctccacctcctctaactctctgaaaactctagagttggagcaagtcttccatttgcttcttatccccttaaaagaatgccttccacttcccaacagcccccatcaagggaccccaagaggccaccatgctcttatctcgcactttctttcctattccccttgcctgaatctggagtggggttgagccctctgccttcaaccttaagatttaggaagttctttccccaactgtctaacttggaaaggtagatgagtctgaattttgaagtaacaaatgcaaattccactcagcagaggcaatgttatttatgtacatagggatagtggaatgagttttaatagattctgtccaaaaggggtttgttcctcttatttcctctatgtaggaagttgtgtcttaggcaactttatcagtatcaatggaaaaatgataggcactacaatgaaatggcaggatgccaatatgagatatttcaggaataataagaaatacagtttgtttgtataaaataaactatctcaagaaagttttcaacgacagtgatagtgttcatttgtaagagagagttctagaacttcgatgtccagtgcagtagccactacccatatgtagctgttgagcatttgaaatatggttagtccaaattgagatgtgctctaaaggacaataaaaggttaaatatctcctaattttttgtattgattacatgttgaaatgttaacattggaaatattgggttaaagaaaaatacacaattaaaatgaatcttggccaggcgcagtggctcacgcctctaatcccagcactttgagaggccagggtgggcaggtcacctgaggtcaggagttcgagaccagcctggccagtgtggcaaaaccctgcctactaaaaatacaaaaattagccaggcatggtggtgcgcacctgtagtcccagctacttgggaggctgaggcaggagaattgcttgaacccaggaggaggaggctgcagtgagctgagattgtgccactgcactccagcctgggcgacagagtgagactctgtctcaaaaaaaagaatcatctgtttccaattatttttaaatgtgcttactagaaaagataaaatcacacatggtttacattttatttctattaagacagcaccgttaagaacatagagctttgaggaattgtggtattagaaccaaatctatttaccacagtgagcttacagggagttactcgagatcttaataaaaaattataatctttggcagccttcattatgattttgtgttcttattattccagtacctctagattacatatgggaaaagctaaagagccacagtggtgagatggttgctcactctagcaggtaatttcagtttgaaaggataaaatatatgaatcatagttcacattaaccaaagtacagtgatgaaataacttagactctgaccattccattttttcttaaagattgccctaaatctatagatgctaatacagtatttgccacaggtataaaacttgtagttactgtcattcaattaagattcttatctgtacagatatacaaatcagaaacttttaaaataaattgaactaatggaattttggctccaatatttagtcactacaatggaaatattaaagcaaggaacatgaagtcattgtagggttttaaaatggctactgactgacatgaattcagagtttcaaacagtctaaattctaaaaacttaactttacacgcttttcctcctaaataaccactctaataattcatacattcatatcttcaggtaaagaaaactgaattttaaacaattgaggctgggtgcagtggctcatgcctgtaatcgaatataaggacttgagtataaaatttgaaaactacatggggaaatgtctttatcatgcatctcttgatagtctactgaaaactattaagtaaacctgcggtctgtaaacaaaaaaacccatagtgatacttaccttgtgtaatgtaaacaattttttaagctctttaaagtacatctagatttactggtaatgtatagaagtcaattttatccccaagcatttctacttcctaaaccattagcaagagtctcaaaacaacttcactaaactattggacctccagtgttaacttgccaacataaaaatctgaaaaactttgtaatcactatcaaaaatacaaaagagagaataaattcccaggtaaaaggctttacaaattttggaactattatgcttttgtttactaaacactgatccttttagtaattctgcagtattgcctcagactcccacaaagtttcaaaatagctcatctattagattcctgtaacatttatttgggataaacgtggttttgttgccgttgttcataatagaataaaatatttagctttgatggttcagatgtaatacaaagaaataactaagtttgggcctgagataaatgtggtaaagcaagaatgcagagatgctgtaatgatgagtgagttttatagcattactgaggacctgaaaacttgctgccaaggacactttgaaggttttgttggctggaagaagtgtctctggaatcccactcctagctcttcttgaatatttgaaaagaattagataagggccatggggacccaggtcaccccacctcttcttttcagtttggctacaacattggagtcatcagtgctcctgagacagtcatacaggactttctcagttacactttgaaagagaggtcagaagactctccctctgaggttttgctcatgtccccctggccctcgtctgtggccatcttccccaatggtgatatgattggctcctttctgttgcactctttgtcaaccactttggcaggtgcagttcaatgcttatcataatttgttggctattactggttgccttatgggattctgcagacaagctgagttggttgaaatgctgatcctgggccactagattactggcttgtaatgcggactctgcacaagttttgtgcccatgtacattggagagatctcgcctactcccctttggggtacctttagtgctctcaaccagctggacgtcgttggtattctggagatccagatctttggtctggagttcatcttggggtctgaagagctatgcccagtgatactgggctttaccatccttccagctgtcctataaagtgtagcccttccattttgccctggaagtcgtaagtttttgctcattaacagaaaggaagagtactaatgagatccttcagcaattgtaggggactcaggatgtgtcccaggacatctaggagataagagtgctaggatgatacaagaaaagcaagtcactacactggcgctctttagagtacccagctaccaacaacccactgtcatttccatcatgctccagctctctcagtagctctctggaatcaatgttgtcttctattactcaatgagaatcttcaaggatgcaggtgttgagaagccaatctatagattagtgcaggagtggttaatattatcttcttgactgtagtctctctgtttgtggttgaaagggcaggaaggactttacatatgataggtcttgaggcatggcgttttgttctgtcctcatgattgtttctttgttattaaaggatgagtatggtgggatgagctttgtctgtagtggggctatcttggtctttgtggccttctctgaagttggaccagactccgttccctggaatactgtggccacactcttcagtttgcaatagcagtggctggttgctccaactggacctccaactttctagttggattgctcttcctgaacaattattatctagtttaagtgtgttgttgctttagggtcatggcatgcttatgtatttctgttaccatctgaccatggtactatgccaagttctcttaggggacctgaatctttccagtagaccacatttgagagagtatgagtcaactgggcatagttcccaacaacccaaaatacatacgtacttcactgaagcagatctcatgattccattgacttcatttctaaaattggactttgagcagccaatttctaaggattaaaaagaaactttaatgcattgtagacctctgtacacagaaaaatctttgtaacttttgggcttaattttcattcttaaaaaatctggtaactttttcaaatgcaaccactgtcagtttgctgtgaggctaggcaaacaacacaaggtatagaatttcccatcaccaccaccctgaccccgcgagaagattgccttttaattagagacttgtagaactagtgccttttaagttctacactcatcttttccaaagactattagtaaacttgccatgtaatttgacatggcagttccttgctcagctactctaaataaagttggaaattaggtggtctcttagtttgggtaaagtcagtactattgccagtaatatacatggtaattgaaagcccttaaagtggttcagattatttgccaaatattagactctataaaaatttctgaggttttttttcttttacctttgagtgtacatgtgattgctataatgtaaataccagtcccttaaagactgtttctataagcagaatgatgcagcacaaagtggaaaggttttcctcttattccagcagtattcttgccttcaaagagtagtccatcttgccttgatttttaaggttgttttcttggatggaaagcttaactggatagtaatttccatatgttctttataaccactctgtatattataagcaaagttttttcatattgtatctttttctgttgagcactttatgcattttagtctattgcatttgagaatgtagtttagaaattcactgtttaaagccatgtgaaaactgatagaggataatgaaaatgagtgtacattattttgaatttaacttaactgttttgtggtgggtgtgaacaaaacattagaaatatattatctttttgtgataatactctctgacctcacttaaagtgatctgccatgaggtatccatgatcaagtttatgtttattctaatacctaaggaattcagccaactttgtttctatcatcagataatctcagaaaatagtgtgttttatctatattactgcctcttttcaatatttaagagaataattgtcttctggtttctactgagcctagtaataatcactaaagacctaaaaaaggaattccttctgttaagagtatttggatagcccattcacgataatggtggtgtgaaaatcaatcatcccagcttttctgacatatctaaattttgaataattaatttccacttccaaaaaattcaaatgttttctcaaagcagtcactacttatttgcattattcctgcatattcagtgaatgtgaggtcatatttggtattgtattagaagtagtgttggtcactggtcttgcctctttgaacattatttttatttgtaaaatgagggagttggtttgttatgatgggaaatgagtcagttttcagggtcctgagaaaattgcttcattcatggctgtgtttgagataactaaagtaaattttttttcaggtatttggtgtcatgttttggagttaatatttagtgcttatataattttaagttattacataatttttattggtatatatttgataggtactaggtattggattctcaccaaaccagtagaatggtattctctcttaatatgtgattgcctgtaatggccaggtagatataccttaaagtaatatgaaaggttttatatgtatattaaaatgtttgtacttttaaatctgtaaaggttatctggaatttttactgtgttaacttcagaattatatgggcattatgactttttcattgtacaaaaaattattcataaatgttagaatacagatgttccttgacttacaatagggttatgttccagtagacccattgtaaattgaaaataccgtaagttgaaaatacatttaatacgcctaacctactgaacatcccagcttagcctagcctatcttaaatgtgttctgaacacttaacgttggcctttagctgggcaaaatcatctaatacaaaacctattttataatgaagtgtttaatatctcaaataagagtattgtaccacatatcgttatcccaggataatatcagagtacaaaatttgaagtacagtttttaactgaatgtgtattgcttttgccccattataaagttgaaaaaccataagtcaaaccattgttaagtcggactgtttgtgttacatatatttgggattttttagtggccctttttaaaaagctgtttcttatttctgatcattgtgagtggggatagatgtgggaagaaccatgtctctactaaaaatacaaaaaatagccaggcttgttggcacacacctatagtcccagctactcgggagaccgaggcaggagaatcacttgaaccgggaggcagagggcagatcatgccactgtattccagcctgggcaacagagtaagactctgtctcaaaaatgaatgaatgaatgaatgaacgaatgaatgtactatgagctgatactgggatttcaggtaccgcagtttgtgctgaatgatatgtttggggtaaatcagtttttttcttatagaatttcggcgtttttgctgcaactgccactaattttgcatttaaaagaacaaaagaggaatgtatttttcaaaggagtgaatgaggttaaaatcaagattttgaatggtataaatatgcaactaattcagttgtaggatattattaaattttttattgctaaatatgtttctttcatacgttgcagtgcttacagttccaacagctttccaagaaaacatttccatatttgtgttatttgtaaagtatacataaataatgtaaaataatttgggattatttcaactttacattgtatgtctgaatttcatcgatgttgtacctggctcagtcaatagttgtcacaggtattaagccattttggaatttgccacttttttctgggtaacctgttttagtttagtttacagcatttagaaacagaaggtaactttatagaagtaacaccaatatcctagtctgcttgccccgaatataactaatagtattaggatgtaagcaatattaagatggtttttattattttttatacactgtgtgcttttactttttatttaaactacagcaaaaaactgattttttaactaaaattgaatggcgtttatcttaatgaccagttattgaccaaagtgtactcagaagatgttattatgtcccaatctaaggaatcctttaatttggggattaattttacttacacatgccatttcagtttcagttgcctcattctattacatcattcttgtcaagtctaagctttatcatgtctgaattcttttaacactgaatctgtgatgtaaaaatgtatgatgtgccataaattttattcataataaactaagttatagcctattgtaatctgtaaaacatttcttgtaaattacctaatttattttttcatttatgtacagtatcttatgtaaatttgaaaaatgtttgccatggcgcattctgtaaacattcccgtattcttttccttaatgcttatttgcatgaaggtaacttgggttttgcttgtttgtattggataaccattaagccaacttcagtttctctgcctttttttctgtagtttaaccatttctaattttgttcatattctaaatagatgttagaatcatactttttattttctactttctaaataaattatctaagttgtttactatg

SEQ ID NO: 667 - DNA, 372 bp, Homo sapiens
tgactaccatgtgacatgtgaagtacatatcttttatttaaaaaaaattagcaagaactaggatgaaaaaaatctaagatctggactaaaggagaacatgatgcagtatggaagagatttgaggtgtagtttagctattcaaatgtaggaagtactgctgtcgcaagcacttagaaataagctcctaaagagcatacattcaaggctacacacttaagtctttcatttaaataaactttccaaggagggaaaagtctgtactggagtcaatacacagtgctatataaattttgaaagtggccaggagcagtagctcacacctacaatcccagcactttgggaaaccaaggcaggtggatcacttgaggccag

SEQ ID NO: 668 - DNA, 1242 bp, Homo sapiens
tttctttctttctttctttttttttttttttgagacggagtcttgctccgtcgcccaggctggagtgcaatggcgcgatctctgctcactgcaagctccacctcccgggttcacgccattctcctgcctcagcctccagagtagctgggactacaggcgcctgccaccacggccggctaatttttttgtatttttttagtagagacggggtttcgctgtgttagccaggaaggtctcgatctcctgacctcgtgatccacccgtctcggcctcccaaagtgctgggatcacaggcgtaagccaccgcgcccggcctggagataatgattatttactgaagggaattgctttttgggtttgttttttatgacaggatctcactctgttacctaatctgcagtgtagtggtgcaaacatggctcaccgcagccccagcctcctggactcaagtgatcctcctgcctcagcctcctgtaactgggactacaggtgcatgctgccacgcccagctaatttttaaattttttgcggagacaggatcttgttatattgccaaggctggtttcaaactcctgttttcaagcgatcccccctacctcagcctcccaaagtattgggatttcaggtgtgagcaccatacctggcaggaattgctttttaaggaggtgcttttctcctgggttacttgaagtgattataggccagttttattgtattaaaatgcttatagaaacaaagattttcatgcccttagtgttgacctatttattgaaaaaagaatgatctgaattttttctcatccctggagcacatggtatttagtaaatgaaaaggggttgcctaccaggccaggaattaaaagatcctgggtcaactctaagcaccctatacgtttttagaaaatatattaataaaactttgaagggccgagcgcggtggctcacgcctgcaatcccagcactttgggaggcagaggcaggcggatcacaaggtcaggagatcgagaccatcctggctaacacggtgaaaccccgtctctactaaaaatacaaaaaaaaaaaaaattaggcaggcgtggtggtgggcacctgtagtcccagctactcgggaggctgaggcaggagaatggcgtgaacccgggaggcggagtttgcagtgagccaagatcgcgccactgcactccagcctgggcaacagagcgagactccatctcaaaaaaaaaaaaaaaaaaaaaactttgaa

SEQ ID NO: 669 - DNA, 350 bp, Homo sapiens
tttttagaaaatatattaataaaactttgaagggccgagcgcggtggctcacgcctgcaatcccagcactttgggaggcagaggcaggcggatcacaaggtcaggagatcgagaccatcctggctaacacggtgaaaccccgtctctactaaaaatacaaaaaaaaaaaaaattaggcaggcgtggtggtgggcacctgtagtcccagctactcgggaggctgaggcaggagaatggcgtgaacccgggaggcggagtttgcagtgagccaagatcgcgccactgcactccagcctgggcaacagagcgagactccatctcaaaaaaaaaaaaaaaaaaaaaactttgaa

SEQ ID NO: 670 - DNA, 372 bp, Homo sapiens; identical to SEQ ID NO: 667

SEQ ID NO: 671 - DNA, 16301 bp, Homo sapiens
agtccccacctagggcacgctgccacgccgccgttacctggtccaagtgcccgggaggctccgcctgtcggcttcgctctgcagctgcatctctgatctgtcctgcaggctcaggtgagtcaaaggattgggaggcactgaggggtctgcaggggagtaggcatcaagccaggtcaggcgagtgtattttagcagagacgctgcctagggtgccctatctgatttgcagtgcccttccccacttctgcagggtcctttccaaatcgagcccccaccctcaaagccatcaaaataggatcatcccttttctactctcatccctccaggaaccccctgaaatgtccctaagggacttttgagaatttatttacaggcctctcctcccttgctgctccactccctcaacctcacctcagggcatctctgaatctttctttttttaatgcaaggattaactcctcagaggaatcccaggttctagtatcagtcctgccacgacatcgccatgtacccttcagcaagacactaccctctctggacctagttcctttctttgtagaatgaggggtttggaaaggtgatgaactttgaggcatttgctattttgactttctaggattcctggggtggaggcagggtgccaggtgagaagttggctcagaccaagaatgggatgaggggaaccttaaccaagatttaggggcccagaggcatctccgggtaggaaagtatgggaggtggcagaggccccttgtgccttagccctcatgctgtccagggatgttggctttgcctgtggcccaagcttgacaagggttccccgccctcccacttccaccagcgctgccacatcttgcttggtcaccctcccacgacgggccctgccagaggatttatgttcttctaccaggcctgggaggggaaaagggagaagaatccgggatgagaaggtcgcctggagtgagaagcaggcactggcctcgctcagaataggcgcattcacggaattggggggcgggggcggagctgctgttgggttaggggcagctggccctctctgccaagaaacagcaacagaaaaatggctaacacagcttcagcatggggcgcggcggtggggtaggagctggaaggaaatgaggtttagtgaattctaggcgccagggggcctcaagagagagaaggggaaccaggagccctaggttctaatcctgcttttgcagttcggcgggctgcctccttggggcttagttttcctatttgtatagtggggagggggtgggggggtggtccttcgtagttctcacggggcgtctccggggcctcgggagggtaagcgctcacctgctgcccctgcggggtccatggtggctccacggggccccagccgctcacccgccgccctctggacgagtccagtgctgctgtcgctggaaccctgcacacccctgctcctcggctcttgcgcgggttatatcctgtccaggccttatctccaaggccccgggccccggccccctgtttgctcggggtgggcgcacctgctgggcagatgtgggcttcccacgccccctgccatctcgggcgccccctggcggtcgctcctgagagcaggcgggaaacaggcgccaagccgcgcgttctcgtgcgcagtgggttttggtccactcgctgccacgccaccacgctcagccccgcaacagggcgcagcccctccctgccgcctgcggttgggcagtgcatgtctgtgtttgtgtgtgtggaggggtctgggggggttggcgagttgcaaagacagccacacagaagcctgtgtgcgtaggggagtgggccgaggtggggaagggcttctgtctgcagaggttcgcctggcaggaggagaggcaccaaacgcccaggctggctcacagaaactagcaggcgtgggattgtatcctgccgcagccactttttggccgaatgactttgggtaccagcgcttaacttttctgagcctcaatttcattgtctgtatgatgggggacaatcacagccttagtcttacaattgcagagaggattaaatgccacaatgcgtgaagagcatttaacactgtgcctgacatttaaggaagacctgtttttttctgtttaaattttgcatatttgtatctatgtatctattcttatttaccattctcttgtgggccgagcgcggtggctcacgcctgtaatcccagcattctgggaggccgaggtgggaggatcacctgaggtcaggagtttgagaccagcctgaccaacatggcaaaacccgctctctactaaaaatacaaaaaattagccaggtgtggtggcaggagcctgtaatcccagctactcgggaggctgaggccggagaatcgcttgaacctgggaggcagaggttgcagtgagccgagatcatgccactgcactccagccgggacgacagagcaagactctatctaaaaaaaaaaaaaaaaagaatctcttgtgtttcccagcaatcccactgtgatgagaattttttaattctgaaacatttcaaacatacacaaaaatagagagattagtaaaataaacctgtaactgtcttccccctccaagtgcctatcacccagaataagagctctgtaaatactgttgcttttctattttccttcctccctccaggctctgacacctccattctctgtccccaagcgccatgagaggccttctttgctggcccgtgttgctgctccttcttcagccctgggaaacccagctccagttgacaggtgaactggggcccagccctcaccagtgggaggaggggagcggaagcaggtcctccctctgcagccagctcctcctgctggggagagggaagcaagggctttggaacatatgggactgggtttaagttccccacttcacctttctgggcctcagtttcttcatctgtaggatgtggcttagttttgggcgcatgcagaactgcccatggggtgtttaatttggaaaaattatttgaaaacatggaaaaaaaccaggaaattttacataaaaatccctgtttagtatttctcttgaaaaaccagggatctgctgacatccaattcgcaggggcatggcctcatttggatgcagctacctgcccaatttaggagtgataggggctctttgggtctccagcgtcctaacccaaccagttcatccatgttccctgcctggtccctgcaggctttgagtttgcgacgcttccttgccccctcgtcaatgggtaataccgcctcagaatagccctcagatctgtaagatgagggaatttgtgaaatctcctagcccaggtgctaggcacatgccgggcgagtgcatctgtctaatctgcgtttgctgtgctgggcgctgttatgtcggcatagcggcatttcccctgggtttcctagggggtctcctcggaggtgaggctttgctgacctaggagagtcctccctgatctccccgcaggtcccaggtgtcacactgggcccctggatctggtgttcgtgattgacagctcccgcagcgtgcgccctttcgagttcgagaccatgcggcagttcctcatgggcctcctccgaggcctgaacgtgggtcccaacgccacgcgcgttggcgtgatccagtattcgagtcaagtgcagagcgtcttccctctccgcgcgttctctcgccgcgaggacatggagcgcgccatccgcgacctggtgcctctggcgcaaggcaccatgacgggactggcaatccagtacgccatgaacgtggccttcagtgtggccgagggcgcgcgaccgccagaggagcgcgtgccgcgtgtcgctgtcatcgtgacagacgggcggccccaggaccgcgtggccgaggtggcggcacaggcgcgcgcccgcggcattgaaatttacgcggtgggggtgcagcgcgcggacgtgggctccctgcgcgccatggcatcgcccccgctagacgagcacgtcttcctcgtagagtccttcgacctcatccaggagttcggcctgcagttccagagccggctgtgtggtgagttaggagggcgctggagtgaagctcgaactctcaatccaaatgcttggattcctttcccaccacagtaaatcccatcccgtgggggtggccccgcgatttccaggtagagttgccctgacctaccgcaggctgtgtcagatttcagctctgaccacttctgctcagcctccatcaacaaggagcaacctataatttcttgccctacccgccacagcttaccacaggcttaatgtcaaattccagcaccaaccccctgcacacacggaaccagtgattctcaaagctaagagggatcggctgctccaaagagtcgtggccctcccacatggggatgacttctcccattatcatcttagctcctcccacaaatgctgcaagatctgttctgatctgttttgagtttattccgcccacctcgacttagcacctctccaccttcctacccactcctgcccctgtgtagtcctgtcccagcccactgacgtgtctaattgagtgtctcctcttctgagcctactcacaggggctccttaagccttattctttccctaagccctctcacttggtacggcccttctcaaattagtcatttccttctgaaagccatttgagggtgatgcctgcctctgaccccatccccatccagctctctcttgttggaggcttctgcccatctgttccctactgattctagtcctgtgtgtcctcagggaaggaccagtgtgctgaggggggacatggttgccagcaccaatgtgtcaatgcctgggccatgttccactgcacctgcaacccaggctacaagctagcagcagataacaagagctgtttggatgacagctatccctgtcctgcaatctcactgctcctgaaccttctttggctctccattgccccaacatcagaccaatgagtctggaagggcctttggcagtaaaagcacacctccatcactttacaggcctaagaaagaaaggtattgcctggggtcacataagtccctggtgggagcccacagttcagtgtgctttctgccctctttctccctgttttcaggccagtctctaatcaacctcccaaacttgtttctgttttcttcttttcttttctctctctcttttttttttttttttttttttgagacagagtctggctctattgcccaagctggagtgcaatggtgcgatcttagctcactgcaacctccgcctcccgggttcaagtgattcttgtgtgtcagcctcccaagtagctgggattacaggtgctggccaccacacccagctattttttgtatttttagtggagatggggtttcaccatgttggctaggctggtctcgaactcctgacctcaagtgatctgcccgccttggcctcccaaagcgctgggattacaggcgtgagccactgcgcccggccatttctgtcttcttacaggcacatccttacagtttctcttcttagatactgttggggggtcttcaattaggtgggtgtcccccctcatgccacccattcttgactctgcacctcagctctttgtgtgctgctcacctgagctgcccttgccactcccctctgcctttgcaaatctttcaagactctctctttttaagagatagggccttgctatgttgcccaggctggtctcacactcctgggctcaagagatcctcccgccttggcctctcaaagtgctgggattacaggtgtgagctgcttcttcatttttgtcttctgaaaagctatggcatagaatacctcgcttattcaattcagttttttactgagtaccaagttagtattagacattgtgctaggagcattacacatgttattatctctcagcctcacaacaacctggaaaaagaaatcatgtaatcccaataacccagatgtcagctggggtcttcttgtttctagaaactaaaagttggcttgaactctgatttgatgactgtttaacattcaaatctctctccaagacctctggaaatcccccaagtgcttatcttctggttgtcacctcttgctgtgagcctctgctaaattcatttgatttatggatcctctctcatttctcaaccctgcacatgctgttcttgttccatgcatgttaatcaacctcttcgttggtttacacacttgtgtatgcaggggcatacacaagcgtgtatgtgctaagtaactcatagcgcgtgcacacacacacgaaaaactcattataattgaatattagacagctttgtttctgaaagtcctcagtcagcctagtacaagggatttttcacaggcagcctcaacccacagagttactcatcttcatactggctctcttgttcttttttttttttttctttcctctctccactctcatctcctttccaggaaccccaaatactcacttttttatacagggtaattatcttctctccagtccagctctcggccatctttgcctatccagatcatcaagatgctcaacagggcaatagttccccatcttccatggaaggaagctgtgaatagcaatcactgtcttccattatattcccattttgcaaatagaaaaatggaggctcaaataggtaaagtggccaaacctgtcctctgtaagtcagagagcatcttgaggacaggggccctgactaattaggtcaggatttttggggttggggcccaggcgtaggtattctttaaaatttccttaggtggttgtgctaccagagctgagaagggcagtcctgggcatagactgaccccatttcttcctcagccattgatctgtgtgctgaagggacccatggatgtgagcaccactgcgtcaattccccaggctcctatttctgtcactgccaagttggctttgtactccagcaggaccagaggagctgcaggggtgagcaacacccccaccctcccaccacaccctggactgtggcctccgagggctccaatcagaggcaacatcttgctgtttcttccctcctgccagccattgactactgcagctttgggaaccatagctgtcagcatgagtgtgttagcacccctggtgggccacggtgccactgcagagagggccatgacttgcagcctgatgggaggagctgtcagggtgaggagggctctcctacatttgtgggaggggtaagagatcttagctggtggggtccatcctgactcatcctgacctgtctctcctttcagtccgggacctttgcaatggcgtggaccatggctgtgagttccagtgtgtgagcgagggcctctcctaccgctgcctgtgccccgaggggcggcaacttcaggcagatggcaagagctgcaaccgtgagtgatgggcgggagggtgttctgttggcttctgccccattgcccacatttggagtgtccttgactttgccattgctgtggcccctaggctgtggtgtgaatgtctgtgtgtgttgtgggggtgacattggagggtgtgccattccctccttccatctctttcctacaatcctctactctgctgtcaatgttaatttaaaaatacatatttgatcacattcctcctttgtgcacaagccttctgtggctcaccaatgactacaggagaaagatcaaatgacttacccctaagtatttcaaatggtgagcagaaccacattaatgaataatgaaatcaaattactgggttacaaccaacattaaaaaaaaaagagtggaagacaatatagagtttactgcctgtagaaagagttatattatttctgaaattttagttctgtgtgaaatgtctcatgatgtattgtcattattattatttttactgtgggctgtgataaaaattttgaaaccactgccttaggtcatcacgatctagcttcagccaactccatctgcccatctcctgccacacttgaacatttcagtcttactggcctgcccctccccggatgtgtcaggatctccccagatcccaagcctctgcacgtgctgcatctcaccttctagactgtcccttactgccttggcaaactcctactgatctttcaagactgtcttagatcattcaggctgctatatcaaagtactgtagactagacatttagttttcacaattctggaggctgaggagtccaagaccaaggtgccagcagatatggtgtctaaagaaggcctgttttctgattcttagatggcacacctttcaaagcctccccacgccaacacacacacacacacacacacccctacacacacacacccacacacaccaattttcttgctgtgtcctcacatggtgaagacaggaagcaagccctcttcgacttttttttttttttttttttttgagactaagtctccctctgtttctcgggctggagtgcagtggcgcgatgtcggctcactgcaacctctgcctctggggctcaactgattctcctgttacagcctctggagtagctgagactacaggtgtgccccaccatgcttggctaatttttgtatttttagtggagatggggttttgccatctcagccaggctggtctcgaactcctaacctcaagtgatctgcccgcctcagcctcccaaagtgctgggagccaccatgcctgacctcttcagactcttacaaggacagtaattttactcataagcgctgtaccctcatgtcctcatctaatcctaattaacctccaaagatctcacctccggagactatcacataaaggcgtagggtttcaataaatgaattttgggaaacacactcattcagttcataacaaagatcagatagaaggccatcatctccatgcagccttccttaacaactccaggaagaatacactattcctaccttgggatccctgcatgatcttctcttctagcactttccttgaccagagcacatagcatgtctgacttgctctgctctgtcctcatggaacaggattatgttttaattatttcaaaacctttgaaaacctccccacgccaacacacaccacattttgggcctagcaactttcctggctcagaataggggaggtgacattgtagagtcattcaggagcatgggttttggagtcagatggacctggcttcatgtcttggctcagtcagtactagctatgaaatctggggcaatcactttatccatcagaacctcaggtcatagaaaatggggacaatattcaagcttattgggaggattgagaatatatataagcacttcacccagtacctaccacatggtaagctgtcggtaaataatgtttttgttattattattgttaatactggtagagtgcttagaagtgtgcctgatacatagtagatgatcaataaatggtagttattgtggtcattactatgattgttgttaaaaaaagatgcttttagcagagtggtttgttctaagcactgaataaatgtcaagggcgatgatgagggtgatgatgatggtgatggtgatgatgatggtgataattattattacttagcacactgcctggcacaggaaggactcaggaaatgttgtctgttatataataaatgtttgcgaatgaacgactagatggatagacagctgctgccagtccagaatctggtccctcaattcaagcttttctggctgtgcagggtgccgggaaggccacgtggaccttgttctgctggttgatggctccaagagcgtgcgtccacaaaacttcgagctagtgaagcgcttcgtgaaccagattgtggacttcctagatgtgtcccccgagggcacgcgggtggggctggtgcagttctcgagccgcgtgcgcaccgagttccctctgggtcgctacggcaccgcagccgaggtgaagcaggcggtcctggccgtggagtacatggaacgcggcaccatgacagggctggcgttgcggcacatggtggagcacagcttctccgaggcgcagggtgcacggccccgtgcccttaacgtgcctcgtgttggcctggtcttcacggatggccgctcccaggatgacatctcggtgtgggcagcgcgcgccaaggaggaaggtgggcttggcatgggacacagtgggctggggttgggtcagacgctgggaggcagctttcccgaggcctggggcaccctctgagaccccggccttgcaggcatcgtcatgtacgccgtgggcgtgggcaaggcggtggaggcggagctgcgcgagatcgcctcggagccagcggaactgcacgtgtcctatgccccggacttcggcaccatgacgcacctgctggagaacctcagaggcagcatctgtccaggtgagcgcatctctctcggggctcctcctctctctcattgcccgtcctctgatatctccccttcctattcactccctgcccactttgtagttatagccagaggttgggctcactagacagagctttgctactccaaatgtggtctgcaggccagcggcagggcggtcacccggtagcttcttagaactgaaacatttctggtgctctccagaccgaatgaatcagaatttccacttcgacaagattctcaggtgatttgtaagcatattaaagtctaagaaatcctagactaggctacctgtcccccaaatcagtggaggttcagaataatttgggaaatttttttgaaggcacaccagacagcatttgtaagtggagccacagcatatatccctgaacttgttagaattcaaccttatgaacttggcaaagtggcaggactgaatatattttaagtatgcaaagactttttttttttttattggggacaacatacctcataagtgcaatccctctacttcatcatctggtgctcagctgaggaaaaagagactgactctacctgtgaagaaggggactcttgaatcgcatgcagtgtactgtgctctaggtgatacagggaatgtctccagggtaacttttaccctagagactttagacactagcccaggcttaagatgtgactcttcttcccatttatcagactgcagctccagaaacagactaagtagggctggtttgggtctggagaatttgcctttttttttttttagatatatgtaggggggctgggcgcagtggctcacacctgtaatcccagcactctgggaggccgaggcggctggatcacttgagatcaggagttcgagaccatccttggcaacatggtgaaaccctgtctttaccaaaaaatacaaaaattagctgggcaaggtggtgggcactgaggcaggagaattgcttgaacctgggaggtggaggttgcagtgagccgagattgcactactgcactccagcctggtgacagagtgagaccctgtctcaaaaaaagtatatataatatactatatatactatattatataatatgtgtttgtgtatgcatgcacatgcacgtgcatgtatatacacatacaaatatacacatacagtccttcccccaactctccttccctccccgctctcagccaattctaattattgtggctctttcagattaggggctctttcagagctcttcctatgtgactcttatgggccctgcagtgtgactttggacgagtcacttaccccacacctaccttaacttttctcttcggtaacaggagaggcactggctgcccaaggttacctctagttctagagttctaagagaagtctgggttttgtggttgaagctctttatcaattggtggtatgactgttccctgtctccaaccctttgtttagagaaacaaatctgtgaagttaggggtctttgctggattccagcagtttgttcatagtacatataagactaagatgaagagacaacttttaaatcattatggcagtgttttcaaaggttaaatggcaggtattgtgcttattatttcaccacgtgtaatcctttttcttttttttcctaaggtacttttattgtagcattttttttttctatgtcattccctgtaatctttttttttttttttttttttttttttgagatggagtctcgctctgtcatccaggctggagtgcagtggtgcgatctcggcttactgcaacctctgcctgccaggttcaagcgattctcctgcctcagcctctcgagtagctgggacaacaggcgcatgccaccacgcccggctaattttttctagttttagtagagatggggtttcaccgtgttagccaggatggtcttgatctcctgacctcgtgatccacccgcctcagcctcccaaagtgctgggattacaggtgtgagccacagcacctggcctccctgtaatcttaacaatggcacatgcttatagaatttcagtgaatctaagataccattcattttaagattcatcactaccttatgtactgctaagaaaaaacatgtgccagttttaattgtaaggcctcctgcccaacccccaagatgttgatgtgtggggagatagagttggatcaggatcagtggttcctaaaaattaggtcacaccagaatcacctggtggacctttaaaaacacaaattgcagctgggcatgatggctcatggctgtaatcccagcactttgggaggccgaggtgggcagatcacaaggtcaggggatcgagaccatcctggctaacacagtgaaaccccgtctctactaaaaatacaaaaaattagcagggcatggtggcacatgcctgtaatcccagctactcgggaggctgaggcaggagaatcacttgaacccaggaggcagaggttacagtgagccaagattgcaccactgcactccagcctgggagacagagctcaaaaaacaaaacaaaaacaaacacaaattgctgggcttcaactctagattttctaattcagcaagtctggggtgttgtctgataattagcatttttgataaattcctacacgatgccgatgctgctggtccaaggaccacactttgagaatcactggtctagttgaaatacactataaagcagtggtttccaacctttttggcaccaggcagtggttttacggaagacaatatttccatgatggtggtggggagaatggttttgggatggttcaagcacattacatttattgtgcactttatttctattattacattgtaatatacaatgaaataattatacaactcaccataatgtataatcagtgggagccctcagcttgttttcctgcagctagatggtgccatccgtgggtgatgggagacagtgacagatcatcaggcattagattttcataagaagcctgcaacctagatccctcacatgcacagtttacaatagggtttgtgctcccatgagaatctaacaatgccactgatctgacaggaaaggagctcaggttgtaataggagcaatgaggagcagctataaatacagatgaagctcccttgcatgctggctgctcacctcctgctgtgtggcccagttcctaacaggccatgggctggtactggtccatgtaatgtgctggtactggtccatggcctggggattggggacccctgctgtaaagtatttacttgaaccaggcagtgttctagatctgtgctttttcaaaaaggtaggcagtacctatttaattacaattgattaaaataaaatacattttagtcctttagtagcaccagtcatatttgaagtgttaaacagccacatgtggcttgtagctactgctttggacagggcagatgtagaacactttcatcattgcataaaattttatttggagagtgctacacaaagtgtggtccacagaccaggagcatcagcatcatttgggagcttattagaaatgtaccttctgagcttcttctccattctgaagcagaatctatattttaacaagctctcctgatgattccaatgagcattaaggtttgagaaacagtcttgtaagttgtgcgtgagcacacacacacacacacacgtacacaggtgaatgaatcctcgaagccactaatgcgtacactctttcattatatccattttatagatgagaaaactgagcttagaaaggttagtgagtttttcagtatctcacagctacttagcttgggactcagcccaggtctctctaaatccaaagcccatatactcaaccataggcccagtgcagggaaatcagagggccaaagctagggcaatttctcatccccctgaccctctgtgtccggcttgcagaggagggcatcagcgcagggacagagcttcggagcccatgcgaatgcgaaagcctcgtggagttccagggccgcacgctgggggcgctcgagagcctgacgctgaaccatatcctttggggctggtggcgcgggctggagggaaagtgaagggacctcggcgaaccccaacggcctccttaaccgctcactggcccagctgacggcgcgcctggaggatctggagaaccagctggccaaccagaagtgagggccacggacggcccagacccgggctggggcgcggcaccacggacggtgccccttgcgcgccatcggtgcgccggggccaggcagaacctgggcccgtccggcttgggctgtcggggcggaggcgctggcgggcttccggcattgagctgagttggcctcgcccggaccattaggcggactgcggcgtcagggggatagcgggtggtgagggaaggggcacgtgctagaccggcacgccctcgccgcgtgctgcgctcagttctttgttggatttcttgtttgtgttcttaaaaaaataaaaaaaactgatttccacggggtccgtttttgggtcttgctgcgccgcctgggggaggggaagccagacggagcgtgctgtggcggcgcccgggcggcgtctccttggagaaaggcgcattgtgcgggggtcgggctcgggggcaggagacccggcgctgcttccccctgcttgtttattcagccgagaacagatggctccttatgcaggctgcgggaagggagggggctcaacaggaatccttggggtctgagtaagtctgcgccactccattccccagcggactgaacgcttcgctcccggccacgcctatcccatgatgcccccaaatctggctcaaaagctgctagtactgagcgctggtaaggggtgcgggggtggcgttggtgggaaagtgagaggcagtaattgaacccctaaatggatggggtgggagtggatagatgagctttgaccgattttaactctctcctgcactaggtaggaagagaaggaggtatcagctaggacccctgtctgtccagcctgtggccttccttctgtcatcttatcaacccctcccaaaacacctctatcagcaaagaacacaaaccagtaccatttcccgagtgcatgtaagaaacaacgaagtttaaaatgcttccagtcctagagtgatttggggaaaattattttgtgtttgtttcctcatctgcaaagtggagactggaattgttacccccaagcgtgatggggagaatcaaggacattcttctaaggcatgtgccttgtacctatccctcaattaatggtagctattaactgttcttatagtaacagctaacatatttagtgttgggcattattgtaactgatttgcaggtattttcattttatacttggaaccagtgaaataagaattattgcctttatcatccccattttacagatgaggacactgagacacagaaaggttaagtttccaacagtaacataaccagtacgaagctgaaccaggatgtttcctatggctgctctaataagttaccacaaattgagtggctagcaacacacatttattaccttacagtttttaggtcagaagtctaagatgtgttggcaaggctttattccttctagaggcttttgtttcctggccttttccagcttctagaggctacctgaattccttgggtcatggccctacatcacttcagactcagtttccatcagcacatctctttctctgactctgaccttcccgtctctgtcttataaggacccttctgtttatattggcatgaccttgataatcaaagataatcccatctcaagctatctttttttttttttgagatggagtttttgctcttgttgcccaggctggagtgcaatggtgcgatctcggctcactgcaacctccgcctcctgggttcaagcgattctcctgcctcagcctcctgagtagctgggattacaggtgtatgccaccactcccag

SEQ ID NO: 672 - DNA, 1425 bp, Homo sapiens
gggttgaccaggacagttccccatctcagctggtgattgggacagagactccttgttctcctgcacacctggctcatggctcttacttggtgtgtggaggaaggaaaaaagaagaccttcaccatcacctctccccattcatttattcacagcacttaccaccctctacagtgatccccttggaagatgagctccatgagggcagggattgtgtgtatcttgtatatcttcatatgctcagtgtttgcacaatgtctggtgcacagcagggtttcaatgtatgaatgtgtgggatagtggcctggtagggcaaggttacacagcaagtccaggacagagcctaactctggagcctcagactatattctgccagtccaagcaagggaatcctgatttcggcctgagagatgcatcttctagcaaagtcaacatcgggatggctcctgagctttccttctcagaggggtgggcttcctacttccccctcccagactcccagtctgcaaggccaagatccatttccaggagaaaatcaatatttgatgttcccttccttccccagcattggttcagagctctggaaatctcctgccctccttacaccacgcagataggaaatctctcctttggcttttaccttctgggcccaggccacccactgctgccgtggattttagccatattattttctgctgctctgagtgccaacagcacactcagcactagacacaaacatgcaaagacgcagctcttgcctgccccaaaggcttgctgggtaagttaaacagactgtaaaatgcagacttcaaatatgccagaggcaaaggcatttaaaattctcagcgggggctggaaagagaacgcttttaaagtcttttcatttctccctcttcctttgccttcagcatcgagctgcctgtgagttgtcctgcctcttctgtctatgaccatttaaggatgactggtccttttgtgagcaggcaaaggctttgagatgttggctgtgaatgtggacagctcttcccaggctgcctgaaagagcggaggcagctaaacttggcaacaaatatttccaagcctgctttccattccatcatgcagaatggtgttattaaattgatgattcaggatctcaaaccagcagagctctgtcctttgggagaaacataatccatatgacaggtttcaccagggctatttctgaataccagaaaccagtgcctaggacagtgtagatcagagagcaggtgagctgggtgctttgggatcagaagccacctgggccagagttttgcaggtaacactctgcagtggacatgcctgggtcaacctggtgcaccgagtccatgctgtgttcactttggtgtccttttctcctgacaagacttaacctggtgccatatctctcctaaagcatgtgaggag

SEQ ID NO: 673 - DNA, 1933 bp, Homo sapiens
ccggtgagtgtgtaactcttgggaagattcttttctaaatacaggtataaagagaaggtggagggtgcgggtgcatggaagaaatactatgtgtgaagcagattcaccttcctgggaccggtgacatggtggtgacagtcaatggcttggacagacagacgggcacagtggcatttggaaccctctttggtgccctcccattctctctggaattgtttcaagtctgctggttttcaaacaagaaaagacctttctggccatagggagaatagcagggagtctatgttttggtggttacattggaaacatcttaagcaagatagggaaagttgattttaggcacacatgtaccctccttgacagcaggaactcagacttcaatcttgggggtctaagaccagaatattttccttctgccagaaaagaatcttgcacatatactcctgaaggcatgagtgtgtggtccatggcaagaaatagctaaaggctgctttccaggacccaaagccccatttaatgcaagaaccagagaagtgttctaggccattagtggacaatgtcatgtttggagaaagataacaacacaaataatgtaacctttccttaaaaggcagaactcaatccattttatttgatgcttattctaaccctaaccctgggtcacctggaatgaagaactctatgaataatatttgattttacaacgtgttatggttatgtgaaaactaaacatttgccttttataaagactgacaaaatataaatctttattctaaccctatccccaaaactagccaggccacaccccagatgttcttattgactattggaaagatagaaaaggcgttgtgttttttgtttttttgttgttgttgtcattgttgtttttttcagaagaccagtgtctcagttctgtcttagtagtaccacacccgtaaccgtgttttaaaagtttgttttagcctagagacagatcatacgagttcaacaatgtacagtgtgattgaaaagacaggttggtgtctatttttctttttaaaatatctgaatgtgtatttgtaatacgtaaaggtaaaaaaaaatagtgccaaaaatgtgcaaggcatctcattacagctcatgtacgtctgtttttataagatcaatattaaaacccattgggattaaatatttttgaataggatacactcttgagaaactcgagaatggactgagccttcctacaagccactctttgtttttaaaacagtggggaaatacgtttacagagattgtgagcttcagagaatgcatgtgatggtgtgtattacatgctaattcatataagctgtatctgtcagctaccaccctgtgctttaaaaatgcacacactcaaccctctttagcttggagctcagctttttgcttttttttttttttttttgtagaattatttagctaacataagtattctgattgctacctgatggccattcttacttagtttcatagatgtgctttaactatgatcctttgaagctcaccccttggagagcctacagaacctcaggctgatagctttgaagactgccaaacagcccagaaggaagcaaagcatctgcataatcaggagggttgtataacaagtagtgatttggcaaatatgtgggtagctttaggctgaggcacgggcctcaggcaaaaatgcccttcgagtgaatccgaagggcatgatcttcctatgtccttgactaggcatgacgagtcatttgaggtcagatattatttgagttgttcagcacccccaaaggtaggcattctcctgggaaattttcatttccattttatcgccaaacaaaataaaaagcaaaacaaactttctaagctagaataatgaaattaagtcattttccactttgtatatattgatgctaataaaacagatgaaaaagac

SEQ ID NO: 674 - DNA, 269 bp, Homo sapiens
gacactctttcaatgatgaaagagcgtgtaatttatgctacaagtgccagaatcgatcaccatgttcagcaagccactctcaagctgtggtaataaacacacaggcttgggaggcaccagcggccccactcatacagtgacaaggatttgtgatgggaaaaaggaggtgccatgtttggaaatgcaggggtgagctctggtttctcctggggttctggaatatctcagccctcaaaatagaggagactcaagtgcactgattctctaaa

SEQ ID NO: 675 - DNA, 176 bp, Homo sapiens
gtggcagcatcacctccacggctctttcaagctgccctgttcacacagctttcttcagagagcagcccactcctgaggcactggatgggattgtcctggctgaaaccagagacacagccctgcccttggaaacagaggagaaaacaccttgattctgggacctatggtagcagtgg

SEQ ID NO: 676 - DNA, 2883 bp, Homo sapiens
tggaactgtccctcctaggggggaatgttcactttttttttgtcaggttttatgggggggcaggaacatggtttctggaaaaaatcccattcttttggaattggcccattccttttgggcaaaattttcaaaaggctggatcaacttggtgtggtatctctgatggcttagagtaatggcaatgagggtctctgttgtgatgtcactgagtactttctggggtgcttctgggcaccccttatgatgtcacaggaagcagttcctcagaggttacttcctgtgaacataagggagcaggtacttcctgtgatgtctcaatgagttcttccttgaaggtcactttggtgatatcatgggaaggtgtacttccggtgatgcctagaggtcacgtcctgtgatgtcattaggctgaagcatgtacttcctgtattggacagtgaccagtctctgacctgccttctccctccacacccttctttggtgggtgttggcctgggggtcttcctaggaagagaataaggcacgggacttggatccaatctggaggactctaacggaaaaaaaccaatattgtcagggtcatctccattcaaacacgtcaagtctgcgaactcgccctggagggaggggtgggagatggacctagtgcaaactactgttaaagacctcccttcccacccctgccttttgtgtgcatgcctgtgtctgcgtggctttgtttcattgaatcgggtgagccaagtgtgtggtggctctgtcaggccagtatggccaggtgtagagttcagtgagccatagtagggtcccttgggccagaatgcttcgtgtggtctgataggttagattggtttggtggcttccagcaagctggcatacttcggtgatgtctgatggatcagaatgttttggtgtgctcaccaggggctctggagaactagaatgttctgatggagtctgacaagccaggcggccttgagagttggtttaggagtggctccctgagtgctgtggctgtggtcagctctaaggacctgttggcagactgagatttcagggcctgacaaccatgtagactaggatagctgagacctccctctacccccacccatctccctctcttccttggagaccacctccactttctccaacccaaagcagggcgcccagtgccctggttccatcatcagcatctctgggggaggggcgccccatgcccaccctctcccccatttgtccgcctcctaggtcttccaaacccttttcttctctatgactttgggggaaatccagcctccttgtctctctcctaaaaaaggagggaagaaaagccacagagacaattcctgcccctaaagcctaggagatccctctcccttgctagagagccacccccaaatcaaaatgtgaaaatccctagaaagcaatagccttcgaggtaccttgcactgaatttcccaccccagcccttccacccgatgggaggctgtaacttgggcactggggtgactttttccatgcccttgtcatctccagggtgggaggcaggccccacttcccctcccctatcccccacttcccattgttgttgccccacccctaatctccagactgaacccagatggagatctgagtgccaaaacaattcttgatgtaactttgtacatatcttctactaccgttgggggctcttggggttagaggtgggggcggctctgtgggccattgctcccctccacctctcaaaagaccttacagtatttcacagtatctctacccgcacgcgagtattacagtatctagctggaatatccccctacagccccccaggaccctatgaggaagggaaggagccagggagagtgaagtaaggtctgggactggggaggtgggatctgaatgaactcatttgcatatcatttgcatcctccgcttggcagccgctttctacaaactcattcactggagtctgggtcccaatcagccgggtccaggactcctctcacacagacacatctccggaggctgggcctcctgaaaagtgtttgcttggggtgtctgtgtaacaacccctccctattcatatttcttggggaccccctacccagccagccagggtgatctgaaaggtatactttgctagctcagtgagctagttcactcaccatgttggtgagcagagagccacacctttccccattttaccttgggaaactcactccaccatctttgccatctcttgaaagtcccttctgcaatctgacctcaatcttttgtgctgcagtttgtccagaggggacacagatgtggggtcagggatgaggattattgaaaaacccatcatctctttttttttccccgtctccctattagccaatccgatctcagagtctctgagtggcctccttgcacccttctcttcagcacccagtaggtgcttaataagtgtttgctgcattggattatctccctattccttctcatttgccctctagcttcccataccttctccaagtgtcttcctccctttctttgtctggctccctatgactttctatttttttttcctccgtgtggttcccattgttttctgtcctgtctctatcttagtctttgtctgtcttcctcctttcctcaaatgtctcaactctctctccccaatttccccatttaaaaaaaaaaaaaagtgccaaacttccttggaactgagccgctctggggggagaggaccttggatagaggggaggaaatgggaccatttctctttgaggaggtccctaagaggcattgcaaaagtgtggacatggagctaaattgggtcccccttccacagccctcccaccctgagtttttcttagaatctttgtaagaaaaaaaaaaaaagac

SEQ ID NO: 677 - DNA, 350 bp, Homo sapiens
caacttacccctatccttttgggtccccccaaattccaccagccaaggagaatcccacttgccaacttcctggcaaatctatggaaactggggaggaggagacaagctcaactcctcctctgctagcccaaggggcggtaccaactggattcaagagaaggacctcaaagctcctatgagaagagggggttcgatgtgccaaattaacctccttcatcccccatctcagggggctctgagccaacctgcccagccaccttcttctgccctgtcccagccacctctacatgggcaaggaggcttcactgcaataattagtaggggtggtgatcagaagacaatgattttgc

SEQ ID NO: 678 - DNA, 555 bp, Homo sapiens
ctggggaaggggggcaagacgttggtggagtaccaggagctgacgggcgctcgcatccagatctccaagaagggcgagttcctgccaggcacgcggaaccggcgggtcaccatcacgggcagccccgcggccacgcaagccgctcaatacctcatcagtcagcgggtcacctacgagcagggagtgagggcctcaaacccccagaaagtgggatgaggcctgtggtgtgtgctcccacccttttctctcctcccatctcctcctcttccctctcctcctcccccccaactcctgacctcagcttggtgtagtcctgctcctcttgggatggggctggggtaggcccgactgcaccctccccttctggtagtcataggcaggattgagtgacggttgggaagggggctcagaagccccctccccagcccggaactgacccctccttcctccctccctgtgcttggctgggcctgacccttcctgtcccagggcccaggtctgtgtgatatctgtatatattgcattttgttgattttaatagaaaacaaagcgtta

SEQ ID NO: 679 - DNA, 4243 bp, Homo sapiens
gaagatgatgagaagcttattgaggaaatccagaaggaggctgaagaggaacagaaaagaaagaatggaggcaagtgcccctccccaggcccccaggacagagcagcagccaggccatgcaggcttctgctggcctccctgagtgtcctggcactcaacccagcacaggagaggagggggtgctgtccctcaggtggctatagacctgacttcacccacgcggccacatctcaggcttatggaaaggccttcaacgccttgaatatagttttggcatctccttgatggtgaggaagtcccaaggggtgggtttgagctcaggaatcaatcaagccacacctggctaaagaaaagtagacccagctgatccttctgaggctgaaaagcagtgaagccaggtgtgttggcacacatctgcgatcccagctcctcaggaggcagaggtgggagcatcactggatcccaggaggttggggctagcctgggcaaaatagcaagaccccatctgtttttctttaaaaaaaagaggctaagtgcagtggctcacatctgcaatcccagcactcgggagggtgaggcaggtggatcagttgagcccaggagtttgagaccagcccgggcaacatggcaaaaccccatctattaaaaaaaaaaaaaaaagtaactgagtcactgaggtggcccatcaaggccctggctctgaaggatgtctggctgggtgggtggacgtgccaccttccaaggtgccactgtggagcaagacactggtggaagtacagatttgttcttggtttcttgcagtggcatttgggaggtgtccacgttttgtgctttgatcagcatgtggagccactcccgtgtccagaggtcgctgccctggtcccaggctagattccattgaggttggtttaatgtttttctccactaatccccacatccctttcagagaacaccttcaaacgcattggacccccgctggagaagcctgtggagaaggtgcagagggtggaggccctcccgaggcccgttccgcagaacctgccacagccacagatgccaccctatgccttcgcgcacccacccttccccctgcctcccgtgcggcctgtgttcaacaacttcccactcaacatggggcctatcccagccccgtacgtgccccctctgcccaacgtgcgggtcaactatgacttcggtcccatccacatgcccctggagcacaacctgcccatgcactttggcccccagccgcggcatcgcttctgatggccccgaatccccattgagcagcacaaagcccgtttggggtaggagtgtggatggagaaccctcccccaaggctggtgtctgtaccattgcatcctaagtcagcttgaagggtaggctggttttcttcccacccctttcctagaagggctactgctcctggaagagtggacggatccataataaagacgtcccaaatggtggagttcggagagagctgcgatgtgaactgcccctcccctcgcatcccccaggccaccaacggcagtccttctgccttgtccatggcataggccatagaccaggtccctgctgctcacacctgggcctctcctcggagccgacccctgggtagcaaggcagccgagagcatctccctggaggggcccacggttgggccaagggcagagggggctgcacctgcgggcctgggaagcattgctcagggtggggggctgggaccatggcccgcagaggcactgccacagctgtgagggccaagatgctgtccccccatccaaaacccgtgcgccactgcagtgagtgttgagggcacctctcctcccctcttacacctactcagatgaggcagcagcagacccatctcgcggcgggggttttgttctgttgccgcctaactttctcatcctcggtctctggaaagtcaggctgagaaatcctttcccaggccaggccgctgcggtacactggatggttctgaagctggcccattgaaagagcctcttaaggcagctgggacagaggcctggtggccctgctgggcagcccaactgctgggggagacgtttctgccaccctgggtgatgagcagcttttcccccctggctttctgggggaggagtgggcctccttagggagacaggtgaccctgggtgccacccctgccccgtgtgtgccccgggtgttctcagtggttgctgaaggcaggtagagggtgctgtccagtatcccccatgtgaaggtcacttcccttctcatggagtcagctgagcatcagctcagccctgccatgtccccactcaccctcctcgcctcctgtccggccctgggtttctagcggtgcctgaggcatcactctggcccattgacagatgagaggtctgaagccttcctggccacaggcatcactttctcctcctcctcatgccctgccttgtccttgtcgtgttgccatggggttctgagaggctgggagttcacagacctcagacacagctgagtccgacaaccattggggtggggctgcatcagtctccggagtggcccgccacctcctgaagcagggcctggcccacccaaggtgcctggggcaggcgggcaccgtcattcgctgccattggcttctcagatgtatttcaaggactaaagtgggctctaagatctaagatggcccggcgcggtggctcccgcctgtaatcccagcactttgggaggccgaggcgggcggatgagttgaggtcgggagtttgagtccccgtctctactaaaaatacaaaattagccggacaaggtggcgcatgcctataatcccaggtactcaggaggctgaggcaggagaatcacttgaacctgggaggcagaggttgcagtgagccaagattgtgccactgcactccagcctgagcaacaaaagcaaaactctatctttaaaaaaaaaaaaaaaaaaactaagatacccattctttctgcctttgcccaggatggaggctttgaagacaggtggtcacctggacctggggtaagggtgcgcagggaggccgggcttgggggcagcctgctgctatgtccttgctggcgcccatacctgttggactgcctgaactttgctactagcctgaacgacagtgccttggaaaggcaggctccatgcggcagcaacaggattgtcttcggtaccttaaatatgctccctgtgcttccccagggaggatctctgggagcagagggcggctgtagacatcacagctgaagaggtgacctcaggccctgggagcctcagctccctctgccctgtaccctaggcacgtggctccagcaagagccccaggcaggacaaagggagcaggcagcagctgcagaaacagccctagacaggtgctggcctcaaccctggcaggggagggggagcccagagtgatgtttctcctaaggccaaaccccaggggtgggtcatttgagaggagttccagctgttctggccacactgggctggtggggaaggagcggcggcctctttccttggagggtccctgattcctgaggatcctccccgagccaggcacgggggaccacagggctgccgtgagcacccaccctggttctccaggcccctctgtccagaggcagggcctgaacctcgggctcctgcctggaccagtgacagcattggggagagaagcactgggggtcttcagaccagccagcaaggggccgtgccagtgcccagagagcaggtcagacaacaggcaaccctgaggcagctggctccctctctctgccctgcagggcttgccgcagggcgtgaggctccccagccacagccccctcttacttgccttaaaactggagagaggaatctagtatttgcacttagcaaaatatttaaaaactgaaaaaaatgtgcatgatctgtcactttgtataaaaacaagaaacgattagttcattaaactttttctttaccttctggtagtaaaaatagataaaataattccgtttcaactactgtgtgtaaaaagcctgtatcatatgtaactgggacttttgtaaataaatgtttgtgcgctctgctccctccagcttcgtctctccaccccgccatccggcaagttacaggggccgccgacagattcgtccaagtgattgggtctaaaccagcatcctcacctccccgactgggtcctggcaggagcaggcccggaaggcccagtagtaagatccccaccactcccctgcc

SEQ ID NO: 680 - DNA, 3461 bp, Homo sapiens
tggtttcttgcagtggcatttgggaggtgtccacgttttgtgctttgatcagcatgtggagccactcccgtgtccagaggtcgctgccctggtcccaggctagattccattgaggttggtttaatgtttttctccactaatccccacatccctttcagagaacaccttcaaacgcattggacccccgctggagaagcctgtggagaaggtgcagagggtggaggccctcccgaggcccgttccgcagaacctgccacagccacagatgccaccctatgccttcgcgcacccacccttccccctgcctcccgtgcggcctgtgttcaacaacttcccactcaacatggggcctatcccagccccgtacgtgccccctctgcccaacgtgcgggtcaactatgacttcggtcccatccacatgcccctggagcacaacctgcccatgcactttggcccccagccgcggcatcgcttctgatggccccgaatccccattgagcagcacaaagcccgtttggggtaggagtgtggatggagaaccctcccccaaggctggtgtctgtaccattgcatcctaagtcagcttgaagggtaggctggttttcttcccacccctttcctagaagggctactgctcctggaagagtggacggatccataataaagacgtcccaaatggtggagttcggagagagctgcgatgtgaactgcccctcccctcgcatcccccaggccaccaacggcagtccttctgccttgtccatggcataggccatagaccaggtccctgctgctcacacctgggcctctcctcggagccgacccctgggtagcaaggcagccgagagcatctccctggaggggcccacggttgggccaagggcagagggggctgcacctgcgggcctgggaagcattgctcagggtggggggctgggaccatggcccgcagaggcactgccacagctgtgagggccaagatgctgtccccccatccaaaacccgtgcgccactgcagtgagtgttgagggcacctctcctcccctcttacacctactcagatgaggcagcagcagacccatctcgcggcgggggttttgttctgttgccgcctaactttctcatcctcggtctctggaaagtcaggctgagaaatcctttcccaggccaggccgctgcggtacactggatggttctgaagctggcccattgaaagagcctcttaaggcagctgggacagaggcctggtgcgcctgctgggcagcccaactgctgggggagacgtttctgccaccctgggtgatgagcagcttttcccccctggctttctggaggaggagtgggcctccttagggagacaggtgaccctgggtgccacccctgccccgtgtgtgccccgggtgttctcagtggttgctgaaggcaggtagagggtgctgtccagtatcccccatgtgaaggtcacttcccttctcatggagtcagctgagcatcagctcagccctgccatgtccccactcaccctcctcgcctcctgtccggccctgggtttctagccgtgcctgaggcatcactctggcccattgacagatgagaggtctgaagccttcctggccacaggcatcactttctcctcctcctcatgccctgccttgtccttgtcgtgttgccatggggttctgagaggctgggagttcacagacctcagacacagctgagtccgacaaccattggggtggggctgcatcagtctccggagtggcccgccacctcctgaagcagggcctggcccacccaaggtgcctggggcaggcgggcaccgtcattcgctgccattggcttctcagatgtatttcaaggactaaagtgggctctaagatctaagatggcccggcgcggtggctcccgcctgtaatcccagcactttgggaggccgaggcaggcggatgagttgaggtcgggagtttgagtccccgtctctactaaaaatacaaaattagccggacaaggtggcgcatgcctataatcccaggtgctcaggaggctgaggcaggagaatcacttgaacctgggaggcagaggttgcagtgagccaagattgtgccactgcactccagcctgagcaacaaaagcaaaactctatctttaaaaaaaaaaaaaaaaaaaaaaagatctaagatacccattctttctgcctttgcccaggatggaggctttgaagacaggtggtcacctggacctggggtaagggtgcgcagggaggccgggcttgggggcagcctgctgctacgtccttgctggcgcccatacctgttggactgcctgaactttgctactagcctgaacgacagtgccttggaaaggcaggctccatgcggcagcaacaggattgtcttcggtaccttaaatatgctccctgtgcttccccagggaggatctctgggagcagagggcggctgtagacatcacagctgaagaggtgacctcaggccctgggagcctcagctccctctgccctgtaccctaggcacgtggctccagcaagagccccaggcaggacaaagggagcaggcagcagctgcagaaacagccctagacaggtgctggcctcaaccctggcaggggagggggagcccagagtgatgtttctcctaaggccaaaccccaggggtgggtcatttgagaggagttccagctgttctggccacactgggctggtggggaaggagcggcggcctctttccttggagggtccctgattcctgaggatcctccccgagccaggcacgggggaccacagggctgccgtgagcacccaccctggttctccaggcccctctgtccagaggcagggcctgaacctcgggctcctgcctggaccagtgacagcattggggagagaagcactgggggtcttctgaccagccagcaaggggccgtgccagtgcccagagagcaggtcagacaacaggcaaccctgaggcagctggctccctctctctgccctgcagggcttgcgcagggcgtgaggctccccagccacagccccctcttacttgccttaaaactggagagaggaatctagtatttgcacttagcaaaatatttaaaaactgaaaaaaatgtgcatgatctgtcactttgtataaaaacaagaaacgattagttcattaaactttttctttaccttctggtagtaaaaatagataaaataattccgtttcaactactgtgtgtaaaaagcctgtatcatatgtaactgggacttttgtaaataaatgtttgtgcgctctgctccctccagcttcgtctctccaccccgccatccggcaagttacaggggccgccgacagattcgtccaagtgattgggtctaaaccagcatcctcacctccccgactgggtcctggcaggagcaggcccggaaggcccagtagtaagatccccaccactcccctgcc

SEQ ID NO: 681 - DNA, 344 bp, Homo sapiens
tttcaggctgtgcccactcagacccagccctctccaaacccttctcatatccaccacttgcacgcagctcagtgcatggaggccctccatccccccacctcaccaggcagctgcctgccatgctcagacccctctgcccagccttgtggatggcctccttgtggaacgccatcaggctgatgaaggaaggaggccttcggggaaataggaaggaacggtgtgcagcccaggccccactggccagcagcaggcttcgggcttgttccatggccataagcaacaagcggcctcctcactgtcccacggggcctcagcactgcatgaagctacaggttcatccttct

SEQ ID NO: 682 - DNA, 195 bp, Homo sapiens
ccaagttcaagcgatcctcctgcctcagcctcccgagtagctgggattacaggcgtgtaccaccacgcctggctaattttttgtacctttagtagagacagggtttcaccatgttggcgaggctggtctcaaactcctgaccttgtgatctgcccgtctcggcctcccaaagtgctgggattacaggcgtgaggc

SEQ ID NO: 683 - DNA, 1899 bp, Homo sapiens
ctattaatgactgtataaaaactgggatctagaacttttaatttgggggaagtgaatatcgctttttagctataaactatacatccttaaaggtgatatttaagtttaaggtgatgtgtttaaaaaattattaaacttccatgtctacttatgatagaagacataacaactcaacaaataccctaaccacaccatccatctgcagatagaacatcatcagcaacattgaaataccccatgtgctctctgcttcctaatctcagcgccctcctgtcctccatgatgaatgtttctcttgaaatttactttgttgtctttctttcacttttctgtgtcgttttaccattacatgcattattcctaaagtcgttctttttgttggattttgcttgctttcaaattttatgaaaatggcagcaaaatgtttatattcttctgccacttgctttttttcatttaatattgttttgaagatctatgcatactgatgcacactgatcatattttcagtgttgtactaattacagtttatgactattccacaatttgttcatccatttattccctcatttttgtgtatttggtttgttggaagatttcctggctttttttttctattatcaactgggctgccacatatgtctttatgcctgtttcatgataaatacgtgcaagaggccaggctatgcaaagtgccagctttacaagatcatgagcagctgttttgctacgtggtattgccagtttagactcacacaagtggtaaagaagcatccccagtgtcctaaatccttgccaacacttagtgtcaccaggcttcttaatttttaccaatctggccagtggataatagcattgaaaagttatttttattgtgatttggagtccaatattttttctgtaagaaatgcatgtacaatgttataagaacatgcaaaaatcaaaatactttataaatgttcactttataaaaaatgaatgagaaaaacataatgcattttacataaagaaaatctgtaatgcttttgttattggctgggtattttcacaccttccaagtggtggctgttgataaattcagcaataatacctttatgtttattaatattaaatgataatgtcgaattaattaaatgaagttcaatttattgatagttattcattatatcctgctgttctaactcatcctggaagagaatagagtgaaagagaaattgcctttatatataaatgactcatagaatttcatatactgacctaaatagatttcattgcaaaggtattatagaggtaataacacagtaactcttaggactgttttgagattttcacaatttgaaaaatccttttagatccttggttgacaaatgccctggctgtgctaattatatgacatttcctgacactagtgacgtggcatggcctctcccggcttacattatagattgttttctgcccccatgggatctgatttgttaaggctcattttctattttaatgtggtggaagaattttagaaaccctagaaccccactttcaccctccactgaaacaaatagaagcagtgtattagtcagttttctcactgttatgaagaaatacctgagactgggtaatttatgaagaaaagaggttgaattggctcatggttccacagctgtacaggaagcatggcaacatctgcctctggagaggcctcaggaaacttttactcatggtgggaggcaaagtgggagcaggtgtcttatgtgacagaagcaggaccaagagagagacgggggaggtgctacacactttttttaaaacagagtctcactctgtcccccaggctggagtgcagtgatgtgatctcggttcgctgcaaccttcgcctcccaggttcaagcatttctcatggct

SEQ ID NO: 684 - DNA, 225 bp, Homo sapiens
agtaggtttaaattcctaatggcagctgatcacagggattacattcaccccagtccctcagccttggcaagtgctggtcccaggaatccaggcttggccataccacaacagttgccatcagcctcccctacatcaagtggaggaccagcagctcagaccctcactctcacataaatgtatacaggttttactggtgaattatacctcaataaaactgcgggaaaa

SEQ ID NO: 685 - DNA, 1121 bp, Homo sapiens
cttaaacctgattgtagctatctaagttgtagccaatgaggtgtcagaggaagtaccatgcagtgcaacttcttaagtagcctagaaagatggggtcacatccccctgggttgtttccttctttgtgtcattttgatctctctcgctggaaaacagaaatgatgtctggagtgtaagcagccatcttgggctaggagactacatgctgacatggtgacacaccacccagaaagaatctgagtagtcgatgatcacagagctaccatatcagcactagactctctacctccacattttatttgtgtgacatagaaataaagtttaagctttgttttttctggggtgtatgtgtgtacacatgtgcgtctctgtctgtctcacatgcagtgagacctaattctaactgatatgccggtaggatggggggaccttgccacaaggtataattgtggtgggatggctgtgtcttgctcccattcaggatccatggaaagctcctcctccttcctgttcccctggatgccaagcgatgggcctgagaccctggctttgccatgtggatgctccccctcaggactttggatgtgcagtgattgctacaaaaagggcaatgaagatgcctggaccacagccacacagtctccatcacagcagtggtattctgtggaatgagtactaattttctggccacattttctgttaaaaactggttgttgagctgcccacttgtcttggtcaagggatgctggagtggcctgggaaggcagtgttgtttgcttttcttaggatggaacacacttaggcatatttttggtcaaagcaaaagaagaattcaaaggtgagagaagttgaagataaaaaggggaaaatgagggtagcagatgaagcaaagtcacacagaaagctggcaggcgagtagtagaatcagagtacaggctgagcatcccaaatctgaaaatccaaaatcggaagtgctccaaaacctgaaacttttggagcaccaacacaatgctcaaagtaaatgctcagtgaagcattttggatttcatattttcagatttgggtttgcccaaccggtgtaatacaaatattccaaaatcaaaaaaaaaaaaaaaaaaaaa

SEQ ID NO: 686 - DNA, 1119 bp, Homo sapiens
cttaaacctgattgtagctatctaagttgtagccaatgaggtgtcagaggaagtaccatgcagtgcaacttcttaagtagcctagaaagatggggtcacatccccctgggttgtttccttctttgtgtcattttgatctctctcgctggaaaacagaaatgatgtctggagtgtaagcagccatcttgggctaggagactacatgctgacatggtgacacaccacccagaaagaatctgagtagtcgatgatcacagagctaccatatcagcactagactctctacctccacattttatttgtgtgacatagaaataaagtttaagctttgttttttctggggtgtatgtgtgtacacatgtgcgtctctgtctgtctcacatgcagtgagacctaattctaactgatatgccggtaggatggggggaccttgccacaaggtataattgtggtgggatggctgtgtcttgctcccattcaggatccatggaaagctcctcctccttcctgttcccctggatgccaagcgatgggcctgagaccctggctttgccatgtggatgctccccctcaggactttggatgtgcagtgattgctacaaaaagggcaatgaagatgcctggaccacagccacacagtctccatcacagcagtggtattctgtggaatgagtactaattttctggccacattttctgttaaaaactggttgttgagctgcccacttgtcttggtcaagggatgctggagtggcctgggaaggcagtgttgtttgcttttcttaggatggaacacacttaggcatatttttggtcaaagcaaaagaagaattcaaaggtgagagaagttgaagataaaaaggggaaaatgagggtagcagatgaagcaaagtcacacagaaagctggcaggcgagtagtagaatcagagtacaggctgagcatcccaaatctgaaaatccaaaatcggaagtgctccaaaacctgaaacttttggagcaccaacacaatgctcaaagtaaatgctcagtgaagcattttggatttcatattttcagatttgggtttgcccaaccggtgtaatacaaatattccaaaatcaaaaaaaaaaaaaaaaaaa

SEQ ID NO: 687 - DNA, 363 bp, Homo sapiens
agtaacttaattgataaagtcagtgaggaaggaatagaatacaacaaatggcttaaaaacagaaggccaagcgtgatggctcattcctgtaatcccagcactttgtgaggccgaggcaggtggattgcttgagctcaggagttcaagaccaacctgggcaacatggcaaaaccccatctctaccaaaaatacaaaaaattagccgggcgtggtggctcacacctgtagtcccaatttctcagaaggctgaggtgggaggatcacttgaacccaggaggaggaggtttcagtcagtagagattgaactactatactctagcctggatgacaaagtaagaccttgtcaaaaaaaaaaaaaaaaaa

SEQ ID NO: 688 - DNA, 446 bp, Homo sapiens
cagtgggaaactaatagagcatctttcctttttttctagttaaaggactcacttgtacgtgtacacatttctcaggagtcctgtcaaccactgggaagaaagaggctggacttctgcattgaacccaggaacggggtttcacagcaatggaaacctggggttaaatatcaatggaaccttacatgacttgaagaatctttaatacaagctaggttttgaccccaaattagacatttggcagcctctcattacagtctatcttgcaaacctcagtgtggcaaggaatcagattcacccacactccctagtctaaaggattgtcctctgatccttccaggtggattaagccctttctaatctgtcatggacagagcaatgtacctgcctttgtttgttttccttaattctttcaagtgcctttgggtaataaatggttgcgtactcag

SEQ ID NO: 689 - DNA, 446 bp, Homo sapiens; identical to SEQ ID NO: 688

SEQ ID NO: 690 - DNA, 363 bp, Homo sapiens
agtaacttaattgataaagtcagtgaggaaggaatagaatacaacaaatggcttaaaaacagaaggccaagcgtgatggctcattcctgtaatcccagcactttgtgaggccgaggcaggtggattgcttgagctcaggagttcaagaccaacctgggcaacatggcaaaaccccatctctaccaaaaatacaaaaaattagccgggcgtggtggctcacacctgtagtcccaatttctcagaaggctgaggtgggaggatcacttgaacccaggaggaggaggtttcagtcagtagagattgaactactatactctagcctggatgacagagtaagaccttgtcaaaaaaaaaaaaaaaaaa

SEQ ID NO: 691 - DNA, 801 bp, Homo sapiens
gaggtgaatgagctggcgtctccaggtccacactagtcactggggaatcaggggagtcccaacagctgagggcatgtgacagggaaactctgcagcttgcaagtgtccctgagtgtgcatcagatgctctgttcctccacggcagagtcgctccactagagagcctggcgccagtcaccaagactccctgacccttgtctgccaagaagaaacagccaagcctttgctgtctctgagggtctccctcgggtgtccctggcagactgcaccagcctcacaggcatctcccaagccatgggtcagggatgagtctctcggtggcttggtggctctcagtgtgctcagcagcaggtgaggggcctaccccagggcagtgctcggcattcagaaggccgacaggaaaccagaagtttccgaatattatggccccatctcctcttcagtcttcctttccctgaagctcttgtaaacccctttctttcctagctcaacacaacaaaagaaaaccactggataggccgggcgtgctggttcatgcctgtcatcccagcgctttgggaggcccaggcgggtggatcacctgaggtcaggagttgaagaccagtctggccaacgtggtgaaaccccgtctctactaaaatacaaaaattagctgatggtgcgtgcctgtaatcccagctactcaggaggctgagacaggagaattgcttgaaccgaggaggcagaggctgcagtgagccgagatcgtgccacttcattccagcccgggtgacagagcgagactccgtctcaaaaaaaaaa

SEQ ID NO: 692 - DNA, 800 bp, Homo sapiens
gaggtgaatgagctggcgtctccaggtccactctagtcactggggaatcaggggagtcccaacagctgagggcatgtgacagggaaactctgcagcttgcaagtgtccctgagtgtgcatcagatgctctgttcctccacggcagagtcgctccactagagagcctggcgccagtcaccaagactccctgacccttgtctgccaagaagaaacagccaagcctttgctgtctctgagggtctccctcgggtgtccctggcagactgcaccagcctcacaggcatctcccaagccgtgggtcagggatgagtctctcggtggcttggtggctctcagtgtgctcagcagcaggtgaggggcctaccccagggcagtgctcggcattcagaaggccgacaggaaaccagaagtttccgaatattatggccccatctcctcttcagtcttcctttccctgaagctcttgtaaacccctttctttcctagctcaacacaacaaaagaaaaccactggataggccgggcatgctggttcatgcctgtcatcccagcactttgggaggcccaggcgggtggatcacctgaggtcaggagttgaagaccagtctggccaacgtggtgaaaccccatctctactaaaatacaaaaattagctgatgatgcgtgcctgtaatcgcagctactcaggaggctgagacaggagaattgcttgaaccgaggaggcagaggctgcagtgagccgagatcgtgccacttcattccagcccgggtgacagagcgagatccgtctcaaaaaaaaaa

SEQ ID NO: 693 - DNA, 827 bp, Homo sapiens
gaggtgaatgagctggcgtctccaggtccactctagtcactggggaatcaggggagtcccaacagctgagggcatgtgacagggaaactctgcagcttgcaagtgtccctgagtgtgcatcagatgctctgttcctccacggcagagtcgctccactagagagcctggcgccagtcaccaagactccctgacccttgtctgccaagaagaaacagccaagcctttgctgtctctgagggtctccctcgggtgtccctggcagactgcaccagcctcacaggcatctcccaagccgtgggtcagggatgagtctctcggtggcttggtggctctcagtgtgctcagcagcaggtgaggggcctaccccagggcagtgctcggcattcagaaggccgacaggaaaccagaagtttccgaatattatggccccatctcctcttcagtcttcctttccctgaagctcttgtaaacccctttctttcctagctcaacacaacaaaagaaaaccactggataggccgggcatgctggttcatgcctgtcatcccagcactttgggaggcccaggcgggtggatcacctgaggtcaggagttgaagaccagtctggccaacgtggtgaaaccccatctctactaaaatacaaaaattagctgatgatgcgtgcctgtaatcgcagctactcaggaggctgagacaggagaattgcttgaaccgaggaggcaaaggctgcagtgagccgagatcgtgccacttcattccagcccgggtgacagagcgagactccgtctcaaaaaaaaaaaaaaaaaaaaaaaaaaaaaaaaaaaa

SEQ ID NO: 694 - DNA, 100 bp, Homo sapiens
cttgcagtgagccgagatcacgccactgctctccaccctgggcgacagagtgagactccatctcaaaaaaaaaaaaaaaaagaaaagaaaagaaaagaaa

SEQ ID NO: 695 - DNA, 279 bp, Homo sapiens
cttgcagtgagccgagatcacgccactgctctccaccctgggcgacagagtgagactccatctcaaaaaaaaaaaaaaaaagaaaagaaaagaaaagaaagtaagtattggggcggggcatgatggctcatgcctgtaatctcagcactttgagaggctgaggcgggcagatcaactgaggtcgggagttcaagaccagcctgaccaacatggagaaaccccatctctacgaatacaaaattagccaggcatggtggcacatgcctgtaatcccaacta

SEQ ID NO: 696 - DNA, 192 bp, Homo sapiens
tttttttttttgagacggagtctcgctctgtcacccaggctggagtgcagtggtgcgatctcagctcactgcaacctctgcctcccaggttcaagcacttctcctgcctcagcctcctgagtagctgggattacaggctcccgccaccatgcccagccaatttttgtatttttagtagagacggggtttcac

SEQ ID NO: 697 - DNA, 865 bp, Homo sapiens
agaaagaaaatattgtcttttttctttcctcactcttattggatatttgtttagtcctaaacaaagtagctttagcttttaatcatactcattactgtatttttgttcaatgtttcttgatttctgcctactttattaataattatctctttatttcagtttggtctgttcttctctttcaatgaatctaatagaattcatggctcattttatttcaatgtctttatactttctggtcagtgtatttaaagttatacattttcctctgatttctgctttagttgtgccctgcatgattttatatgcagagatattgttgtcattcaattctaagtatcttataatttctcttatgatttctgcttaagcccaagggtaatttaatagcaggctttttagtttcaggactaggtaacatttttggctctttttaaaattattgtttttctaactttatttcagtagagttagggaacatattctgatgttgattcattggaattgtttgagcctttctctctgtaattgttacaaatttaatttttgtgaatattccatgtgagctaaaaaaaatctgtttttgttctctggtctccaccctaatgagactttagaaattctcagctgtaatccatgatccctggtctaataaaaagaagggtgtaaacatggacctgaccttcagatggggagggggaggcaaaagaacacaactgaaaatgctcccccagctacattgaggaggggtaaatggtaggagggagctagggagagaacatttaaagggtgttgacagagtttaaataggtggtgatagggacttgaagtgatagcaaaaacaaaaaacaaaaaacaaaaaaaaaaa

SEQ ID NO: 698 - DNA, 865 bp, Homo sapiens; identical to SEQ ID NO: 697

SEQ ID NO: 699 - DNA, 7442 bp, Homo sapiens
cagagcatcaccgcagaaacaaaggctccagcctccggacaccatgtctgtgcgcttttcttctacctccaggagacttggctcttgcgggggcactggctctgtgaggctctctagtgggggagcaggctttggggctggaaacacatgcggtgtgccaggcattggaagtggcttctcttgtgcttttgggggcacctcatctgcaggaggctatggcggaggtctgggcgggggaagtgcttcctgtgctgccttcacagggaatgagcacggcctcctctctggcaatgagaaggtgaccatgcagaacctcaacgaccgcttggcctcctacctggagaatgttcgagccctagaggaggccaacgctgacttggagcagaagatcaaggggtggtatgagaaatttggacctggttcttgccgtggccttgatcatgattacagcagatatttcccaattattgacgaacttaagaaccaggtaagaaacgccatggcgtgagtgttagcactcctgagagtgtttagccactcacagatgcacaaatgtataagctatcacaataacagggctttgccctcagcttctaaattttaggagttcattttcaatattaaaaataatttctaataaattctaatatttgaacatggcacgtccatcatgtagtattaggtatatgcttttggtaatattaaaatatcaaaagctgtccagtgtctccagttatatatttataggctttcccatagaaagagctttttttaatgcttggggtgggaaatacaagagaccatacccagccaggcacagtggttcagcctgtaatcccagcactttgggaggccaaggcaggtggatcacttgagattaggggttcaagaccagcctggccaacatggtgaaaccctgtttctactaaaactacaaaagttagccgagcgtggtggcacatgcctgtaatcccagctacttgggaggctgaggcaggagaatcacttgaatctgggaggtggaggttgcagtgagccaagatcgtgccactgcactccagcctgggcaacagagcgagactcggtctcaaaataaaagacagagagagagaccatacttaaattacccatcttcaaaagaatggtctgattattagagacagatgccagaaatattactataatttcatgggtaattttatttcaaggaactttgaaatgcatcttaaatatttcctcaatcttaactaacttttcatttgtcagataatttctgcaactaccagtaatgcccatgttgtcctgcaaaatgataatgcaagactaacagctgatgacttcagactaaagtaagtagagctgaagataaatgggaaaaaaaagttgtctaagcattttttctcctttattcttctaagttatttgacgttgtctcaagcctttgttcttgtttattcatgtatttgttttaaacaaaatgcctgttagaatgagtaactagctgagcaacaaattttacttgggaaatttcgggactaacaaaaacgagtgtcaaagtcatatgagaaagaattttggctattcccattctcttgcttcaatgaaatgtatttattgcatgatagatgacctaactgaaatgtgtttttttaattaattaattaatttatttatttatttattttttggagacggagtctcgctctgtcgcccaggctggagtgcagtggcgcaatctcggctcactgcaagctccgcctcctaggttcacgccattctcccgcctcagcctcccgagtagctgggactacaggcgcccaccactgcgcccggctaattttttgtattttttaatagagacggggtttcaccgtgatctcgatctcctgacctcgtgatccgcccgcctctgcctcccaaagtgctaggattacaggcgtgagccaccgcgcccggcctgaagttttaagtattatcttagtagttttacctcaaagcttagtctgagttgtatgatgatctaaaaagtgatgtgccatgtctaatgactaatgatgaaacttccaaatacttttctaaggtttgaaaacgagctagcgcttcaccagagcgtggaggcggacatcaatggtttgcgaagagtcctggatgagctgaccttgtgcagaacggacctggagatccagctggaaactctcagtgaggagctcgcttacctcaagaagaatcatgaggaggtagaagctccacccggctggctctcacaatcgcctccctaccaaattttaaaactaatttcagatgataaatataatgtcttaaattaacattcaagaaggaacctgtcagtttctccataaggcttagattgtttgagacgcttctattcattcttctcaaaagaaacaaacctcccaaaaagtttctaaccctatagatcttgtccatctgactcctttaaaaatattcaggccagaagcggtggctcatgcctataatcccaacactgtaggagacccagaatggaggatcgcttgaggccaggatttcgaggctgcagtgagtcataattgcaccactgcatttcagcctaggcatcagagcgagaccctaactcaaaaagtgcaataaataaaatattcagatcctaattccgttaaacaaatatctttcaggaaatgaaagctcttcagtgcgcggctggaggcaacgtgaacgtggagatgaacgcggcccccggggtagacctcacggttctgctgaacaatatgcgagctgagtacgaagccctcgcagagcagaaccgcagggacgcggaggcctggttcaacgaaaaggtaaaaccacgcttgggtgcgcccgggcgcggactcagccccagcgccctaacgcggcccctgccgttccagagcgcctcgctgcagcagcagatctctgacgacgctggcgccaccacctcagcccggaatgagcttatcgagatgaaacgcactcttcaaacccttgagattgaacttcagtccctcttagcaacggtaagcgaaaagttacaaaacagatttgctttagaaattgagaaaaaaataatcgaagagaattttcttccaacataattacatattttagtttttaaccattaattacagtgcttgacataagacatatttgcattttgcacatgacaatcctctttgcctacaaagtatagctggatgccaataattatgaaatattagaaattagcaaatacagtcaagatactggaaaaagaaaatcgttttgactttgaatcttctatcataagtcaaaatatcaaaaaccactcatatgtggaggctaaaaaagttgatctcagaagtagagagtgggataagtgcttactagagcctgggaaggggatggggggataggaagaggttggttaaaggatacaaaattacagagaaatagggagaatcagttcaagtgttctatagtactgtagaatgactacagttaagaataatttattctataatttctaatagttcaaggagaggattttgaatgttcccaacacacacaaaaaagataaatgtttgggaccatggatatgctaactgccctgattctatcactacacattgtgtgttttgaaatataattatggaaccccataaatatatacaattcttatgtgtccatttaaaaaaaaagaaaaaaaatcctactgcttaaagagagcaaaaatacatttgcaccactcctagcttcatctagcattccttttggccactcaattaagagcacttacaagttcctttgtaagtggcatagacagaggaaaagtcgaggcatgaaggctgactataaaactaaacatgtgtaatgataatcataactgctttcattaagggtttgcccagcacttccgcccacatgtgagtccacaacaaccccggggcatgggcagggcagacgttataactcatgtcattatttccaaaagaggactctgagattcgaagaagttaagcaattcccacagtcccacagttgggtatgaaggaatccagaagttctctccaaattttctaactcccaagtctatacttttcccactatggctagtaaaccaccagagtttatccacagatgaggctatgaatgtatataaaatcaagactttatataaaaaatacttgcaggtgaaaggataagacactctcatcttcattccatgtaaaattgcagtgagtgttccctctgagtatatctgtaaacccattcagattcacaagccaatgaattgaactactgtatttaaagtctaagaaggtaattattttctgtggtttattctactcatggaacgtttatgcggtttactgcaggatgactttttaatagaagagctacaatcctcataagacaagactgtcacatggctagaaatgagtagcaaagtataggcggacttctagttgtgggtaaagtagcaaattgtgccacactctacaagcataggctatattggtgcaggggagggatctttcagtctgtgccctatgaagagacaatttcatcttttttagcacacctgggcatctgagggacattcagcaccagctgtgtcattctcaaatagaaaagtagtaggacatttaataaaggcaacaattaatattgaagaagtggaatcttttgggtaaatataattatttgcatgatgtaaggataattctcttaattatctcttaaatgctttggcttattctaaaacaccgtgaccttttctattaaaccatgtcttaccaaactacagaaacactccctggagtgctccttgacagagaccgagagtaactactgtgcacagctggcacagatccaggctcagatcggggccctggaggagcagctgcaccaggtcagaaccgagaccgagggccagaagctcgagtatgagcagctccttgacatcaaggtccacctggaaaaagaaattgagacctactgcctcctgatagatggagaagatgggtcagtattgccgccattgagaaaacaattcatttttaaggttactaaagatgatttgaaatcaagtacaaaatatctatgatctagatcacgcatagataatactcttttagtgttatttcagaatgcagtgaattcccaccttaaatcattatttttcagtttcctcagtaaaacagaataattaatataagcgctctatacttttacagctcctgttctaaatcaaaaggctatggaggcccaggaaatcaaacaaaaggtaaacaaaagctgtgttaggcattcagtgtttatttgtatgtgtttcaaatgatgttttatttcctatttatgaatttgataaattctaaacagtttatatgtggcattttagattcatctaaaaccaccattgtcaaaacagttgttgaagagatagatcctcgtggcaaagttctctcatccagagttcacactgtggaagagaaatccaccaaagtcaacaacaagaatgaacagagggtgtcttcctgaactccagcctctgagacagaatggcccccaaattaaaataccaaaatgaagctagtttcctaaataagggtccccttatttttctgcttttcttccaatgaattaagacaagttatttttagaatagtaccatttctttggctttttctctatggtggtgtttcaataaaagttcttcctgttgcaagtcatcttccctggttctggccaatctttgcattttagatataccctcccaaatggaagctgaattttgtctttaatttcttctgtttaattcaacagtcttcacaagttggaagtaagtttaatgtgaaaactagttggagtctttttgacttctctgtaaaattttgtctcctttgtctcagtacgaaaagtacttactgagaacacgctatgtgccagataacgaggataaaacagttaataagatccagtccctgaagtcaatatgctcatagatgtagaaataagaacctgaagaatcagaaacaaacttaaacataaaggaaaggctataagtagtgatatttgaaggtagaaggggaaaaagagagctgtgaggacaagggtaagaggagaattccagcaggcatctaattcataatcttgatcactccaccataacggtaggaattcacaagttctctccttcgtttttgccatccaagactgcagagccatgtggctctcaagtcaaaggtaacttttagtgcaataatttcagcacctaccattaatgaatctatttcaaggctgggagtgggaggaggttaaactcagcagaaaaccctccagaggtttatttgtgggtgagagatttggctccccctcaccaatcccgtaacagaaacagcctgtttttctctggaaccagtgtcctattactgaactctgtagaattggctcagcacagttgaaacacagtcactttcaagctgtctttcctcctctttttcccacacgcatgtaataatacctaagcgaatgtaaggcagataccctctcacttaactttttaattaaccagtcctcacatcatataccctcatatcaaaattaggaaaaggaaacatcctaccacgtaagagttgaaaagttacattcacgcaaaaacctgtgcacagatgtttataacagctttattcgtaattgccaaaacttggaagcaaccaagatgtcctcttggttgacgaatggataaataactgtggtacctctagacaacaaaatattatttagtgctaaaaagctatgagctatcaagccatgaaaagacacagaggaaccttaaatgtatattactaagtgaaagaagccaatctgaaaaggctacatactgtatgaccccaactatatgacattctgtacaaggcgaaactatggagatagtaaaaagataattggctgccagaaattggaggtgagggatgcacaggcagaacacagaggatttttaaggctgtgaaaatactctggataatatcataagaacggatacgtgtcattatacattttccaaacccgtagaatatacaacactaagagtaaacggtaatactaaaaagtctttaatttttttttttttttttttttttttgagacagtctcgctctgtcgcccaggctggagtgcagtggcgccatcttggctcactgcaagctccgcctcctgggttcaagccattctcctgcctcagcctcccgagtagctgggactacaggcgcctgccatcacgcccgtctaatttttttgtattttcagtagagacggggtttcaccgtgttagccaggatggtctcgatttcctgacctcgtgatccacctgcctcggcctcccaaagtgctgggattacaggcgtgagccaccgaatacttagctcagatttcacagtatttga

SEQ ID NO: 700 - DNA, 155 bp, Homo sapiens
gggcatggtggcaggcacctgtaatcccacctacttgggaggctgaggcaggagaatcacttgaactcgggaggcagaggttgcagtgagccgagatggcaccactgcactccagcctgggcgacagagcgagactccatctcaaaaaaaaaaaa

SEQ ID NO: 701 - DNA, 127 bp, Homo sapiens
tgaggcaggagaatcgcttgaacccgggaggcagaggttgcagtgagccaagatcacgccactgcactccagcctgggcgacagaatgagactccatctcaaaaaaaaaaaaaaaaaaaaaaaaaag

SEQ ID NO: 702 - DNA, 1026 bp, Homo sapiens
cacagcatgagcatgagctgtccctggttgggcacctgggcagtggtctgtgcttcacctagacaaagaaatgacagtcaaggaacagatgctaggggaggaaacagagctgaccagaggttacctgggcacaagaggaatctggaagagcgcacacctgctgagcaaacctaaggcagtgacatcagggtggaaaaaagaatacatatgcttattgttagtgttcaccaaaaaaggttcacagtgcgttgctctaaagctcagttagcttctctaacacaaggtagatacagtgtgaagtgccaaaactcagtttccataaaactttttacaagcatgtaagttccttattgactttttcaaaagaaattcatgtaggaaatgcatcctaactcattctatgatgccagcattaccctgatactaaagccagccaaagacactaaaagtaaagaaaactgtagagcaatatcccttatgaaggttgatgccaaaatcatcaacaaaatactagcaaatcaaattcagtagcaggctgaaaggattatacaccctgaccaagtacagtttgttcctggaatgcaaggatggttcgacacatgaaaactgatcagtgtaaacagaatgaagggggaaaaacacatgatcatctcaattgatgccaaaaaaaaagcatttgacaaaattcaacatctttcatgatgaaagcactcaatatactagaaatagaaggaaactacctcaacataataaaagttatatgaaaaatctacagcaaatatcatactcaatggcaaaaaaactgaaatcttctcatctaaaatcaggaacaaggcaataatgcccacttctattcaacatattactggaagttctagctagagcaattggacaagaaaaagtggggggtgggggagaagaggcatccaaactggaaaggaagaagtaaaattatctctattcccagatgatgtgatcttatatgcagaaaaccctaacagttccacaaaaaaaaaaaaataaata

SEQ ID NO: 703 - DNA, 1026 bp, Homo sapiens
cacagcatgagcatgagctgtccctggttgggcacctgggcagtggtctgtgcttcacctagacaaagaaatgacagtcaaggaacagatgctaggggaggaaacagagctgaccagaggttacctgggcacaagaggaatctggaagagcgcacacctgctgagcaaacctaaggcagtgacatcagggtggaaaaaagaatacatatgcttattgttagtgttcaccaaaaaaggttcacagtgcgttgctctaaagctcagttagcttctctaacacaaggtagatacagtgtgaagtgccaaaactcagtttccataaaactttttacaagcatgtaagttccttattgactttttcaaaagaaattcatgtaggaaatgcatcctaactcattctatgatgccagcattaccctgatactaaagccagccaaagacactaaaagtaaagaaaactgtagagcaatatcccttatgaaggttgatgccaaaatcatcaacaaaatactagcaaatcaaattcagtagcaggctgaaaggattatacaccctgaccaagtacagtttgttcctggaatgcaaggatggttcgacacatgaaaactgatcagtgtaaacagaatgaagggggaaaaacacatgatcatctcaattgatgccaaaaaaaaagcatttgacaaaattcaacatctttcatgatgaaagcactcaatatactagaaatagaaggaaactacctcaacataataaaagttatatgaaaaatctacagcaaatatcatactcaatggcaaaaaaactgaaatcttctcatctaaaatcaggaacaaggcaataatgcccacttctattcaacatattactggaagttctagctagagcaattggacaagaaaaagtggggggtgggggagaagaggcatccaaactggaaaggaagaagtaaaattatctctattcccagatgatgtgatcttatatgcagaaaaccctaacagttccacaaaaaaaaaaaaaaaaata

SEQ ID NO: 704 - DNA, 1026 bp, Homo sapiens; identical to SEQ ID NO: 703

SEQ ID NO: 705 - DNA, 263 bp, Homo sapiens
gaggggacggggacagaaccagggtgccctctcccatgccccacctgcactccacgaagctaaacccatttcgcccttgctgtccctgctgaagacggaggcagaggctcctatactcactgaggaatctcaagtttagggacaccaggtggcaggttgtgccaggaaagacatcagtcagggacagcactggcagagctcaccacaccatggagtcctccttccactccccttccatggtcctccctcctctccccctccat

SEQ ID NO: 706 - DNA, 4515 bp, Homo sapiens
ctctttttcaaatgcgatttattgtacataaaataaattaattacagtttaagccaaagcatgagtggctttttaaagtgcatctgtggaggggatgtggcaggtagcccctgttcacttgctgtaagataagtgttttagtatttcagccacccttaggcacaactcagccaggcctaggaagcaacccaacgtcattgccatgaaccatttacacaagtcacaccaaaatcaactgacacatttttttcctgatggaacagttaaaaaaacaaaaaactatacagtcaaagtctggggttgaagagcgtgaagttcacagctcctccacacacgcccaactgagcatgctcatcctgtgagggggaaccagagccttcctgtaaaccatgagagcttaccaatgtctggtatacaaaatattctggcccataaactcaacctgtttttgaggggtaggggattttccatcttgtacataaagaaagaaatctgggtatccttcaggttagaaaggcattctgtaagaatagtgttccagagttacaaatcatactggtaagagaaaagcaattcttcctcttggggaaaaagaggaaaagaaagaagaaaagagaaaaaagaaaaaagggggaaaaaagaaagcctatcaatgcttaatctgttctttcattcccactgtaaatcacatcaatacatttggtgaaactgcaacggaccaccatttacaaggtagttgaatgcagaaaccgaaacgattatgccccctccccactctaaaggaaaagacacagagtacatttcacatattcagagagtggctcagtgggctctttcaagcctcatcaatcctgtccccctgctcagaacaacacttccttttctgtagcagttccacaggccctcttggcccttctgctccagccctttctggaaccaggaatcattgccaatattcaacgttcctgcactaggagaacctcaggccctcttcctgggaagaccaaacccccttgagtgctcctcctgcttcagacggaggtgacagtcctcactttggcagagagggcttgcttaaacctcctcttcaggtcctgcatgttgggtgacttgggcctgggaatgagggaggttcttcgcttctcgggtgtactgctaggctgctgtttgtgactgacctctttacagaggacgtggaaggcgctgtagacatcattataattttcactgacagacacttcatagaatgagcagcctagcatgctggctagctgcagtccaagctgagggtcaacctgtttgatgtgcaacaggtcagctttgttggccacgaccaccacaggcagccgggtgcccaggtgtagctgctgcacgtgctggtggagctggctgatgagttcatagctcttgtagtcagtgatggagaaaacgatcaccacagcatctgcccagcgaatgcacctattcagctgttcactgcagctcaggctgttctcatggacctgaaagagaggagtgatggcaaggtgaatgctggccagttgtacaaagagcctgggcttgggtagatttcaaattcaaaagagcccttcatagtagtgccaggttgagggccataaacaacttatatcccacacacttcagctttcttgacaatatgttgatccagctgcacagagtgggaataaataacagtgcagcttaccacactcaagtggaaaattgacctgcagagaactccatgcagagcgactttgtagttgcacaaaatgggaaattaactggctagacagtaagtctggggaagtaaagataggagctggaagcatttaaacctggataactgcccagttcaggaggcggggggaaaaaccctagcatggcgcttttgtctatagagcaactttccagtacaaaagcgattccaagtatttgcagactatacccagaagcttggtttttcatgccaaagacacacatattaaaactggacttttaaaccacagcaaggaaaacaccaattccaactgcattcggtttgggctttccggctgtgttgaatccttctaaaggaagatttctgccccctagccaaatctcccaaactaaaccatgctaagatcgaccaacagccagatacaattgaattgtcagacatgtaaaagtctagatgtgactccccaaatttctctgatcctgcagcatgaggaactttgagaagaagtgagtgattccacagccaagtaggttcccctttcacccagagtctcagagcttctcacctgaatacctggagtgtcttgaacctgaagagccagggtttcaccttctatctgaacttgtctagtatagagattacctatgaaggcaaataaaagagattatgttcttccttcttgtacaacttttaaaacattgtgagttttaagctagaaaaaaaatgcacaatgcataaatgcacacaaaacagcgatagtttatttctatttggtgggcttacttcagattttttttaaaaaacaacagcaattttaaccctatgttagatttattaaaaccagggcaaagtttgcaagtttttgaaaacttatttatctagttttaaacaaagtttccatttttagagtactcccttgatgcaaattatcttgctcagcctatgtgaggtttctgttttcttgagtacttgattcattctttgactgtaactttgtattttggccgttagatataatggcttgctagacaaatactgttagtaaacacacagccaatgttatcagttggaataaaaatgtgatataattataatcaactctacatcaaatcagaaggctgccatgtcttatcttgggatagcttatacagctcatttcaaataatcccctataggtactcatatggtctacagagttaagcaatttgctaacagagcataggcagaaagctcttaagcctccccagtggctattcttaatcataaggattgaaaaatgtgtcctctcatttattcgggaattctcctcctaaaattctaccatccagttgtttgtctttgttaagaaggaggaactttaggtttacaactgctctcctttggcctttgctttaaaaggtcacctctgaaaggcagccagcagagaaggagaggggtgggggaaggagctagggactccttttttttttttttacgacttttgcaggagtgttttgaagggagaggttcttgactacaaagggtgcttccaactggggtcactatagttaaaacataccaaggggaatactttcaggcacttgataaaatgatgaatgggcttggaatggaatgaggccagatggtagttatgggaggggggcgccatggagggctggggactggggaaagttttaagtggcgggatcctcaggctcggactgtcactgaaagaacctccctgggaagcgctggaaaatgggaaccgcagtcctcctgcaatgggacagaatttttctcaaatgcattgtctcacctgcatttctttcatagtcaccgatgaatcgtttggtgaggaaccggaccaccagtgctgcacgtcagaaaaaagaacgtcaaagtgttaaccttggaagttagattgttctccaccccaccccctgcctggaaaacagttctcccaaagaaagccatagatggccaccaagtgaaattcctaccctgtagctccttgacccttctttccagacaaaaaggagggggctagaaggcatcgtgaattatggctctgtgcagctggaaggctcactgggcccaccccctcctctgagcccggctgagccacacctaagccttccagtagacccatgtcttcctaaccttcaagacctcccaggggggctagcttcactaactcccctttctgtgccaggcattgccagaggctcaaacaccccaaagttctgatggcggcggtgccggtggtccccagaaagctgcctggccattcttgatccttgtttcccccgtctgtggaagcaggcgggtggcgtagacaacggctaagcccactcccaaggggcagcggctccctgcgcggggacggagagcggtcgggctgcagctcccaccgctccccacgccttgttcagcctcaactcccgtcaggggtcgtccaagaccagacccagggctaagcgcgacgactcaccggtcttgcccacgccgctggccccaccacggcgatcttgaccaggcggcggcggcggcgcccacacagcagtcggaggccgcggcgttgccggcgcggggtactcggcgatggtgcacatgttctgaatgaggcgcatcgcctcggctgcggcgcaccgcgggaagggactgagggactggagaatgctagcgctgcgcgggagcgggcgggaggacccgactgcggggctccgcggtaagaaataacaacaataaataagtgcaggtacgggcggggtggggccgagcgccgaggttccgcagggctcaggctccagacccagact

SEQ ID NO: 707 - DNA, 23071 bp, Homo sapiens
agtaaggaagtgcttttgaatgaggtactgagggccaaggtgttggaagttcctaattctttcctcggttaactgtgaaactctgcgtattgggaaggcctggcctcagtcatcaggccaggagaggtactggacgccgcgcacgcactcgtctgccagcgaggcccaaaggggaagcctagcggagctcagtgtggcagctgctggcctctgggccggtaagaattgatggtcccctcccttattccccaggcccaaagctttgacccagttagtgcctgctagtttcgtgtgcctggcttgtgcctttggcgcggaacgtttgggagactcggccttgcggtcttctgacctcacccaccacgtacctagcttggcactgggtccttcatgcctctcactcgcttcctctgaggcacctgggtactctcttgtctcttacccgcttaatctgagtccatgtccaagttcatcattctgtgtctgaccgtgtcccagccaccggaagagaagaaactccgggtgtgacattaatcccactgggggctcgggagaactgccttctaaaatcagagactgtatccatttgtctggagagaaatgaaaaaaataaggacaatgtagggaggtattttaaaggtaaatttatttaaatgaagtgatagtgtcattacttttcctgtttgattttaaatagtctttagctgaacgatgacctgtagtaggaaggtggtggcgaagtgattgctttttttaaaattatttttttaacacttttatgtcagtagtcagtactttatttgtccataaaatccaaaaataactacctttggattttacagtagtctttgactgaacctcagagagatgagattccttacccaaaatgatgaatctgaaattattacccagttctcttgactctggaataagtgcttttttctactataccacttctgcttttattcttggggctgagagtacaggctgtggagcacgacggggttggcattttggcttccacctttttctgcttgtggtgacctgtctgagccagaatttctttatgtgtagagcgataataatagtacttaaattacaataatagcacttaaatagcacttgatacatgtaagactctaagtttacagtgttaaactctacttgtaagatgtgtttatttacctcctcaatataatcagcttcagtattcagtatttagatatatcagttgataaataggtttcttctcttcatttttttcttacctgatttatcttacctggacaattttttaaacgttattttttctccaccttgggccagagacattttttgaaatattttatttttaaaattacttgtattcattattattgcctttttttaaaaaaaaataaatgaaattttggttgatatttataaataagtttttgtatttgaggaacagtaagtacattgaaaacttcttcatcaaaataatccagcgttaaagaccaagtaattgtctcaaatcattttatgaaacacattttttcttcaaatctttgaaacctaatgttatgttcttttctagctacttgtcaataccatgctttcctgtaatatttgtggtgaaacagtaacctcagaaccagacatgaaagctcacctaattgttcacatggaaagtgaaattatatgtccattttgcaagttgtcaggtgtgaattatgatgaaatgtgttttcatatcgaaacagctcattttgagcagaatacacttgaaagaaactttgagaggataaatacagtacaatatggaacttcagataacaagaaagacaacaccctacagtgtggaatggaagttaattcaagtattctttcaggttgtgcatctaatcatccaaaaaattcagctcaaaacctgactaaagatagtactttaaaacatgaaggcttctattcagagaacttaactgaatctagaaaattcctgaaaagtagggaaaaacagtccagcctgaccgaaataaaaggatctgtttatgaaacaacatacagtcctcctgaatgtccattctgtggaaaaatagaggagcacagtgaagatatggaaactcatgtgaaaacaaagcatgccaatcttttagacattccattggaaggtaaagttttcatttcattataaattataagtttacagcctcaatttaatatgtggtattttaaaagttggtttgtaagtcagcttactacagatgtgttttgaaatccattttatgtctataacatttttcatttgctgttactgaaatataaaagtacattatggaaaagaattttaatgcagatataaaatgtttcagctacattgagagtagttttggaactttctgtctagtttccagagggtattctttttattgtcactaacccagtagcatctggactgtcctggactctctgactttgcattgagttctattttgactccattattctgttatgattggagaacaaactctctgtgatatcagttcttttaaatttgttgaggcctgttttatggctcaagacacgagctatcttggtcatgttctgtggatacttgggaaaaaaaagtgtattctgctttgttgggtggaatgttatatgtatgtcactagatcctgttgtttatgttcagattatttatatccttgcttgttttctatagtagtactgtctagtagttctatcaatttttgagaaggggttgttgaaatccctgattataattgtaaatttatctatttttcctttcagctctgtcaggttttgtttcatgtattttgagactctattgttggtgtgtacacatttaggatcttatgtctttttcttattgttgaactttaagaatttgtggagccaggtgttgtggctcatgcctgtaatcccagcaagttgagagtccgaggtgggcagatcccttgagtccaggagttcgagacgatcctgggcaatgtggcaaaagctcgtctcttcaaaaaaaaaaaaaaaaaccaaaaaactagccaggcctagtggcttgcgtctgtagccccagctatttgggaggctgaaataggaggatcacctgagcctgggaagtggacgctgcagtgagccatgatcacactactgcactccgcactccactctgggtgactgaataagaccctgtctccaaaaaaaaaaaaaaaaaaaagaaaaatttttctgtattttggatacaagttcttttttggatgtgtattttgcagatattttctcttagtctgtggcttgtctttttattcttttaacagtgtctttcatgaagtagaagtttttaattttaatgaagtgcaacttgacaatttcttctttcatggatcatgcttttggtgtgtctaaaaactctttgccaacttctagaagtttgatagttttgtattttacatttagatctgtgatacatttgaattactctatgtaaaaggtatgaagtcagtgtctacattcttttttaatgcatttctctgattatgaaatcaatctttttttgtatagttattttaatttcctctattatgaactgcatattacattttttgtacacttgagttacatgcatttttcaactgtatattgtcaaatattttttgagtttttttcagttgcttttaaaatatattttcaatactaatccttcagctgtattccataagatgttgcttatccttgaattttgtgcagtatttgaattttatttttgttttctatgtattgtctaaaaaagtattctttactctgaattcaaaaagctattctcatatattctaaaaactttaatgttttatattttcactttttaaaattttttctggattgtgtgtgtgtgtgtgtgtgtgtgtgtctgtacttgtgtacatgtgtatattttgtgaacttgggatctaatttttagtttttccctgtacagaaaccagatatatctctgatttataatatggtttctgttttttattacattttcatatctgtgtgggccagtttctggtctcttacttctgctgtatttatctatgtgacttttgttcccttattacaccaccactttaatagctattttgtaaaatgtcatcaacatcagataggacagtttttccctcgttcttcattttcatcatcaacttagaccttctcattctttcttttctttgagttttaaagccatattatcaagtttcataaaaactctgttgtcattttgttttaaattagatcaaagtacatctccccattaattcaggtcatcttttgtatcctttaatacaattttgtgtgtgtgtgttttttttttttttgatggacttttgccctgtcacccaggctggagtgtaatggcacgatctctgctcactgcaacctctgcctcccaggttcaagcaattctcctgtctcagcctcccaagtagctgggattaccactgcccaccaccaggcccagttaatttttgtacttttagtagagacagggtttcgccatgttggccaggctggtctggaactcctaacctcagatgatccacctacctcagccccccaaaatgctgggattacaggcgtaagccaccgcgcccaggcttgtgttgttttttcattgcacatttgtgttagctttatttctgtatagtttatattttctgttgcttttgtaaattagatttttttccctctcatctaagaaacttttgcagttttatagaaacactatcaatttttatagatagttgaggtatctagtcttattcaactattactaatattattttattttatattttttgagacaaggtcttactatgtcacccaggctggagttcagtggcatgatcatggctcactgcagccttgatctcctgggctcaagtggttctcctgcctcagcctcccaaggggctgggactacaggcctgcaccaccacgcccagctaattttttttttttaatatttaatagaaatgaggtcctgctatgttactcaggctggtcttgaactcctgtgctcaagcagtcttccttcctcagcctcccaaagcattaggattgcaggtgggagccactgcgtctggcctgttaacgaattttaataattctacattaattcccttgagtattctaagtagatcattttattatctgctaataatgaaaatttatggactgctgcaaggaaaaaaaacaagtgtattgaaaaatgcctgacaatcctttgctgacacaacatttcctgtaagtttctcaggaccagtaaactggtgaattttggtagtcttaggagtctgaatgtttagttgcggttaaaaaagacctgttgtcattagaagtacagaagtgaaataggtaaatagctagatttaaccaatgttcagttatagtaaatggaacaggtggatttgcaggtgtttttaagggaatgattatcatatagagaagatatgtggaatctgggctggaaagtaaagaaaaacatgaggggggtaatgaatgacagaaaaatagggtttgtatattctatataggaggttttagttaggtcaaacactttttagagtggtagaattaaaagaagtgaggtagaaggataggtgtttgggagtgatatttgaaattgagatttcagagattcacttagtgataaattaagggtataatttttgtcattcggttggtaaattagggtaaaggaaaagattgttggaaatgaaggcatagaactatttctatggatattgaagttgctaagaatgatcatagtataggggctaggaaaagaaggttttgatccaggtgttaacatttttagtaaatgaaaggagtgtctaagacttcagaaaatattaggcactaagaaaggtagatgatgccatattatggtgacatgagttattacaaaaatggggcttaaaacaggtttgacagtggtgaaagggagcaaaggggatgcctcttctacttctagggccctgaattgtgaaagaaaagttgcctgtgtgttagggggctgtagagaaaatggggtgtcatgaaccaaccagattttagttaagtcaagaaggtgaagtgaatatccagagaaagattttgtgtatagagaagctgactgatgaccgatggtatttctgagggcattgtggtaggtattgggagaataggaggggtaatagcttgggtcagattagcagatgtccttcaggtatttaaagattgttaagacactgccactgaacaattagattggattcattgacacaacagtgttggtggttacatcagccctagatgactccattggatgatgatggctaacctctgaggcttagtttagattctggtggtaaaaaatgtatactgggatatgaggtgtagtgtggtctaatgttgaggaaggttggttatcacttaaaactagaaggggtggagggattggcttgcagtagtgtgatgatcaaagcgataagcaaaggcctccttggcattggctctggctctaaggcattttatggtagagaactggctgaaagacttctcttacatccgccagcattacttatggaagctgtataccattatttcttactgctgcttttggaaatattttctgagtacttaatacttcattttctcttgagctttgccattgaattttttattccaatgattacatcttaatattttcattttcttcatctttctattttttcttagtaactttctgtcctggtttcaaagattcagttccctcctttatttcagtgagcattttgaacatacttattttacagtttattatggattactgtagctccatttcttcacaggtaactttttcagtttgtagatttcttagctgtttttcttggcattgcagcccccagtgagtttagcaattcaaattttagtgttcatctgttatgggagttttatatgatcccttccctgtgaagcagtttcatggttccttcacactggctgttcacagtctctgctttcagaccaggccttacatatacagattgctctatgctttcactctgtgtatatgcacaattctgggtccctcttctatgtcccttatctgctaggtcttggtcttatagaggaacaatttctgtttttggcaagctagacctgtctgcctgcagtgctatgtgatggatgcagctctttaatctcctgctcctgtgtagacagtattaccccaattcccagctttatgctggatgtttaagttcagcaccttaccactctgttgggtgctgagaatttagtcctaaaaacccatatccagactgggccctacttaccactttggttttcctttctgcttctcttgttttgactacagatctgaatatttattattaatatttcctttttttttggagtggtatgagaggtttgtgctatgctcagccttctatctcgaccctagaagtagaaaaatagcttttaaatccactacaaagagcttttacttatataaggttaataggtggtagacagtctttgacatggggtgaaaaaatctaaaagttataaaaataaaaccaacttggctgggcatggtggctcatgcctgtaatcccagcactttgggatgctgaggcagaaggatcacttgagtccaggagtttgagaccagcctggacgacatagtgagatctcatctctaaaaaaaaaaaaattagctgggcgtggtggcgcatgcctttagccccatctacttgggaggctgagatgggaggattgctgcagtgagccgtgatggtgccactgcacgccagcctgggcaacagagtgagaccctgtctcaaaaaaaaaaaaagcaaagaaaaaaattaaaataaaaaaataaaaacaacttaattatatctctgatacagactgtgatcaaccactctatgattgtcctatgtgtgggctcatatgtacaaattaccatattcttcaggaacatgttgacttgcatttggaagaaaacagctttcagcaaggtatgtttatatgtttgaagataaaaatatcatttaatttctactttctaggacacatatctaatttttagatttgtgatatggaaaaaatattttaaaatacatcttttcctttaaaagtgttttatttacaagttgaggccatttctttagcagctagaagtatctgaatattgtatttggtcagcgaaaattgttgaactagaaaactgccatatggcacataaaattttacaaatgaatgtgaactatataaccaaaacatctttcagtgcatcttgagctgcttgaatagcttctaaatgacttactggttttattgtgattctataaaagttttcctttctcccctatgttttttaatagtggcattgtttaaataatcattatggtggcttagaagtggaaaaatcctatatgaatgttagaagcccactgaacgaaaataaaaagtagatcccaagagaaaccaattgtgttttaccctatttcagttttttaaggtacgtagatagcttctgttaaggcagaggtctttagtgtccagtatcaatgatcctagtaccagtatcggtgttcatggacaatgttactgctcactcaccctaagccaaatatgagattattggggcaaagatggaaaagttccctgctctggtggtttctgaatgtctgctaattcttactcttatttatgataggctttgtatgagcacgtatattacagtgtaaacctatagtgggtaataagaaaaagatatggtctaagtaaatcactgtagataacctcaggggacactaaacattgagtgtgacttgtatatccccaagaatggaagggtgaccaaataggaagatgtagcagcagctgagaactttgaaaggaaaggaagaatagtcagtgatataattaaaccatcaggtcatggggttaaggagacaagatagtggccagaagccactgacaaatggatctgggggacaccgagtagagaagatgcaggatgagatgttgcaaagttttaccatttttgggggccaaactgtaattaaattattatctaacacctgcactttgtaaatgtgtatttttatgctctttatttttttttttttctcccctagtatttctttgaaaaatcaatctgccttagttatgttaaggagtatcaatgcaggatgttacttaacgttttaaaattctggtttcctcagtaaataataataactacttcataagattgttacaaagatcaaatgatataattaatgaaaagtgcttgtcacagctttaaacacttagtgaggctgggcatggtagctcacgcctgtaatctcagcactttgggaggccgaggctggtggatcacctgaggttaggagtttgagaccagcctgaccaacatggcgaaactccatctctactaaaaatacaaaaattagctgggcatggtggcaggcacctgtaatcccagctactcaggaggctgcagcaggagaatcacttgaacctggcaggcagaggttgcagtgagctgagatcgcaccattgtactccagcctgggcaataagagcgaaactccgtctcaaaaaacaaaaaacagtgactgttagttgtcatttagatggaggttattccttaccaaagcagttctaagttttgctaaatttgtactcagttccatatcatcacagtcatgaataaatggcaaataacagcatttactctattttaaaaacatatattaaataataaataatctttgattgcaacagttattttattctgaacattaacaatacctaacaggcatggatagagtccagtgttctggtgatctacaattggctcaccagcttcagcaagaagaagacagaaagaggagatctgaagaatcaagacaagaaatagaagaatttcagaagctgcaggtacaaagattaataacaattataatattttgatttggtaaagttatttttcaaatatgctttccagtgtattatttttgtccttgttattattcaaaaaaaatttatacatgtttgtaacagacaccatttataaatattcattctagtgaggcacaggggtaatcacttcacatacaatatctcaaaatctttgcaacatattcatgaagaagttactttaggccctcccacgcccccttttttttcagatgaagaaatggagacagagaatggttaagtaatttgctcagtgtcaggcagctaattagtgataaagcttgcattcaaacctgtgtaagttgatgggacaaattaggaaaccaagactcagaatttaagtgtttgtatagatgcttggaagcgaaatttatacttagaattaatgtctcctgagtcttaaattattttacagattgcaatttcaaacatttacaactattttatgggaaaatgctttttttaaatgatatttgaggcttcatttatcttaggtgggtggttttacctgttggactaaactggtagcatctgttatatttttaatgcatttaaaattttaatgtctgtttttccttttttcagtcctaatttgtagactgtagtgttatctgtgctaataatgctcatagattcatagattttgttgttgttgtttgtttgtttgtttgagacggagtttcactcttgtcgcccaggctggaatgcaatggtgcaatcttggttcactgcaacctccgccttctagggtcaagtgattctcctgcctcagcctcccaagtagctgggattacaggtgtgcaccaccatgcctggctcatttttttgtattattagtagagacagggtttcaccgtgttggccaaactggtcttgaactcctaaactcaggtgatccacctgccttggcctcccaaagtgctgggattataggcatgagccaccgtgcctggcctattgcttatagtttttaaatgttctttttttagtgatgataggatagtgcatacataaaaagggtttacagttgaataggtttgaaagtgttcagttaaacaggtttgtatactttgggacttctcaaagcctttaatatactaatgtgcatgtacatatcacaatttccccagacttgtttgacctctctttttttctcagacatctcacatgagtattgttgcttagaatgtgctttggaagacctaatgtaggatttttttctcactggtgactcacaatacttgcaaaataggaaagaaaattggcttttcttaagacttttatgccttatgtaatttaaaacatgatcaatacaaaaagtttccaatatttaaggaggttatgtaattttgcaagttagttgtttagatctcagaaaatttttctgtagaaaagtttccgtgaaaacttttccatagacaatttttccatagttttatacatactatttgagatttctgtccagtgtacaaaacatagttcatttactgtgtaacatgactgactaaatgaattatggattaagtaggcctttatggactagactgggaaccaaataacaaggactgacaagtttccttgaaaaaatcagcaatgcattcagaactcttctgcatctcccaatacctgaggtagaaagacaggatcctctgctttccctactacaggaaaagcaagtctcttgccctggagattgattataaagaagtggttgcttattaagtcaataatttttttttgtgtgtgtgtgtgtgtgtgttattagtttttgtaaaaatctttaagttaacttgtataaagtctataaaccagaatgtttcaacatgtttccaaataaaattttaataagtttccatcctcatagagttacagggatgtaaaaattaagtcatttatttttatgttcaatagagacaatatggtttagataattctggaggatacaaacaacaacaactacgaaatatggagatagaagtaaataggggaagaatgcctccatctgaatttcataggagaaaagctgatatgatggaatcattagctcttggttttgacgatggaaaaacaaaaacttccggtgagtatttaaacatcagagtcattgttttaatattgcttataccactgaagtaataatcagaatcattttaattttgcttaattttcataatctgtgcacaaatatttttttaaaaatgtattgttttaaaacttctgaattatttttatgataaataattcacttaaaaatttacttttatattatgttacttgacatttaaaaagctatgctctagagagtgctaagagaaatataatgtgagccacatatataattttaaatttcctggctccacattaacaaaagtgaaaaggaggctgggcgcggtggctcatgcctgtaatcccagcactttgggaggctgagacaggcggatcacctgaggtcgggagttcgagactagcctaaccaacatggagaaatcccatctctactaaaaaaaaattacaaaattagctgggcgtggtggcacatgcctgtaatcccagctactagggaggctgaggcaggagaatcgcttgaacccgggaggcggaggttgcggtgagccgagattgcgccattgcactccagcctgggcaacaagagcgaaactccatctcaaaaaaaacaaaaaaaaaacaaaaaaaagtgaaaaggaacaggggaagttaatttaaatagtttaaaccagtgtatccatgatattattatttcaacatgtaatcaacattaaaactattactgagacattttacattgtttatacattcttcaaaatccattgtgtattttctacttcacagcacaactcaattgggcagccacatttcaaattctcgatagccacaaatggctattggctattttattgtttgtacatttttagacactaacaactctatatacattgtatcatttaactcaaaacatcctctcctgtactgttatatattccaaatgaggtcactgttgcttagagaagttacagtgactttgccaaagcaaggttacacagctggttattcctaatcaaatcttccttgccccataatatggcttttttctgatgagtattaaaatttttttctttgtatatattagtatattaacagactttttatggaaacaactttgttactgtcacccagattttttgaatcttaatgttttgccatatttacttaaaagtttttaaagcttcaacacctttgataggtattcaaagccctttatgtacactttttctaattctaatttgccctccccacaagggaactattatcccaagtttgatatttatcagtctcatacatgctttagtactcttaccatgtatgtacatttccataaaatattttgcaggtgtttatatataaatgggatacaacatgtatgctataaattgttttgctcaaatatattggttcttacagttctacttcattcattttagctgctgtgtagtatttccttgtatgaattgtagctaacttatcttgttttcatattgataaacatttagattgtttccagttttctactcttataatttatgaacatgtctacttcaggagtttctctagtattacatccagaactggatgtagctaattatagctaacttatcttgttttcatattgataaacatttagattgcttccagttttctactcttataatttatgaacatgtctacttcaggcgtttctctagtattacatccagaactggaatgctaagttaaagggcgtgcaaatcttcaacgttgttaaggttattatagaattgttttccaaagtgcttgtaatctacattcacaccagtgtatttcacacatagtatggtgacacttttaaatttttgctatttaacaggttatgagatgatacatgttttaatttgcattttctggattactcctgagttagtttcctcttgaacgaattacctgttctcttcctttctctattctctattgagttgtttgttcttactgatttataggagactgttaagtattcagaacactattctttcattagttatatgaaatccaaatatctttttcaggcctgtggtttgtgtttaaatgttatatatagtgcctttaattagacagaagttttgaatttgaatgtaatcaaagttctcaatctttctatttattatttgtgtcttaagtaactcccccatctttaagatcacaaatatatacctttatgttttcttcaaatatttatattttgcatttcatattttgattttaaatccacccagaatttatttgcatgtgtatgttggagggaggagggagaagataggaatctgattattttctccttgtttataacagtccttatagcaagtacatattatgcttatttatttcactaccatttattgaatctgcattttctccacctatttgtgatactatatattatagattttcatatatccatgattctgtttctaaaggctgcctttatatttcttcaggggtctccatgtaaaaaagttctcactatagcatagagcatcctccagatgtgtgatatgattcattaggatacaggaagaaaatattaaatatgtctgtaaaaaagcacactgtcctgtaatatagaagtgatttagtggcagagatttttatttttcgttaattatgcaagtgttaatttaagcagctatcatttaaagagtcttcacttatatactgcaatcttgttataattttaacaacagaatataatttaactgaagataaatttactgtggaaaatatctaaagacatttaggtgctaaggaataaaaagtataaggaaatttccccctaaagcagttgcatgatgttgctaagacagtgttgctctccatctgatatgtaacatatatactaaaatgtactagaatgtttattactttcctttctattttttctgtcccctactccacctcattcttaaagggctgcctcaaatcttgatctcttcatcaaagtctatgatattaaaatctacatttagctttctttctctgaattcctagggtacccattcattccatgctacaacatttagtactcagttatatactattttaattgttgtttttcttgaattcaagtctttctaagttctttggaagtggttacagtgatcagtatttcaccttttcatggtgcaaggcacagctacaactattggttcatttaactgtttttatttattgatcttttattgtctttattaaagacaaaaacccattttcttctaggaaacccttcattcaagcaaaaagaatttagttattgtctttggtgccacatgctatgagaaagttatggggcatataataagatctccctacccataggcttcacagagtctgtagagtatgtaaatatacacaaagaattatagtattctgtgactgaatgttgctggtaccttggggacacaaaaatagggtagaatcagaaaaagggtctatgaagacagtagcatgtgaaggatctataattttgaaacataaggagaatatactaaaagcaggaaaggggccgagtcagatgtcccttgtcctaacaccttgtttttccatattatagcacttgttatagttggggtcgatgacattttaaaggatattatcatatttatctttttgtacttagcatttagatagtgccaggtgtattaaaaagtacttagcaaatactgaatttgaaaatttaataaaactctatgggccaaattatgtttaatgtgttcagttaggccacagccaaaattacagcaagaagagtagtgtgaaataaagataagacagtggatagctttctgtagacttcatataacatagattagaactattctaattaggtttataaggctattaataagattcctaaacctattgttctgccttaagaaaagttgtcttctgttgtctcaaacaaattaattaatctccccaaatagcaaaatggaatatgttactaaagggttgaaatttagcgtattggagtatgagatatgtttattattcatgaagtcaagagtttttaaatgaaaacatttgtgtattctcatgcttcgaaaattgcaaaatctgcaaaataaaatcttaaattacaaaaaaattaaaactattggtaatagggagctattaatattttttgattgggagcaaattgattaagactgagtgatctccagtagtctatacaataaaatggagacacaagaagaacattcattcaacagttgtactttatgtgctgggccctgcagatgcagaaaatttcaatgaactgtaataaataatatgctagtgttaggaaacttggactgtagtaacaagcaaggacacaaactaaggttatagcaagaagaaggtgaagaagatggaattaacaggatttaggtatggtgcgtgaaggagaggttgatattaaaaatgtatgagatagcaatataaaggtgataatgactgcttctgaatctcttttctactttaggaattattgaagcacttcataggtattatcagaatgctgccacagatgtgagacgggtgtggctttcttcagtggtggatcactttcattcatctttaggcgacaaaggttggggttgtggttacagaaatttccaaatgctactttcatcattattacaaaatgatgcttacaacgattgcttaaaaggtatgtgaaatctagtactctgaacttgtcatctgataaaatacatatgatatagaatgatatagcatacacaattaatagctttaacagttagtggatatttatataagaaacctgaattctggttagaggaagagaaaatgatagaagatgtcaggaataactgtcttaaaaaccgtaaagttccccgagtacataatacactgctaaatattattcagtactttattaacagtcatgtaacatgtttgcttgtgtaattttaggtatgttgattccttgcattccaaaaattcaatctatgattgaagatgcatggaaggaaggttttgatcctcagggggcctctcaacttaataacaggttacagggaacaaaggcctggattggagcatgtgaagtatatatactcctgacctccctaagggtaaagtatgtaccttaaaacctaaataaatgttatttccttatcggggagctttgttttgtaaaattttattttttagcaaagagatagtttaaaaataaaattaagtagcactaaattaagtagcaatgaaaatcagcagcctattcactatcttgtgctcttctctaccctcaagttctgtctctcagaggcaactgtcacttccattgtttttaaatggtatgctttcatagctgtttcttggtttatgagtttcagatagtctgttttaatatcttatacctgtttaccttcaatccttctgatatgattaaatcttggtttttattaaaatcagagtttacatcattttataaagtcagattttattatacaattgtgtaaatattgcttgttgctgattttttctaaaatcatttataatttttcttgagttaataattgtgtttccttttctcttttactataatatgtgacgacatcatggcctcaagtttttgcactctacctgtcatgtaatctgaggctctccttattctcggacacatccttcttgagcattctgtcctctttgctccaatctggactttttgccttctagatctacagctattgtcatgtagcattttttcactgttttgtgtgtgtgtgtgtgtgtgtagtctcatttttaaaatgtataacctatttattttctgtggaagttattccaaccttctcttagcccatcataatttcacgatattatgaaatttcaccatggggtgtggggctttgattcattgtgttgggcatttgtttttctctttgaatctggaattgtgagttgtctaagatcttagttccatctaggatagtaggtaagagcttgaactttggagcgagactgcctaaccttgattcatagctttcctacttaatagctgaatgaatgaacttgtctgtacttaggtctactattgataaaagaaggtattaatagtagttagacaattaaatgggataataaagtacttagaactgtgactggcatacagcatgacttcagaggttaactattgttgtttgataattataatgtctctgttttctttgtggaactattgatagttggccactgaactaatctttttttttttttttttttttttgagacggagtttttgctgtgttgcccaggctggagtgcagtggcgtgatcttggctcactgcaagctccgcctcctgggttcaagcgattcccctgcctcagcctccctagtagctgggattacaggcttccgctaccacgcctggctaatttttgtatttttagtggagacgaggtttcaccatgttggccaggctggtctcaactcttgaccacaggtgatccacccgcctcggcttcccgaagtgctaggattacaggcttgagccacggcgcccggcctgcttctttaccttctaagtttatcatgtctcttttttaaaaatctttgctttttctctattttctagatttactcaactttatcccccaattactgtattgaaatttttattttacccattatgttaaggggtaatttcatagcatcattttctttatggttgcaaaatttcttccaatgttttctttctattgcctgcattttgtttgttcgatattagtattttttcatatctgtttgttttagtcttttctattttgaaggctttcttttaattttggaaatccttagttgtccattcagagagtgaagaatgaaacattaaaaagctgattagagtgctgtaggactgcacagagcttgcagattagcagacttatttaaaagtcttaggtggaaggcggaaggttactatttggttggggaactctcaaatatcgttatatagagagatcttttcccagaagttatccagagaagagtttttcactctcttacctagagttcctacattagtggaggggagagttaaggtgtgatttgccttctaagcaaacttttaattaatctcatatttttagcctcactgttctcaaaccttatgcttctaagctttcagcctctctctgattttgaaacatacggtctccattttcttttatttacttttatatgttctctgtggtgctttccattttctgaagatgtgagctcttttcctgtctattcccattctctttgtccttgggtgtttaaatcattttttccttcagtattatgtcattgggtttttaagaggaaatagagatagatgtctgtgatcgtgtttaatggaatgtttgcgttaagctttatggctttatattttcttttatgtttgtttctaagttatttaaccagtgtatcacattctttttaccacattgattgattagattcagaaataaaaatatttctttcattaacatagaaaaactaatgttgtgtgtatgtataataactttcttgaattatttaaagaactattttaatgccctctaaatttattcctgcttttctcctttttctttttgccaatgtgttcacactttgagattatttatactctatcatgttttgagttttaaagtaatttttttctttttctttttctttttttttttttgagacagagtctgtctccagtctgtcacccagaccagagtgcagtggcgcgatcttggctcactgcaacccctgcctcccaggcttaagtgattcttgtgcctttgcctcctgagtagctgggattacaggcatgtgccaccatgcctggctaatttttttttttctgcatttttagtagagatggggtttcgccatgttgtccaggctggtcttgaactcctaggctcaagcgatccacccgccttggcctctcaaagtactgggatcacaggcgtgagccactgcacccagccgtaatttttgtccagcttctttcttggtaccttaaataatttagaaagcttttttattaatatatcctgagtgtgtttagtagttatttacatgtctttctgttgctctctctatgagttatatcctgtagggtactgtttaattagtattctaaatgtaaatatgcaaactgctaaccccaaaacattctttttaaacggtttatccagaagtttatttgagcacttaaaacccagtaaccaactgtaagttaccagcattaaatttgctgaggctgaggttagcaattcggatgttttagagattttattgccaagagaaacaagaacaggatatctgtgctgtagtttaaagtgatgataaagctatcaaatgcttttagttatacccgaccttttaaaaacagttgttgagtagtataaacagtgtttctggttaaaaaaatgtttattcaagggtgacttcctcttgaaggaagaataccacggtggtccggtggcaaataggagatagatgtatagattgagtacacacacatttttctatgatttacaagtattttctgttatagagatttgagagaccgacaggaaaagtatttaggatctattttatatataccaatggctactgaggaattaaaatcagaaatcagcttctgatcatcagggttagaaactagaataaaagctgtgaaaaaattatgtgtagatgactttttaaaaatcaagtatggtcattatttactattcatggagattttatatatcagagaatgtttgtaacctttaggttagtcagcagacttattatgaagttatttaaatagttagctagttagaggaatagttaaatagttaaatagggagaattgttaaatagttatcccccacaaaaaggagttttttagataagtaataaaaatttatatttacttttcttcttttataggaaagtaatggctagaaacagttagttctaaactaagaatttgttgtatttgataactccatcgatgaaaatattttaaaatgccctttaaatgtgcattttgtcaatttttaataggtgtcatattgttgattttcacaaatcaactggtcctttgggtacacaccctcgcttatttgaatggatattgaactattattcttcagagggagaagggagtccaaaggtagtgtgtacatctaaacctcctatctatcttcagcatcaaggttagtattaatataactcatatttgacaatgttgtttataagataacaaattgttgctttcagacaggttaaggttttttgtttgtttgtttgtttttttagacagaatctcactctgttgctcaggctggagtgcagtggtgcaatcttggctcgctgcaacctccaccttccaggttcaagtgattctcctgcctcagcctcctgagtagctgggattacaggcgcctgccaccatacctggctaatttttgtatttttagtagaaacggggtttcaccatgttggccaggctggtctgataatagcagggagtattatgacattaatctgtttaatttttcagagctcctttgacagtacaatactttcttaggtaattaagattgatatttctacaatacttcattgggtaattaagactgatattcctgacatcttcaggaccttttgcacttcttgttttctgtgtttagttcacttgtccttcattgttcatcccttaccttcttgggtctttacccacatgtcacttgagtgaggccttccctgaccttaccttaccttaaaagtagaactcaaggccaggcatggtaactcatgcctgtaatcctagcactttcagaggccaaagcaggaggattgcttgagcccagcagtttgagaccagcctgagtgacatagtgagaccctgtctctacaaaaacataagaaaattagccaggtgtggtggcacatgcctgtagtcctagctactcaggaggctgaggtgggagggtcacttgagccttggagttgggggctatagtgagccatgattctgccactgcactccagcctgggcggcggagtgaggctgtgtcaaaaacacgtacaactcatcccagcatcccaccgctggcattttcttcacttatttacctcatttatagagtatctcttcctattagaatataagttccaagaacacaggcacgtttgtctgttttgtttgctgttatataccttcgtgcttggagtagtacccggcacatagatacttggtaaattatgaatgatggtttggattgacaggaataaacagaagtaaatgttaggaatttcattgtttaggaatataaactataagagattaagctccctccactgatattctagcatttatgggtttacttttgtttaccttttggaatcatgagagttttgttctagaacagtttttgttctttcatttgagataatttgaataagaaggatcaaaggattgggaaaggaaaagtaaaatatttggcagaataaaaatgttttttttggtaatgaagcctttagaaaactaaagttaaatgaaaaaactgaagtagaactaaactcttacgtcttaggagaacttagatacatatgtgtcagagtctgactgtatttatattctaaacacacatatgatcacacaacatacatacagagactatttgtataactgtaaatagatgtgacgtatgtataacttaaaaatcttttgataggtcacagtcgaactgttattggaattgaagagaaaaaaaaccgaacattatgcttactaatacttgatcctggatgtccttctcgagaaatgcagaaattattaaagcaagacatagaggctagcagtctcaagcaacttcggaaatctatgggaaatttaaaacataagcaataccagatattggcagtagagggtgctctttctctagaggagaaacttg

SEQ ID NO: 708 - DNA, 6181 bp, Homo sapiens
ttctttttttattatttattattattattattatcatactttaagttttagggtacatgtgcacaatgtgcaggttagttacatatgtatacatgtgccatgatggtgtgctacacccattaaatcgtcatttagcattaggtatatttcctaatgctatccctccccactccccccaccccacaacagtccccagagtgtgatgttccccttcctgtgtccatgtgttctcattgttcaattcccatctatgagtgagaacatgcggtgtttggtgttttgttcttgcgatagtttactgagaatgatgatttccaatttcatccatgtccctacaaaggacatgaactcatcattttttatggctgcatagtattccatggtatatatgtgccacattttcttaatccagtctatcactgttggacatttgggttggttccaagtctttgctattgtgaatagtgcagcaataaacatacgtgtgcatgtgtctttatagcagcatgatttatagtcctttgggtatatacccagtaataggatggctgggtcaaatggtatttctagttctagatccctgaggaatcaccacactgacttccacaatggttgaactagtttatagtcccaccaatagtgtaaaagtgttcctatttctccacatcctctccagcacctgttgtttcctgactttttaatgattgacattctaactggtgtgagatggtatctcattgtggttttgatttgcatttctctgatggccagtgatgatgagcattttttcatgagtcttttggctgcataaatgtcttcttttgagaagtgtctgttcatatcgtttgcccactttttcatggggttgtttgtttttttcttgtaaatttgtttgagttcattgtagattctggatattagccctttgtcagatgagtaggttgtgaaaattttctcctattttgtaggttgcctgttcactctgatggtagtttctcttgctgtgcagaagctctgtagtttaattagatcccatttgtcaattttggcttttgttgccaatgcttttggtgttttagacatgaagtccttgcccatgcctatgtgctgaatggtaatgcctaggttttcttctagggtttttatggttttatgtctaacatgtaagtctttaatccatcatgaattaatttttgtataaggtgtaaggaagggatcgagtttcagctttctacatatggccagccagttttcccagcaccatttattaaataggaaatcctttccccattgcttgtttttctcaggtttgtcaaagatcagatagttgtagatatgcggcattatttctgagggctctgatctgttccattgatctatatctctgttttggtatcagtaccatgctgttttggttactgtaaccttgtagtatagtttgaagtcaggtagcgtgatgcctccagatttgttcttttggcttaggattgacttggcgatgcgggctcttttttggttccatatgaactttaaagtagttttttccaattctgtgaagaaagtcattggtagcttgatggggatggcattgaatctataaattaccttgggcagtatggccattttcacgatattgattcttcctacccatgagcatagaatgttcttccatttgtttgtatcctcttttatttcattgagcggtggtttgtagttctccttgaagaggtccttcacgtcccttgtaagttggattcctaagtattttattctctttgaagcaattgtgaatgggagttcactcatgatttggctctctgtttgtctgttattggtgtataagaatgcttgtgatttttgtacgttgattttgtatcctgagactttgctgaagttgcttatcaacttaaggagattttgggctgagacagtggggttttctagatgtacaatcatgtcatctgcaaacagggacaatttgacttcctcttttcctaattgaataccctttatttccttctcctgcctaattgccctggccagaacttccaacattatgttgaataggagtggtgagagagggcatccctgtcttgtgccagttttcaaagggaatgcttccagtttttgcccattcagtatgatattggctgtgggtttgtcatagatagctcttattattttgagatacgtcccatgaatacctaatttattgagagtttttagcatgaagtgttgttgaattttggcaaaggccttttctgcatctattgagataatcatgtggtttttgtctttggttctgtttatattctggattacatttattgatttgcgtatattgaaccagccttgcatcccagggatgaagctcacttgatcatggtggataaggtttttgatgtgctgctggattcagtttgccagtattttattgaggatttttgcatcaatgttcatcaaggatattggtctaaaattctcttttttggttgtgtctctgcaaggctttggtatcaggatgatgctggcctcataaaatgagttagggaggattccctctttttctattgatcggaatagtttcagaaggaatgttaccagttcctccttgtacctctggtagaattcggctgtgaatccatctggtcctggactctttttggttggtaagctattgattattgccacaatttcagatcctgttattggtctattcagagattcaacttcttcctgatttagtcttgggagaatgtatgtttcgaggaatttatccatttcttctagattttctagtttatttgcgtagaggtgtttgtagtattctctgatggtagtttgtatttctgtgggatcggtggtgatatcccctttatcattttttattgcgtctgtttgattcttctttttttctttattagtcttgctagcggtctatcaattttgttgatcctttcaaaaaaccggctcctgaattcattaattttttgaagggttttttgtgtctctatttccttcagttctgctctgattttagttatttcttgcctcctgctagcttttgaatgtgtttgctcttgcttttctagttcttttaattgtgatgttagggtgtcaattttggatcttttctgctttctcttgtgggcatttagtgctataaatttccctctacacactgctttgaatgtgtcccagagattgtgttatgttgtgtctttgttctcgttggtttcaaagagcatctttatttctgccttcatttcgttatgtacccagtagtcattcaggagcaggttgttcagtttccatgtagttgagtggttttgagtgagtttcttaatcctgagttctagtttgcttgcactgtggtctgagagacagtttgttataatttctgttcttttacatttgctgaggagagctttacttccaagtatgtggtcaattttggaataggtgtggtgtggtgctgaaaaaaaagtatattctgctgatttggggtggagagttctgtagatgtctattaggtccgcttggtgcagagcttagttcaattcctgggtattcttgttaacttcctgtctcgttgatctgtctaatgttgacagtggggtgttaaagtctcccattattattgtgtgggagtctaagtctctttgtaggtcactcaggacttgctttatgaatctgggtgctcctgtattgggtgcatatatatttaggatagttagctcttcttgttgaattgatccctttaccattatgtaatggcctcctttgtctcttttgatctttgttgatttaaagtctgttttatcagagactaggattgcaacccctgcctttttttcttttccatttgcttggtagatcttcctccatccttttattttgagcctatgtgtgtctctgcacgtgagatgggtttcctgaatacagcacactgatgggtcttgactctttatccaatttgccagtctgtgtcttttaattggagcatttagtccatttacatttaaagttaatattgttgtgtgtgaatttgatcctgtcattatgatgttagctggttattttgcttgttagttgatgcagtttcttcctagtctcgatggtctttacattttggcatgattttgcagtggctggtaccggttgtgcctttccatgtttagtgcttccttcaggatctcttttagggcaggcctggtggtgacaaaatctctcagcatttgcttgtctgtaaagtattttatttctccttcacttgtgaagcttagtttggctggatatgaaattctgggttgaaaattcttttctttaagaatgttgaatattggcccccactctcttctggcttgtagagtttctgctgagagatccgctgttagtctgatgggcttccctttgtgggtaacccgacctttctttctggctgcccttaacattttttccttcatttcagctttggtaaatctgacaattatgtgtcttggagttgctcttctcgaggagtatctttgtggcattctctgtatttcctgaatctgactgttggcctcccttgctagattggggaagttctcctggataatatcctgcagagtgttttccaacttggttccattctccccgtcactttcaggtacaccaatcagacgtagatttggtcttttcacatagtcccatatttcttggaggctttgttcatttctttctattcttttttctctaaacttcccttctcgcttcatttcattcatttcatcttccatcgctgataccctttcttccagctgatcacattggctcctgaggcttctgcattcttcacgtagttctcgagccttggctttcagctccatcagctcctttaagcacttctctgtattggttattctagttatacattcgtctaaatttttttcaaagtttttaacttctttgcctgtggtttgaatttcatcctgtagctcggagtagtttgatcgtctgaagccttcttctctcaacttgtcaaagtcattctccgtccagctttgttccgttgctggtgaggaactgcgttcctttggaggaggagaggcactctgctttttagagtttccagtttttctgctctgttttttccccatctttgtggttttatctcctgttggtctttgatgatggtgatgtacagatgggtttttggtgtggatgtcctttctgtttgttagttttccttctaacagacaggaccctcagctgcaggtctgttggagtttgctagaggtccactccagaccgtttgcctgggtatcagtagcagtggctgcagaacagcggattttcgtgaaccgcgaatgctgctgtctgatcgttcctctggaagttttgtctcagaggagtacccggccgtgtgaggtgtcagtctgcccctactgggggatgcctccccgttaggctgctcaggggtcaggggtcagggacccacttgaggaggcagtctgcccattctcagatctccagctgtgtgctgggggaaccactgctctcctcaaagctgtcagacagggacatttaagtctgcagaggttactgctgtctttttgtttgtctgtgccctgcccccagaggtggagcctacagaggcaggcaggcctccttgagctgtggtgggctccacccagttcgagcttcccggctgctttgtttacctaagcgagcctgggcaatggcgggcacccctcccgcagccttgctgccgccttgcagtttgatctcagactgctgtgctagcaatcagggagactccgtgggcgtaggaccctccgagccaggtgcaggatataatctcctggtgcgccgtttcctaagcctgtcggaaaagcgcagtattcgggtgggagtggcccgatgttccaggtgccgcctgtcacccctttccttgaccaggaaaggggactccctgaccccttgcgcttcccgagtgaggcaatgcctcgccctgcttcatctggcgcatggtgcgctgcacccactgtcctgcgcccactgtctggcactccctagtgagatgaacccggtacctcagatggaaatgcagaaatcacccgtcttctgcgtcactcatgctgggagctgtagaccggagctgttcctattcggccatcttggctcctcctcctccaaa

SEQ ID NO: 709 - DNA, 861 bp, Homo sapiens
ggccgggcacggtggctcacgcttgtaatcccagcactttgggaggccgaggggggcggatcacgaggtcaggagatcgagaccatccgggataacacggtgaaaccccatctctactaaaaatacaaaaaattagtcagacgtggtggcgggcgcctgtagtcccagctacttgggaggctgaggcaggagaatggcgtgaacccgggaggcggagcttgcagtgagcagagatggcaccactgcactccagcctgggcgacagagcaagactccgtctcaaaaaatatatatatatacatacatacatacatacaaaccaagatatttgttatcttgtaaccttgaggaaagaacctggtatcctttaccttcggtgcatagctgggagcttgatacctagcagcattataaaccctttattgatactaaaatagagtgctactcagcaggccctagtgtagactgctatttgccccaggacctgccctgtgaactcattcagattaagtatgaatgacctcagagcccggttttctctcctagcaattgagtggcaggaaactcgatgggagaaggaaaaactcggaaatgggaggaatgcaaaaatgactacatctctcaggagatcgagaccatcctggctaacacggtgaaaccccgtctctactaaaaatacaaaaaattagccaggcatggtggcgggcgcctgtagtcccagctactcgggaggctgaggcaggagaatggcgtgaacccgggaggcggagcttgcagtgagccgagatcgcgcactgccctccagcctgggcagcagagcgagactccgtctcaaaaaaaaaaaaaaaaaaaaaagactac

SEQ ID NO: 710 - DNA, 1048 bp, Homo sapiens
gtggatatatcacattttgtttatctgttcatcagttgatgaacttttgggttgtttctgctttttctggctattgtaaatagtgctgttatgaacactgatgtacaattttttggggtgaacatttgtttttattcttttaggtatatagctcggtgtggaattgctggatcatatatggtaattctgtctttaacttaatgaggaactgccaatctgttttcctcagtgactgtaccattttatattcctattagcaataaacaagtgtcccaatttctccacatttttgccaacactgttttccattaaaaactttttattatagtcattctagtgggtgtaaagtggtatctttttgttttgatttgcatttccccagtaactaatgacattgagccttttttcatgtgcttgttggccatttgtatatattctttggagaaatgtctgtttaagtcctttgcccactttaaattgtgttgtctttgtgttgtagagttgtaagagttctttatacattctgggtactagacatgattttcaaatttagatacatgattttcaaatcttttgcctctagatgttttttacttttttatttttgatccttgaactcatctatattctatggttgtgatgtaatgatgacagaattggtgtcatttgtgtttatttaccaggttatttggaaggattatattttaggtgctctcctctcccccagtaaatggtattacgacacaagggttataaaggactgataagaaattacttaagacagaaagggaagttggcctgcttccaaaatgtggtcccagcagaagtgaagttagttacaccaataactacagtcaaaaagctatttttaaccatgataatgtacttgttgttattaatattaaagattatatttttccaggtgcagtggctcacatctataatcccagcactttgggaggctcaggcggatggatcacttgagctcaggagtttgagaccagccagggcaacatggtgaaaccccatctctacaaaaaatgaaaaa

SEQ ID NO: 711 - DNA, 1048 bp, Homo sapiens
gtggatatatcacattttgtttatctgttcatcagttgatgaacttttgggttgtttctgctttttctggctattgtaaatagtgctgttatgaacactgatgtacaattttttggggtgaacatttgtttttattcttttgggtatatacctcggtgtggaattgcgggatcatatatggtaattctgtctttaacttaatgaggaactgccaatctgttttcctcagtgactgtaccattttatattcctattagcaatacacaagtgtcccaatttctccacatttttgccgacactgttttccattaaaaaatttttattgtagtcattctagtgggtgtaaagtggtatctttttgttttgatttgcatttccccagtaactaatgacattgagccttttttcatgtgcttgttggccatttgtatatcttctttggaggaatgtctgtttaagtcctttgcccactttaaattgtgttgtctttgtgttgtagagttgtaagagttctttatacattctgggtactagacatgattttcaaatttagatacatgattttcaaatcttttgcctctagatgttttttacttttttatttttgatccttgaactcatctatattctatggttgtgatgtaatgatgtcagaattggtgtcatttgtgtttatttaccaggttatttggaaggattatattttaggtgctctcctctcccccagtaaatggtattatgacacaagggttataaaggactgataagaaattacttaagacagaaagggaagttggcctgcttccaaaatatggtcccagcagaagtgaagttagttacacaaataactacagtcaaaaagctatttttatccatgataatgtatttgttgttattaatattaaagattatattttgccaggtgcagtggctcacatctataatcccagcactttgggaggcttaggtggatggatcacttgagctcaggagtttgagaccagccagggcaacatggtgaaaccccatctctacaaaaaatgaaaaa

SEQ ID NO: 712 - DNA, 238 bp, Homo sapiens
cttcttgattctgttgccatctctttgattccttattgtttctgataaattttcctaagtttaatttccgagagctctttggaaaagtatcgattttttttcatggatggagtatctactcttttgacacagggtcttgctctgtcgtggctcactacagctttgattgctcaggctcaagcgatcctcctgccctagccctcccagtagctggtactacaggcctgcaccgccaaac

SEQ ID NO: 713 - DNA, 135 bp, Homo sapiens
aaagtactttttcttttataatatgcaacaataactttctgtttagttaattagttttaaaacaagcttaaacttataatttataaagaatcatatttgctccctatcattgttttatagctggggctatactga

SEQ ID NO: 714 - DNA, 238 bp, Homo sapiens
cttctttattctgttgccatctctttgattccttattctttctgataaattttcctaagtttaatttccaagggctctttggaaaagtatcgattttttttcatggatggagtatctactcttttgacacagggtcttgctctgtcgtggctcactacagctttgattgctcaggctcaagcgatcctcctgccctagccctcccagtagctggtactacaggcctgcaccgccaaac

SEQ ID NO: 715 - DNA, 136 bp, Homo sapiens
aaaagtactttttcttttataatatgcaacaataactttctgtttagttaattagttttaaagcaagcttaaacttataatttataaagaatcatatttgctccctatcattgttttatagctggggctatactga

SEQ ID NO: 716 - DNA, 7710 bp, Homo sapiens
ttgtatcttaaatacaatcaaaacttcatgtttaatagggattcatctgtttcccatactttttacatgttcagttcagacagaactcatggaagaaaagacttttctgtgagatagaacagaccatctgcttgaccggatggctctgagggacagccaaactcccaatggccaaagggctgtgaggaagggcaacacatatcagaagaattttcagcaagggctgaaacacagtaaggttagccacaaaatggaatgagagaagccctaacccaatgggagtttgcctaattttaatgaacccaaactctaacattgtactggaaaagcagcattaaaatccagcctgattatcacaatttacagaatttctcaccagaggcccacaggtgaaaaagctgcttactctaaagcccttagaaccgtattgtgaactgcgcatgcgagggatctaggttgcgtgctccttatgagactctaatgcctgatgatctgaggtggaagtttcatcctccaccaccaccccgtccatggaaaaactgtgttccacaaaactggtccctggtgccaaaaaggttagggactgctgctttagaatataagaaacaactcaagcagccaacgggtctggagttaacacttccagccctcccctttgtacacactcaacacttcttgctgaactggccgttaataaccacttgtgaaatccctccccacacctgcacttaggcgtttgtctcttcctaccttcctttactgagtagtggcaaaataataggagagtggaagatggtgatgggcaatgaagagggacctatttctgaagaggagatgttttaaagatattttatttttcaataccagtaatgactgaaaattaaagaattaaagcaggaagcaaaacaaaaacaaacaagaaacccaaaacttgcaacctaaactctccgggaaaaaaaaaattgctataaatgttaaaagacttaaagagaacattgacaatgcagccctgatgtacctaatcatacttcaaactgctggatgttttaagctgagaatctccccagtgcctttctagtgctctaaaatcatctcccaaacagatgagaaatgaaacaaacaggtctcccttcttgagtacataatttttataaattgcgtcggacccacagtgaatgtattttagagagtttcaccaaaactatcaaagatcaaatggcagcaaaagatcagggaaagaaggtagaaaaactatgcagtcacagagctaacccgcaagctgcccttagtcctatacacctgaaatcaaatccatagccaatggtgaggaagaccacatcagaggttagctgcatgacagcacagctgggtcctatctccctgccaggggtctcaactgtaactcgcgctccaactgctctgcagtcagggtgccctggatggcttcacagcctggattgaacacagagtaggcgctcttctctccctctttcttctcttcagggcctcgtgtcccgacgtacatccaatagaacaaggacaggacaaaatatgccaggccaaattccagttccacaaacagtcccagcaggaccaaccagagaagaaccttcaagaaggtgatattggtcaggaaagactggtcccagcacgacggcagaggaatggctgtgttccatggtgtctctgatgtgctgccctggggctgagccgcttcctaggatacacaaacaaacaaaagaaagaataaagggtaatggagctgagatgatcaaaactaatctgaaaaggcagttttcattgctctgagaaggctgctggctcattgatttctattctttcatgcaactctctaaaacaatcatctccaaagaacctatgtgctctactccaactgaatcaaaactgatcagcacttagtgagatgtgacctaataaaagccctacgtattcagacagattcttattcgtgggagtcatttcttcagattagtctgctgctaagaagagctaatttgtgccccatacagaaactcctgaataactgataatgcaacagtcatgacaaatgcttcaaatacagagtcaatatacctttgttgattggattagatgacctaaaatattacaagtgacatgattctaaaatagagacaggaaacaaaaatcctttttacgtttaaaaaaaaaaatcagccaggtgcacacctgtaatcccagcactttgggaggctgaggcagacagatcacttgagctcaggagtttgagaccagcctggccaacatggtggaacctcatctctactaaaaatacgaaaattagccagcatggtggcacacgactgtaatcccagctactcaggaggccaaggcatgagaatcgctcaaacctgggaggcggaggctgcagtgagctgagattgcaccaccacactctagcttgggcaacagaccaagacactgtctcaaaaacaaacaaaaaccactgttacagccattactgggcccccttaccttcccatcccgtgattaacctacacaggtcattgtcactcacccaaggcccagccaatgtctcctaactagactccctgcctcctatctcttccctccccaagccatcctatgtacaactgctaaatgaattttcttaaagacctattaccctcctgttcacaaaccttcaaaaactttcactgtctacaggataaaatccaaactccttgggctggaacccaagaccctcaatttgttcaacagattgaaatgccagtagacaggcccctgtgccagatgctaatggcagacacaggtatttagacagctctgtgtccagtccactgttttcggaactcttttgaacatgacctacaataaggaatacattttagactgtaatccagaatacatatatgcaacaaagtttcacaagtcaacacttaccctccctgagacattctcttgtatttcctattctactttaaaaacatttttaatagggaacaagatcttctatattaatttcaccatccactaatgggtcacagtggtctaggaaattccatgacaacacgatccacaatcttttgttccataaatgacccttcttctccagcttaactggtcttattacccaaagatattctcagtcctcatctcaagcctagaattccgtccacttcctctttcttccttaactctttgccttccttccaggcaagcaccgttcatgaactgtcagccctgacctccctgggcatcagggagggtgccccctctgcctcccccagaactagctctcccgttcattaagcaccaaactattcagcactacagtgtctctcttttactataggtcatgtcatgtatgatgccagattgtttaagtaccaggaagccacgtgtctccagatccaaacatggcatcccatacttaggttctcaattcatagcagaactttcagttcatctcttcagttacatcccctattcttcttcacgtgcatatttaaaaggggatcacaaatactggtcatctgatttatgatgtttcagaagttctattttgtcagaaccttcttttttagcatcaacattgtaattattatcttttcagttagattagaaagtctgattggagaggcccttatattatcagccacatccctgacccctgatactcattaaagaaagaaatgtctgtttcagatttgacatgcatgcacagtatgcgttctggcccaagaagaatgcatctgggcagtgttctgggcaaaggggagagtagcatgagatgacggggctaaggagggagggcatgagggtgggagccagataaagtagggccaggcaggttgcagtgaagattctggaaatgggaaacagctgaaggtctaagcagggaactaaccaaaagcatgaaatccctggtgctaaaaaggttggggaggaggcctagcaagagagagccagacattgaccagggtggtgacagcagtcagatggaaatagtggactgatggacacaaaatacattctgaatatacatgctgagattcacaataaactaaatttatcatttagggagtataaaaagaagaatgttcctatgtcaccatttactgagagccttccaatgtatgaactctggtaatccaggaagcaggcattattattcccaacttactgataagaaaacactgagaggttaagtaatttccctaaagccataaaactagtgataggcagagatgaggtcagtctcggatcctaggatggtctcctccaaaatatattttatttaattaggggcctttatggggggtggcaggagaaaggttagggagctagaggtagatgggtgtgggggtgggggggtaaacaaactgacgaagggaacaaacaagaggagagatacggacattcttctgcctcatttggaacttgtcggagtaccagttcccttctgctgtaaaacctgggtgaagaagtgtttgtgactgttacatcacacacaggcatggcccaaggaaggcactgccattcctcaaatatcaagctgcttcttaccttagggcctctgcacttgtggttccctctgagaggaatgctcccttcccctcatatcacttggttgacccctcctactacaaacggcaaaaatgtcaccgtatgtgcccttggcttagtccccgtttttgccagggtggttccttcttgttaaatgtctcctccttagtgagttctccctgctcagctgatttaaaatagtactctgctcccctcacccctaattcactatcacagtctactggttttatcttttttctttcatagcatttatctggttttgtttattgtcctcctttccctgctgccccaagctcaaatgcaagttgtacaagagtaggacttgtgtgtcttaattacactgtctcccaggatttagaacaaaagctggaacacagcgggcacatgacaagatttttgttgaatgaatgaatgatagtgagggaaaggaagaaattcaagatgactactagattttgcgggggtgaggcacagctgtgcttagccaggcgactccaaaggagagcctttgagcagaaggccagcctgagccaaggcctggaggtcaggagtggtggatgggtatgggaaatgggttctggggcagggtggtgtgctgggggcttgcctgggatatggctggagagggaagcaggaggtttctgtaggaatttttaaaagttaccagcatttttgtcctaatgtggaagaagctcgtcacagaattatttcaggaaactgcttttctccaagcaaaatctggtagtgggaaggaggatgtagatacttcctcatcaatgactgctgaaaagatgcagcggcattgtcagtcacagcgaggcccgggtcggggcagaggcatcattgcagtcagagcttggcccaaatggaggccgcagtggctttgttgctccaaatgacatggtttagttattttgatggccaaagagtattctttgtgcatatacattacagtttcttgatcccttcatctgtagatggacaggagataaagtttttggaatctccatgcctgagattaaaaggtgtgggacttcctctaccaggctcatttccttggacctaatatcctctgggtttcttgggtttctccacatggctgtggatgacaggatttcccaaagctttatggctgaagcatattccatagtgtatctgtatggtggtttctttatcccttcagctgtgggtggacaggacaggtcatttaccatgatgtcctctaggttcaacagtgtggctgcaaatgatgtaatttcattacatttttctggatgaagagtattccatttgtgtatatatactacagtttctttatcccttcatctgcggatgaacaggtttctccacatggctgcaaatgacaggatttcatccacttctgtcgtggaagggtattccattctggatatatatttcagttttgtcatcccttcatcaagggatgaacaggttcaactgtgtggctccaggtgatatgatttcagtatatgtgcacagctgaagggtattccattgtgaatgaatactacagtttctgtatcccttcatctgtggatgaacaggtctctctccacgttgctggaagtggggtgatgtcctaaagtttgatggctgaagagtattccattgtgcaaatatcctggagtttctgtattccttcatctgtggatgaacacgactgctttacatttggcctgtgccaatggccatgtggaagtggtcactctccaggtgaactgaaagtgccagactgacattggtgacaaatgaaacaggatgcctttgatgaaggctgtacattgccaagaagagatttgtgtcatcattctgctagaatgtggcaccaacccagatcttatggatgtctatagcaacaatgcactacactatgctgtgtataatgagaatacactactggcagaaaaactgccctcacaccatgtgaatactgaagtgctgaacaaggatactgaagtgctgaacaaggatgcaaacacaccacttttacttgctatagtttgcaaaacacagcaaaaggtggaattttagtgaagaaacaagcaaatgtacatgctgttgataggttgaaaagaacagctctcatgcctgttgtacattatggcttgtcaggtatagttagcattcttcttcaacaaaatattgtctttactcaagagtatgtatgaacagactgcagattatgctatttctggtggtctgacaagcactcacaacaaattttgcaacattaaaaaaaaaagatacttgaaaatggtcttcaaaatgacaacccagaagaagcatccaagaagaatgcaagtttgaaaacaggaggagcaagtgcaaaagattctgggagttctgaagcatctgcattcagtatttaaaaaaaaactgtgtgttgactcatggcctaaaccagatgatgaagacttgacttttactaccaagcagtgtatccctgagagtgtttcaaagtctttacttggaccttcatataaaaaaggaaaaaatatatagtaaatggaaagggagaagggcctcctgaaaaacatccttccctaaagcctaccatggaaatgaaagattctgttgtgaagaaagcaatagaaaggaagaacgaacaaacatccaaagcagaacaagaagtacaagtgacatcagaggaagaacaggaaaagcttgaaagtgaaaataaacagccacaggttgaagaagctagaaagaagcacgaaagttaaaaaaaaaaagtatcaaaaaaacgtatatgatagtacatctgctgacgatgatgataaattaattcaacaaagaaagagtggaaaaacttaccatcagcgatttcctaggaaggagaacaaagagtatgctaggcctgcaaagaaaatgtcaaatgaaaagaaaaaggtcaaaaagcaaactcatttagagatgaacctgatgacttaactcggccctctgaaacagcttcagaggatcatgagaaaccttaccctcattgtaagaagtttatgatgctcattaagcaatatggaatggattgtaatgattctcgtatcctaatggaagtccagaatgcatttctttcatgtgaaaagtcactggaccttaaaaaaa

SEQ ID NO: 717 - DNA, 2149 bp, Homo sapiens
ttgtatcttaaatacaatcaaaacttcatgtttaatagggattcatctgtttcccatactttttacatgttcagttcagacagaactcatggaagaaaagacttttctgtgagatagaacagaccatctgcttgaccggatggctctgagggacagccaaactcccaatggccaaagggctgtgaggaagggcaacacgtatcagaagaattttcagcaagggctgaaacacagtaaggttagccacaaaatggaatgagagaagccctaacccaatgggagtttgcctaattttaatgaacccaaactctaacattgtactggaaaagcagcattaaaatccagcctgattatcacaatttacagaatttctcaccagaggcccacaggtgaaaaagctgcttactctaaagcccttagaaccgtattgtgaactgcgcatgcgagggatctaggttgcgtgctccttatgagactctaatgcctgatgatctgaggtggaagtttcatcctccaccaccaccccgtccatggaaaaactgtgttccacaaaactggtccctggtgccaaaaaggttagggactgctgctttagaatataagaaacaactcaagcagccaacgggtctggagttaacacttccagccctcccctttgtacacactcaacacttcttgctgaactggccgttaataaccacttgtgaaatccctccccacacctgcacttaggcgtttgtctcttcctaccttcctttactgagtagtggcaaaataataggagagtggaagatggtgatgggcaatgaagagggacctatttctgaagaggagatgttttaaagatattttatttttcaataccagtaatgactgaaaattaaagaattaaagcaggaagcaaaacaaaaacaaacaagaaacccaaaacttgcaacctaaactctccgggaaacaaaaaaattgctataaatgttaaaagacttaaagagaacattgacaatgcagccctgatgtacctaatcatacttcaaactgctggatgttttaagctgagaatctccccagtgcctttctagtgctctaaaatcatctcccaaacagatgagaaatgaaacaaacaggtctcccttcttgagtacataatttttataaattgcgtcggacccacagtgaatgtattttagagagtttcaccaaaactatcaaagatcaaacggcagcaaaagatcagggaaagaaggtagaaaaactatgcagtcacagagctaacccgcaagctgcccttagtcctatacacctgaaatcaaatccatagccaatggtgaggaagaccacatcagaggttagctgcatgacagcacagctgggtcctatctccctgccaggggtctcaactgtaactcgcgctccaactgctctgcagtcagggtgccctggatggcttcacagcctggattgaacacagagtaggcgctcttctctccctctttcttctcttcagggcctcgtgtcccgacgtacatccaatagaacaaggacaggacaaaatatgccaggccaaattccagttccacaaacagtcccagcaggaccaaccagagaagaaccttcaagaaggtgatattggtcaggaaagactggtcccagcacgacggcagaggaatggctgtgttccatggtgtctctgatgtgctgccctggggctgagccgcttcctaggatacacaaacaaacaaaagaaagaataaagggtaatggagctgagatgatcaaaactaatctgaaaaggcagttttcattgctctgagaaggctgctggctcattgatttctattctttcatgcaactctctaaaacaatcatctccaaagaacctatgtgctctactccaactgaatcaaaactgatcagcacttagtgagatgtgacctaataaaagccctacgtattcagacagattcttattcgtgggagtcatttcttcagattagtctgctgctaagaagagctaatttgtgccccatacagaaactcctgaataactgataatgcaacagtcatgacaaatgcttcaaatacagagtcaatatacctttgttgattggattagatgacctaaaatattacaagtgacatgattctaaaa

SEQ ID NO: 718 - DNA, 732 bp, Homo sapiens
gatctgatgcatgaaaattgcttgttgaagagagatattgcctttattgtgtatgtaagtatacacaataaaaaataggaacctcgaaagggaaaaaggacattgaaattgttaaagaaatgaatgatgaccttcaagagactataaaactgaatggaaaaacattaacaaaaacagtatcccagtatggtcaacagcttaacgacctcaaaactgagaatacaatgctcaagtctaaactggagaaggaaaatcaaaacaaggaaagactggaagctgaagttgagtcattccatgctagactggctgctgctataagtgagtgtgatcaaagtgtgaaaacaaaaagagacctagaacttgctttacagagagcacaagacgtttctttacaagaaagaaaatgagttctgatatttctgaactaaaagataataatgagtttttaactgagcaactttccgaagctcgaattcaataccctaaaaagtaaactccatgacacaagaaattctctcagagaaaaggttttggttttataaagtgtacaaaaggacctaagccaagtaaatcctttggaaagtgggactacgtagaggagagaatatctcaactacaacatgaaaatctgttgcttcaacaactagatggtgctcataagaaaggggataatgaacaaaaggtaattaatatccaaggatgctgtcttgagagtgaaaaggaaggtcttct

SEQ ID NO: 719 - DNA, 566 bp, Homo sapiens
ttttcttcctattttaacatttattgtttacgtcagcggctcttaatctttattgtgccagagatcacacctgggaggctgttaaaatgcagattctcaggattctaccctcagacattctgagtcagtgggggccctggaatctgcattttaacattactacaggagattcctatgcaggtgcgtggtctatagaccatacttttcaaaacgttcatccatgacttgttaaggaaagagtatttttcacatagaagtgaaaatcctatatagtatagaatttaggactgcaagtgatctctcccttgaacacacacacacacaccttacacctttataaacattcacattatgtcctgtactttataatacagtttgtgtgcactcatcttgtcttctctctcagatttttgagaatgggatccaagtctttatgtagcctagtgctccaaagttgtgaaataaaattatgtgtgatagaaaccaaagcatatggttcaaaagttactttctttggcttagggagttggttttctctgccaactatgtaaattcttagtcattcc

SEQ ID NO: 720 - DNA, 565 bp, Homo sapiens
gtgaggaataaatagggaaaggggaaaaactggaagggggaatcattaggacccagctgcacagacatttgcagctaaaggagtggagatccagacgatctccgtgggactgggagcagctgtgtttaggattgacactgggggaacaggcagagggaagcatggtcttggcattggcagttttcacattgttggcttctgtctgttgccagcttcattctcattctttctatccttgtatgtcctgtttttactcttcattgtcattttagtgggtttccaggaggcagcagtgataaactgcatgcgtttagtatgccatgttttcctggagatcccactgactttactttcagtaacagtggttttcatttgccaactctggtgtttccccaccatgcaggtaagatagttaggctctaaacctattgaaatctggggttttcattttcatagggcacttatttatccttattcatatatgggaagtttatctctctgtgccaataggcagagtttttggctcatttttatggagtttttagctataagagagaacttgctt

SEQ ID NO: 721 - DNA, 902 bp, Homo sapiens
gtgaggaataaatagggaaaggggaaaaactggaagggggaatcattaggacccagctgcacagacatttgcagctaaaggagtggagatccagacgatctccgtgggactgggagcagctgtgtttaggattgacactgggggaacaggcagagggaagcatggtcttggcattggcagttttcacattgttggcttctgtctgttgccagcttcattctcattctttctatccttgtatgtcctgtttttactcttcattgtcattttagtgggtttccaggaggcagcagtgataaactgcatgcgtttagtatgccatgttttcctggagatcccactgactttactttcagtaacagtggttttcatttgccaactctggtgtttccccaccatgcaggtaagatagataggctctaaacctattgaaatctggggttttcattttcatagggcacttatttatccttattcatatatgggaagtttatctctctgtgccaataggcagagtttttggtctcatttttatggagtttttagctctgtgagagaacttgctttatacaggggtttcacttcaaaatttctgcctcggccgggcgtggtggctcacgcctgtaatcccagcactttgggaggcccaggcggacggattatgaggtcaggagatcgagaccatcctggctaacacggtgaaaccctgtctctactaaaaaatatgaaaaaattagccgggcttggaggtgggcgcctgtaatcccagctactgagaaggcggaggcaggagaatggcgtgaacccgggaggcggagcttgcagtgagccaagactgcgccactgcactccagcctggacgacagagcaagactccgtctcaaaaaaaaaaaaaaaaaaaa

SEQ ID NO: 722 - DNA, 2017 bp, Homo sapiens
gattttactgtttaatagtacaaaatttttgcaaaattagcagataatactcatcatttctaacttctgaaatcttttgtttaggtgagacatggaatccattaaaattgcattatcagttaagaaatgtacgggaacgattagctaaaaacctggtggaaaagggtgtattgacaacagagaaacagaacttcctactttttgacatgacaacacatcccctcaccaataacaacattaagcagcgcctcatcaagaaagtacaggaagccgttcttgacaaatgggtgaatgaccctcaccgcatggacaggcgcttgctggccctcatttacctggctcatgcctcggacgtcctggagaatgcttttgctcctcttctggacgagcagtatgatttggctaccaagagagtgcggcagcttctcgacttagaccctgaagtggaatgtctgaaggccaacaccaatgaggttctgtgggcggtggtggcggcgttcaccaagtaactctgctcggggtgaaccattctcctttctctcaagtaaaccagtagtttttcttctgttgacttctggttttctgtaatttgtactttcccacactataattggcttctgttttacaaaatggtgggtggctttttcttttttgtacgtgtacaggattctgctggtacgagaggccttcctctttctgtttttaaaaaaagttttactgccatattggcattccattccctgttgccatcctcactgttacctgttttgggtttctggtctactttgactttcaaagtacctccagcctcctcatacgcacagcttttggatgacctcagcttgagtttctccatatgtgcatgtacatctagcattctgcctacagttcagacagaagtcacaaaaaggccttcaactcaccaaaggtaaatatctgtatctattaggacattttttacatagacttcagttgagatgtatacttagcaaaattatttttaaattgaaacagcacagtaaatacttaatataaaatgtcccttggattttgcttcccatgtaaatctattgtattattacacttgttataattttaactataaaggtccaattgtttcacagagccagtttgggatgggctgcattccatttatgctgtatatagtttgaattatatataaattaccccttcttctggccacccctgctcccatcttagtattttgcaagatctaatcagttgtacacctggtgcccctcgcttgcttcaatcatggttatttgatggcaaaatcgacctcttgtcgctgaaggagagagaaaagatgtgtgtctgattggtcctgggattttttgagctgtgccatttatggtactctttgcctatgcatcccctttttagattttttttaaattttatcttactgtttttataatttctattgggaagaggcttgtgaccagtaccaatcttgagtttctttttctgtccacaagtaaattaatatctgctctgaaatgtcatttatctactcacacattcttggggaaaaaaatcaaatgtcagtcctagcagatgttgcatgtaaattggtagcaagtaatgattacaacccagaggattaagaattttgtaacagaaagctctatgttttaattttttatatacaattaggataattagcattgtcagactataaacctttgctttttaaagtttatttttactatttctttatcactttattgtatcatcaccattggtttcataatgtaaatactatatgttgaacaaattaaatgtcaaaattttttattaccatagtccatgttaatagtggggctttcaggtgtttagagattttttttgttgttgttaacattcattgcaaaagtactagatggtgtataactctagagttgaattttaagggattccctaatatgtatactatctttttatctgaagtaataaataaacaatgatcttgaaagtgcctgaatcagagcaagca

SEQ ID NO: 723 - DNA, 2017 bp, Homo sapiens
gattttactgtttaatagtacaaaatttttgcaaaattagcagataatactcatcatttctaacttctgaaatcttttgtttaggtgagacatggaatccattaaaattgcattatcagttaagaaatgtacgggaacgattagctaaaaacctggtggaaaagggtgtattgacaacagagaaacagaacttcctactttttgacatgacaacacatcccctcaccaataacaacattaagcagcgcctcatcaagaaagtacaggaagccgttcttgacaaatgggtgaatgaccctcaccgcatggacaggcgcttgctggccctcatttacctggctcatgcctcggacgtcctggagaatgcttttgctcctcttctggacgagcagtatgatttggctaccaagagagtgcggcagcttctcgacttagaccctgaagtggaatgtctgaaggccaacaccaatgaggttctgtgggcggtggtggcggcgttcaccaagtaactctgctcggggtgaaccattctcctttctctcaagtaaaccagtagtttttcttctgttgacttctggttttctgtaatttgtactttcccacactataattggcttctgttttacaaaatggtgggtggctttttcttttttgtacgtgtacaggattctgctggtacgagaggccttcctctttctgtttttaaaaaaagttttactgccatattggcattccattccctgttgccatcctcactgttacctgttttgggtttctggtctactttgactttcaaagtacctccagcctcctcatacgcacagcttttggatgacctcagcttgagtttctccatatgtgcatgtacatctagcattctgcctacagttcagacagaagtcacaaaaaggccttcaactcaccaaaggtaaatatctgtatctattaggacattttttacatagacttcagttgagatgtatacttagcaaaattatttttaaattgaaacagcacagtaaatacttaatataaaatgtcccttggattttgcttcccatgtaaatctattgtattattacacttgttataattttaactataattgtccaattgtttcacagagccagtttgggatgggctgcattccatttatgctgtatatagtttgaattatatataaattaccccttcttctggccacccctgctcccatcttagtattttgcaagatctaatcagttgtacacctggtgcccctcgcttgcttcaatcatggttatttgatggcaaaatcgacctcttgtcgctgaaggagagagaaaagatgtgtgtctgattggtcctgggattttttgagctgtgccatttatggtactctttgcctatgcatccccttgttagattttttttaaattttatcttactgtttttataatttctattgggaagaggcttgtgaccagtaccaatcttgagtttctttttctgtccacaagtaaattaatatctgctctgaaatgtcatttatctactcacacattcttggggaaaaaaatcaaatgtcagtcctagcagatgttgcatgtaaattggtagcaagtaatgattacaacccagaggattaagaattttgtaacagaaagctctatgttttaattttttatatacaattaggataattagcattgtcagactataaacctttgctttttaaagtttatttttactatttctttatcactttattgtatcatcaccattggtttcataatgtaaatactatatgttgaacaaattaaatgtcaaaattttttattaccatagtccatgttaatagtggggctttcaggtgtttagagattttttttgttgttgttaacattcattgcaaaagtactagatggtgtataactctagagttgaattttaagggattccctaatatgtatactatctttttatctgaagtaataaataaacaatgatcttgaaagtgcctgaatcagagcaagca

SEQ ID NO: 724 - DNA, 2017 bp, Homo sapiens; identical to SEQ ID NO: 722

SEQ ID NO: 725 - DNA, 1584 bp, Homo sapiens
caagagaaaattttataattatgataggactcctagctcttataagaagtggcctttataatgccacctttagtacttttcagcattctacaggtggacaattcaagaactatatttgtaaaataatgttttaaagagagccaacggtaaaggcaggaaatcactcaaaacattttgtatgttccagagactactcaaatattaatcctgttttcaggagtaacttcgtaggcgtggaaaagatttttgtttatttagaccaattcattatttattaacttcattcaataaatagttacattgtacctactacatgccaggcactatgttagtgagtttgttcactcagtcagccagctctgtaacatggaaagaaatgggaacaatttcacctatctcatagccacctgaaatagctcagcatagatagttttctgttcatttgcttctcaggctgttccctcactcactcattcactcattcatttgcttattcatcaagtacccattgagggcattctgggtgctgaaccctgtgctgggtaggcactgtgcgggtgtgagttgtgttctgaagggtgaaggctgaggatcttgagagcccagaggagggatccagcccgacccgagggaccaggaagagtggtctggaaccagcaccctttggacctaggctagaggccgagcaggaaccattgaggagagaggcaggaggtcagtggcccaggcgggaaccctcacacccaagccccaacatttttattttgttttgggaaatgtataggattaaagtaataactggaaaggaaataaatggaaacacggaatggaaacatttcctattttccctattgttatctgaagacaaacttaatttttatgttgctactttctctcttaaatatcctcttactaaatagtctgtcgtattaattagactgggtagtcctaactcaagaaagcatttggcaattaaaagatggaggactcagggtctgaccgttttccttggccttcatttggctttctctctcttttctcccctccttcttcccaggcctggctggctggtgcctggacaccatttggggctctgagagggttgtggctgccagcccccagtcgccaatgcctggtcaggcactcgtatcccctgtcctgttcaccatttctcctttctcattgttctcataatttgtcctgcttaaaactcctaggttctaagggacacccctgcattgcttgcctttcctttgctagacaccagagagaggctaaaaagtgaaatgtggcctggtgcagtggctcatgcctgtaatcccaacactttgggaggccaaggcaggcagatcacttgaggtcaggagttcaaggccagcttggacaacacgacggaatcctgtctctactaaaaatacagaaattagccaggcatgatgacccatgcctgtagtcccaactacttgggaggtaggaggatggcttgagcccgggaggtcaaggctgcagtgagctgagattgtaccactgtactccagtctgggtgacaaagcaagaccctgtctcaaaaaaaaaaaaaaaaaa

SEQ ID NO: 726 - DNA, 1876 bp, Homo sapiens
caagagaaaattttataattatgataggactcctagctcttataagaagtggcctttataatgccacctttagtacttttcagcattctacaggtggacaattcaagaactatatttgtaaaataatgttttaaagagagccaacggtaaaggcaggaaatcactcaaaacattttgtatgttccagagactactcaaatattaatcctgttttcaggagtaacttcgtaggcgtggaaaagatttttgtttatttagaccaattcattatttattaacttcattcaataaatagttacattgtacctactacatgccaggcactatgttagtgagtttgttcactcagtcagccagctctgtaacatggaaagaaatgggaacaatttcacctatctcatagccacctgaaatagctcagcatagatagttttctgttcatttgcttctcaggctgttccctcactcactcattcactcattcatttgcttattcatcaagtacccattgagggcattctgggtgctgaaccctgtgctgggtaggcactgtgcgggtgtgagttgtgttctgaagggtgaaggctgaggatcttgagagcccagaggagggatccagcccgacccgagggaccaggaagagtggtctggaaccagcaccctttggacctaggctagaggccgagcaggaaccattgaggagagaggcaggaggtcagtggcccaggcgggaaccctcacacccaagccccaacatttttattttgttttgggaaatgtataggattaaagtaataactggaaaggaaataaatggaaacacggaatggaaacatttcctattttccctattgttatctgaagacaaacttaatttttatgttgctactttctctcttaaatatcctcttactaaatagtctgtcgtattaattagactgggtagtcctaactcaagaaagcatttggcaattaaaagatggaggactcagggtctgaccgttttccttggccttcatttggctttctctctcttttctcccctccttcttcccaggcctggctggctggtgcctggacaccatttggggctctgagagggttgtggctgccagcccccagtcgccaatgcctggtcaggcactcgtatcccctgtcctgttcaccatttctcctttctcattgttctcataatttgtcctgcttaaaactcctaggttctaagggacacccctgcattgcttgcctttcctttgctagacaccagagagaggctaaaaagtgaaatgtggcctggtgcagtggctcatgcctgtaatcccaacactttgggaggccaaggcaggcagatcacttgaggtcaggagttcaaggccagcttggacaacacgacggaatcctgtctctactaaaaatacagaaattagccaggcatgatgacccatgcctgtagtcccaactacttgggaggtaggaggatggcttgagcccgggaggtcaaggctgcagtgagctgagattgtaccactgtactccagtctgggtgacaaagcaagaccctgtctcaaaaaaaaaaaaaaaaaaaaaaagtgggccaggcacagtggctcatgcctgtaatcccagccctttgggaggctgaggagggtggatcacctgaggtcaggagttcgagaccagcctgacctacatagtgaaatcctgtctctactgaaaatacacagttagctgggtgtggtggcgggtgccttgtaatcccagctattcaggaggttgaggcaggagaattgcttgaacccgggatgcgaaagttgcagtgagctgagatcatgccattgcactctagcctgggcaacaagagcaaaactccatctca

SEQ ID NO: 727 - DNA, 1876 bp, Homo sapiens
caagagaaaattttataattatgataggactcctagctcttataagaagtggcctttataatgccacctttagtacttttcagcattctacaggtggacaattcaagaactatatttgtaaaataatgttttaaagagagccaacggtaaaggcaggaaatcactcaaaacattttgtatgttccagagactactcaaatattaatcctgttttcaggagtaacttcgtaggcgtggaaaagatttttgtttatttagaccaattcattatttattaacttcattcaataaatagttacattgtacctactacatgccaggcactatgttagtgagtttgttcactcagtcagccagctctgtaacatggaaagaaatgggaacaatttcacctatctcatagccacctgaaatagctcagcatagatagttttctgttcatttgcttctcaggctgttccctcactcactcattcactcattcatttgcttattcatcaagtacccattgagggcattctgggtgctgaaccctgtgctgggtaggcactgtgcgggtgtgagttgtgttctgaagggtgaaggctgaggatcttgagagcccagaggagggatccagcccgacccgagggaccaggaagagtggtctggaaccagcaccctttggacctaggctagaggccgagcaggaaccattgaggagagaggcaggaggtcagtggcccaggcgggaaccctcacacccaagccccaacatttttattttgttttgggaaatgtataggattaaagtaataactggaaaggaaataaatggaaacacggaatggaaacatttcctattttccctattgttatctgaagacaaacttaatttttatgttgctactttctctcttaaatatcctcttactaaatagtctgtcgtattaattagactgggtagtcctaactcaagaaagcatttggcaattaaaagatggaggactcagggtctgaccgttttccttggccttcatttggctttctctctcttttctcccctccttcttcccaggcctggctggctggtgcctggacaccatttggggctctgagagggttgtggctgccagcccccagtcgccaatgcctggtcaggcactcgtatcccctgtcctgttcaccatttctcctttctcattgttctcataatttgtcctgcttaaaactcctaggttctaagggacacccctgcattgcttgcctttcctttgctagacaccagagagaggctaaaaagtgaaatgtggcctggtgcagtggctcatgcctgtaatcccaacactttgggaggccaaggcaggcagatcacttgaggtcaggagttcaaggccagcttggacaacacgacggaatcctgtctctactaaaaatacagaaattagccaggcatgatgacccatgcctgtagtcccaactacttgggaggtaggaggatggcttgagcccgggaggtcaaggctgcagtgagctgagattgtaccactgtactccagtctgggtgacaaagcaagaccctgtctcaaaaaaaaaaaaaaaaaaaaaaagtgggccaggcacaggggctcatgcctgtaatcccagccctttgggaggctgaggagggtggatcacctgaggtcaggagttcgagaccagcctgacctacatagtgaaatcctgtctctactgaaaatacacagttagctgggtgtgggggcgggtgccttgtaatcccagctattcaggaggttgaggcaggaaaattgcttgaacccgggatgcgaaagttgcagggagctgagatcatgccattgcactctagcctgggcaacaagagcaaaactccatctca

SEQ ID NO: 728 - DNA, 2595 bp, Homo sapiens
caattatgtttgaaaataggatttgcactgctttattttaggtggctgggagttttgattgcatattttgttatagttcatagttggaaatatttgcgtaaatggttttcaacaagcctgaaagtaatttcaagaatgtttcagttatagaggtaaaatttgcacacaaaacatcttaggcactttttaacattctcaatcatgggaattttaacttttgggatttgttgaaatcttttttattatccttcacaatttcaatgcttcttttagtcagaaatgattcagggttatttgaggggaaaaaaccccatagtgccttgattttaattcaggtgataactcaccatcttgaagtcattgtccggtttccgtagcagttttgaaaccttagtacctttttaacagcatgtgggtgtcagtgtcattattagtctcctaataagttcctctgaagactgctatcagtctcttggactggaggtacaaataatttagaaataaaagatgataacctaacactatcatagttattaatgtgatcctaaaattgtttcctaaatcagcatttttctttagtcatttaagaatttaccagaaatatttgctcaatatgatcttgatattcctacaaagaaaaaagaaggggtagggatttggctatgccttcactacaacattagaatattgtaactcacatgccttctaaacgtgaactaagatttcctttggcaatatcatattctaaaagtaataaattccaatacaagttacatacatttaaaaaacattttacagattttatggtactaatgaaatttacagtgatagaacaaaagaggattagtagaaaatacattattagaatataaaaaatgttattactgaggaaagggaggagaggacaagtgtaataaatcaaaattgacctcaaaagaaaatgtgtaacagagttgaggttgttaaaacagaaaaggttctgaataatgaagattaacctaatgcagaattgctaggtaaagaggtcaggggaatgctaagccagttcttaagacttctctgtcctctgctttgctgttatccttaaggcatatactttgtctttctgcagaaaattctacctggctacaattactttgaacattaatgttgaaaaagaaaacaaccaaagaaaattggtacttacccttctacaaaagaagtgtgactagatatcaatcagtaattaacatatcaaggagctcttctagctaaatgaccatccagtagagatttcccacattcccatgaatatcaagaatagttgtcagaatatgtatgtacctgagcatatgtacacagacaagggggatgttgtggaatatggcaatagcattgttcttctcccctttcaaattgcctttcttgaccttatgccattccatatatatctgagttgtgcctcatttatttattggcaatacctagtgatacggatttagctaacaaaagatatgaagaactattatattgaggcctgtcctctacataccacacttaaaagatggtgaactgtgagtactacttaggttgacagcaacaaagcataagacaagccccaggtaaacgtctaaactgtttactcacattgtcctactccagccccttcaattatttcccatctccacaaatagtcgggggaaaaaattaaaattttcctttatgattcttactgttcttcgcagctcatcttttcctgcttagaattaaccattgctaatttaaaggagcagctagctgcttttctgtcagtctgaagcgtagtagtggaagaggtagtaagcaccagctgcctctttgctgctttgttttcctcctgattctcttaaatttgggttgcaaagctatcccgccccccaccctgccccatgaaacttgagcattcaaatgaagattcagcagtgtctgttcttcatttctatagccaaagctgttagttaaaatcccaaatctatagcatttaaagataccaaatagaaacaccttccagctttaaaaaaaaaaaaaaaaaagtcttccctctgctttattctcactttcttaaaaacacttattctgggtggtactttttaggtaagaaactactgagtttcaggaaaaatgctagctactctgcagttaccgtgctttggacttgcagttatcatagttttgggagagtcagtattgtttaacaaatgcaagtgagaactagaagggttaataaagttgctccttagagtggtgtcaaaccagaaccgagacacttaaaaagtacttcattttttgaatggaaaatattggagaaaagtatgggagatgcaggtagcatgtgagtaaatactacggtctagccttcgagcatcccaaattccgggggtaacttgacagtgctgtgctctcctttgtcatttatatctggcttaggaatggaatagtaataacaagatgccagtgatttggaatagtttgttatagaacattcagtgcaaaatagtgaaaatgtttggtcttcagaagtgctgtagttgttggtcattgccttaaagcagtctgcttgacgctaggagcactgaa

SEQ ID NO: 729 - DNA, 3998 bp, Homo sapiens
gaagggagaagaacccttgttcaggaagccttagaaagggatccttaaaatagtactctacgcagacaagtgaaaattcttttaaactggatattactcaacatgttttcagatgtttccactacattgaggcaaactttttaaaagtggaatgcaaatagcattttactttagtatttctgcttttttctttctgtttctttggtaattgaaagtttgttgatgaatatttgtgtaaaacgcattcaagtctataacctttccaattacctgtggcccttagtcccacaggagtccctgttggaagggggtaaacactggatattaatgttgctgagtgagtctttctagccaggacaagctgattggaatttttgaatggtagagaagaaacagcacaaaggcacttgccattttaagtgtttggagaaagagaaccttttaagtttggattgggtgagctttcttctaaaaggagcttctgaagtaattgcaaaggaatagaatcgactatttttatagtatatttaatatatttgtatataactataataggaaccctctacatgcctcccacttttctaatttacttccccttttgccatagcactagtatagcctcatccgcatgggtaatgtgcctattgtcagcctaccaaaagatagtgctgctgctttatgagacaggtgagaagacccaactctcatgcctggggatcctttacggaaggaatagcacacacttttaaaacaacataccacagtctaaaagcatcattttgaaatgtaacaagcactttattgcaattactcattttgataaagtttattcttaggcgttaaccatttctaaaggatccccaaatcatcacttacttaggtgaaattatataaaatgacacatttctgagaaatgtttaggtccagtgaaccgtagttggtttatgggagtgatttcaagatagccaaatgaactttgatttttgttttgaatgtggtggagtcaagagattgtagatgcctagtttgatttaaacactattgtaaacctatcttgcctattgtgtggacaccaaaagagaccaatgagcctgtttatttttcagaggtctaggaaaattgcatccgtgtgagtagatgtacagaactaatctaaaagtgattgctagtaacattttagaatataataatttcaagaattattctgagtgttttaaatgtgccctgaaatgttggcatgtcatttcagcatttccatttgaattgctcttgtaatatttttgcacaaaaaggactgagaaaaagaatactttggttaaaggaaaaaaatagtataatttggtctttaattttaatgtctcctgtggaaacactggggatgaattttgttggcacagttattcaggatatttaaaacagtgttgaacagttcacaagaaattaagcaaacttggattttaaaaattaaaatactttctttccatgtgactgttttgcatagttttttccccctatgtcataacactacattccttgtttttcttaaataaaatactctgcaggttttgttgtgagtgtttataacagtattttgtaagctgcctgggtttcctcagggaaacattatttagtggaataggatatagtttatggagagacaactaagtgaaattccatcaccaccaccagcaaacactgaggtgctgcattaagtgacaatcaaactagtaagtatttatgaaagaatttagaaaggggttcaaagaagcaattgcttttaaagcagttctctggggttcttgaataaaaatggctaaatgtatttatttatattttaaaatacctgtgtgttctgttttctcatcaaagtgatttcggtgtcatgtatttaatgtgtggtttgttttgttttgcaccatattcttcttagggaactggctctgatttggggtgcagtcaccaactctcatgataatctttacggacagtctgaatctactttacttcaggacggcagtggaggggccaactccagatgcccctgcacttccctcctcaagtcatctaagaaagaattttagaaataactcctttcaaatctgattcatacagttccaacctttttctagtttcacttgctgccttctttgttttatgggcactttttgtgtgattacttccccaacacagtcaaaggccagtatgacagaaccaatggcacatgatgcctctattttgcccatttggggaaatgttagtaaaagaaatagcatcttttaatggctgtcattatcatatccatattaaaatccatttaaagttcttaaatttggcggaataatgtatacaggctgtaaacttctacaaaaaatgtttgctgtctttaatatggtgtcaagttacttggtcctttgaaaacaaaacaaaacttccatacacagcactgcccagtaaagcagtgttggaatattggaaacctagacatttgaggatccttcttgctcacaagcattggaacagaatcctccactttaggactcagagaagctatggagtcccacaggctaggtatagcacacaacttagagaacggtagttaaagcacgtcaaccacaattgaatttaatgatctaaaaaatatttcttaactctgagggttaaactgaagatacgttttcaaataaaagcttttaaatttcttaggaaacaaactgtgacatcgcttttaaaaatgacattcaaatgtttataatgtgtgtttttgagttggcttggactagtgcaagttcactgctggcaatggttatgccagtagttaagttaaaataagttgttaccttcagattgatgtcttgtataaccagacaatcatcttcaagcaaaaaaattggccaggaaatgtctttttaaaaaaaaaaaaaaaaaaaaagatgtgtcagccagaacagttaccattcagaccatactggaatgattttgaaatctttactatggtttaagttggggaaggcctcagtatggcattttcatattcactctatgtaaagattgaagcccaaagatgagttaaattcagtgctgtattgaaccagtcagtgcaaaaaaaaaaaaaaagtttacctttgtaatttttcatggtaacatcagttggtagtgtttaaaacatgcaccaaatcctttataatgttctgtgtggtcctcaatgtgatattcttgacattgctgtccttactgcttggttcttggttttaaattaaaaagtagatgtagctcatcatttttacttccaaaacggtggagctaaaaacggctaattgatcttgagataagaataccctttactaaggcaaagatttaattgaaatccaaaatgatttatagaaacgaaaggcattttccatttgttgtcttctgccgaaattctgaattgcatacacacatgaaggataatgaatggtttcaacggtgctatattaggttctctgattttcatgacctatgtatgtttggaaatacaatattgtataaaatgtggatcgttttgttaccgatttaatattgccattttaatttggtgtaacaattggttacacttgtttttcaaagctatcctttgaggagaaagtcaaaatgtgttgttagcctacctccactcaggcctcttgctgtgtaatcattattccaggttatgatgtgcatagcttttaaaactgcgtgtactattattctgctctttcccatactcttgtcatgtattcagaacctaaacttatagcaaaagagccaagcagtagcagtttttgtaaatgtaaaaataattagatccagactttgtttccttcaattttaaaaataaaaaatacctcagtgctatgtttttcagttatcacctgcatttctcaaaaaataacacctgcttcatgtggcacataacttgtaagaatcacattttggattttaaagaaagactattaaatattttaagatcactatcaatg

SEQ ID NO: 730 - DNA, 777 bp, Homo sapiens
tttttagacttctaggttgctccatgggaatccctcaactcaactcattctctctgctgcatttcctctacaacagagcaccttccctcagtcacatcaccagcaacatcagtctcagcaacagcagcaactcagccggcacaggactgacagcttgcccgacccttccaaggttcaaccacagtagcacacgtgcttcctctcttgacatcaagggaggaaggggatggcccattaagagttactcagatgacctgaggaaaggagggaaagttccagcagtttcatgagatgcagtattgagtgttctagttcctggaattagttggcagagaaaatgctgcctagtgctacagatgtacattaaataccagccagcaggaggtgatcataggggcatagccagttctgacagtgttttaggtgcctggatattttttgatggaaaaagaatatattgccaaatattaagaagctcagctatgaaatgacctccagggaatcagaaaggcactaatgatgttagtaacttttagtggttctgtgcctcttatcaagtgttacagaggacataccactgccatgtcaggggtttgcttacagtgatgccatgaagacagtccagtagacttggtagcgaccccctcccccaacccctctcccttttcagataatgatggaacagtaattactttcagaatgttgtgtgggttcaaattctctatgtacagatgatgtaaaaatatgtatatgtctagataaaaggagagaaagcaa

SEQ ID NO: 731 - DNA, 2632 bp, Homo sapiens
gaattgtactgtataaactcgaattattcttcagctattttcttctcatttgtattatgttgtactatatttgggctttggtacttaaggtctgatctcagcaatctgaaacagcctttgcaccgcaagagtcttccccaaacattcctttttttttttttttttttttttaaatattgctcccattatgcccaagaatcaaagattcttttgtttgggtggaggactctctgtccacttagctccctcccaactcagctacagattaggtttgtttcaataacataaggactgttctccaaaagctctggcaactgtggacaaaaagggcttcttcgagctattacacaacatgtgactttgctaaatcaaacctttatttataagatatggaagaatcagttatttgtgtgataagacatgcgaattctaggatagtaggacctaggcagatgtccacatgaacttgagggactttaaaaatcttaggattttaactataacccactttactccaacaaaatagaccaaatagctaatacttacagaatacttaccctgtaccaggcactaagtactttatatgtgcgaaattaatcctctcagctctaactttacaaacgaggagacggagacacaaagcagataaggaacttgcccaggatcacaggtgaagtggcagaggctcgccctagctgccaacagacaccgcccccatgccaggctgctgcccatcgtgagcagcagtcccatgctaccaggctccgggtagtcaagaggccagcagtgttacaggtaggctgcatcatacagtcggcaggcttttgtgagctagcctgagaatctttcacaacactaaaatttgactgcgtcttcccacaggaagaaacactggacttccaatactgataataacagcagtagctaacattctaagagcattacctacgttaattctttgaatcctcagaataccatgaggtaggtgttattattacccctattttacagatgaagaaactgaggcacagagagtctttgtaagtaaccaacagtttagtaagtgggagatttgagattccaacccaggcagcctggcttcagagtcttggctaccggagtttttaaccctcacattatgctgccctcagaatgcttatttaacctttctccacatgtatggaggctaaccggacaaccacgttagcaattatgaacacaacagtccgtagacaagatgcgtaaccccactcaccgttgggaagtcctccagcacctggcgatccttctccttgctctccatgaaccgccagtctggttggtaaaggaaagagtgaaagttgtgtaacagcgggaccttcttttccacactgatggtcatgtcatcttccagtgtgtccagagctcggagaaccagataaaatatgcacactgcgttgctgtaaaaaagggaaaactattaatatattggaacaaacagccaaagattttttattttaaaataacttgtgcctggccactttctaaacccatctcacccttaactctaaagaactataaggatatccaacgcttttcatacttaacgaaagttacattagttttccttccttacatgagagtaatgaacttctgtagtttattaaaaagcctactagttgaatgtcaccactactcccagaagtgagttgcatttaaccaatgtagaactatggagaccagaagaccaaacgtttagaccgaactaatatgtagcaaatagaaaagaaagtcaaaaaacacagtaacttctcagtataaatacgatcatacataaaggcaactggtctaagttcatgggtgtaatgtgcacagaggcagcttcaaaagaatcaacccaatatgctagaaatagaaatgcaaagttggataagggaagccgagaaatacacgacctgctcacaggcaggttcagctgccaagactaaaaaaagttaataaacatcaccccctccgccctcttctctgaaaggctgggcccgcagggactctactagatggcaaagagcctggaagggctttctaaagtaaacacgtagggccgggctatgttctggataagccacagcaacgaggctgcaacgctgagcgctatatcaaaaggtagcttccaacacactcaaaggtcccggacaagctttcctccaagccagaggcgctgcctccatcactcaccgcatttccccatccagcgcctggataacagctgcgaaactgcgactggtctgattgagatacttgtagcaagttttcaggctgctgctgagcgagtcctgcgggcagacaacacacacggcggtgggagacgtcgaggagcaggagtgggagtgggagtgggagtgggagtgggactggggcaggcggctccacagcctgccgccctctccccgaggccagtccttgcagggccaggcggcaggaggcaagcagcagccccgcggggcggtgcctgcgcccgggcccctgggcgccgcggcgggactcagcaccaaggtgcgcttgaagagggccatggccttggtgccgcaggcggctgcggccatgggaatcgcggaccccgcggagtttttcctccatagactcaagcagatct

SEQ ID NO: 732 - DNA, 8852 bp, Homo sapiens
gaattgtactgtataaactcgaattattcttcagctattttcttctcatttgtattatgttgtactatatttgggctttggtacttaaggtctgatctcagcaatctgaaacagcctttgcaccgcaagagtcttccccaaacattcctttttttttttttttttttttttttttaaatattgctcccattatgcccaagaatcaaagattcttttgtttgggtggaggactctctgtccacttagctccctcccaactcagctacagattaggtttgtttcaataacataaggactgttctccaaaagctctggcaactgtggacaaaaagggcttcttcgagctattacacaacatgtgactttgctaaatcaaacctttatttataagatatggaagaatcagttatttgtgtgataagacatgcgaattctaggatagtaggacctaggcagatgtccacgtgaacttgagggactttaaaaatcttaggattttaactataacccactttactccaacaaaatagaccaaatagctaatacttacagaatacttaccctgtaccaggcactaagtactttatatgtgcgaaattaatcctctcagctctaactttacaaacgaggagacggagacacaaagcagataaggaacttgcccaggatcacaggtgaagtggcagaggctcgccctagctgccaacagacaccgcccccatgccaggctgctgcccatcgtgagcagcagtcccatgctaccaggctccgggtagtcaagaggccagcagtgttacaggtaggctgcatcatacagtcggcaggcttttgtgagctagcctgagaatctttcacaacactaaaatttgactgcgtcttcccacaggaagaaacactggacttccaatactgataataacagcagtagctaacattctaagagcattacctacgttaattctttgaatcctcagaataccatgaggtaggtgttattattacccctattttacagatgaagaaactgaggcacagagagtctttgtaagtaaccaacagtttagtaagtgggagatttgagattccaacccaggcagcctggcttcagagtcttggctaccagagtttttaaccctcacattatgctgccctcagaatgcttatttaacctttctccacatgtatggaggctaccggacaaccacgttagcaattatgaacacaacagtccgtagacaagatgcgtaaccccactcaccgttgggaagtcctccagcacctggcgatccttctccttgctctccatgaaccgccagtctggttggtaaaggaaagagtgaaagttgtgtaacagcgggaccttcttttccacactgatggtcatgtcatcttccagtgtgtccagagctcggagaaccagataaaatatgcacactgcattgctgtaaaaaagggaaaactattaatatattggaacaaacagccaaagattttttattttaaaataacttgtgcctggccactttctaaacccatctcacccttaactctaaagaactataaggatatccaacgcttttcatacttaacgaaagttacattagttttccttccttacatgagagtaatgaacttctgtagtttattaaaaagcctactagttgaatgtcaccactactcccagaagtgagttgcatttaaccaatgtagaactatggagaccagaagaccaaacgtttagaccgaactaatatgtagcaaatagaaaagaaagtcaaaaaacacagtaacttctcagtataaatacgatcatacataaaggcaactggtctaagttcatgggtgtaatctgcacagaggcagcttcaaaagaatcaacccaatatgctagaaatagaaatgcaaagttggataagggaagccgagaaatacacgacctgctcacaggcaggttcagctgccaagactaaaaaaagttaataaacatcaccccctccccccccttctctgaaaggctgggcccgcagggactctactagatggcaaagagcctggaagggctttctaaagtaaacacgtagggccgggctatgttctggataagccacagcaacgaggctgcaacgctgagcgctatatcaaaaggtagcttccaacacactcaaaagtcccggacaagctttcctccaagccagaggcgctgcctccatcactcaccgcatttccccatccagcgcctggataacagctgcgaaactgcgactggtctgattgagatacttgtagcaagttttcaggctgctgctgagcgagtcctgcgggcagacaacacacacggcggtgggagacgtcgaggagcaggagtgggagtgggagtgggagtgggagtgggactggggcaggcggctccacagcctgccgccctctccccgaggccagtccttgcagggccaggcggcaggaggcaagcagcagccccgcggggcggtgcctgcgcccgggcccctgggcgccgcggcgggactcagcaccaaggtgcgcttgaagagggccatggccttggtgccgcaggcggctgcggccatgggaatcgcggaccccgcggagtttttcctccatagactcaagcagatctgggaagcgcccgacgagaggcgggacgggctcgccctctactcgaatacgcgctgggccgacccacaacgggcccgccccgcagccccgcagccccgcccccggcctcccgctccgcaccggcgcctcctcccgctgttgcccttctcaccagaacccactggccgctaagagaacccagcgcacttccgagcggctcgctcgtcctcccagtgacagagtctccctagaccaaactctactcgggctccgctgaaatcctcttcccaataaggcctggactttgtactcaacgcatctgtctttgcatcgcccaattttaccaagaatcctgctaaattgatttgaccagaatcccccaacttcagtatctgatcaccctagacagccgattaggttccacatccccctccatccctcaggtgatgtctgataactctggcctgccttcagcaagaacgcacacccctgtgtttcctcgtaataattttccatccactgacatccggctcccccgccatcaattcctacttttctttgtattcgcagtggagcagttctgtaccgaggtctctctcctcttactgcagtagtttttctgaataaaatctgttttgccgttttactaccactgtccaaccctggtttttctatgacacctattaagcctctactattctctagaaagccagccattcctttcaagatgtcttctcatctttcccttcgaaattaatgcaatgcagcgcactgacctttattcttccctaaagcaaacaaggactgtgtttttccaaaagggagaaaaagcctgattttaaatgcaagcatatcagaaagagttgctgtttgtactatgtattttttcatggactatttttagagcagttttaggcccacagggagtggaaaatacggcgggttcctatttgtcccttccctcccctcaccccacagtctcacaacagttctttttgggagagactggaatcatttatccaacagggccgggtgcagtggcgcacgcctataatccctgcacttcggaaggccaaggtgggagaatcacttgagcccaggagtttgagggcagcctgggcaacatagtgagacctcgtgttcataaaaaattttttaaaaagccagctgtggtggcgcccacctatagtctagctactgaagactagctactcaggaggctgaggtgggaggatcgcttgagcccaagagatacacgttacagtgaactatgatattgtacactgcagagtgggaccccatctcaaaaaaataaaaaacaaatatccaataggagtggttaaaaaaatatggcatatccacttctaggaaattccagtcacttcagaatggtaacagtgaaccctgggctctggtgggaggtttaagtgaactatgttgtatatatttcctatcatgaatacgtattttgccaaaagggtcaatcttttaaatcacataatcctgaaaaagtcattttattgccataaaaaatattagtaaaaacaagtatttactgggcaccataatattagtaaacttcagcgtctggcacataaatatattcagaagtggtgtcatgaataaatgaagacattcatcgaggattttaaaacaattcaccaactccttccttctcaaaatatcgagaggcaggatttcagagtgaaagaaacagaatacccgctctggactgagctccagagcagctcttcacatagcctgaccattaccaggctacagcaggaagtgtttttaactgcactgccaaatgtcatgttcagtccaactaacagtttcggggtgatgttaagccaggagtttcaatcaatgccaagacacggtccccctagatttaaaccccaacactcttcaagaacactacccctcctttccatacagccctccattctgaaagagagcaagccaagccacttactcctccagctcgtacccctgctgctctttttcctgtcacctatttgtttcagtcccttaccttgtaaacaggtttcttcaaatcaccaagaacaaaacaggaagacacaactagtaagcatactatggaaaacaacactcactaaaaatttctactgcttgattcccatgagccaggggagaaagcaagctcaggctactggtgcctgtccctcttgggtttatctattgcagtctgagattcagcacactcccaaaagctcgcaagcgggagaaaaacagggatggagggaatttagaggaagggtgtgggggtggtcaggaagacgacaagaccagactcccaggaaggggctccagcctcaggctgaaagttccacaagtgaacagctaccagctaccagccctccacggagccttcctcactttaaaatagaatagatttctccaggaggggaaaaaaaccacaaacttgagaactgaatttacataaatttacataatcagattgataaccaccatttatcaagcacttaactccatgccaagcacaatgcggacatcacctgtgatccttactcaatcaaccctttaaggtctcaaaggcccatagtccactgaaacatctgtggcaagacctggggcagaatttagcatttttagtgttttagaaaataggcaataaaatgcatatacaaccctagtcagtgtgaagtagcacctcataattatttctttagcaaaacatttgaatatactaagtgggatgaatgaagcctcaacttcaagtcaggttttgctgccaagtgattctgagccaaactcagaaaaaattcttttcagaccatcttagagttgggaagttgtggttaaaaaatcgttaccatacatacatccctattttacagatgaagtaactgtggttcagaggttaagttaccaaggttgttcacctaacttaatagcgtcagaaatcggacttaataacagacttaagatattagtctaaataacaggatttagattggacaggagccagatctgcctgattactaacagcctgctctttccattactctcggcttttgggtgatgccacacaacttgcaggcggcatatgcccgtagatttactgatatgcacctaaaaattcagtgtaaatcaagtttactaaaccctgaaattctatagccaaatgcttctgtgatagaaataatcagccctcaatatctgctaagcgtaaattttttccctagtttgcagagagaaactggttgggtgcagtggctcacacctgtaatcccagcactttgaaggctgaggtgggaaaatcgcttgagctcaggagttcaagaccagcctgggcaatgcagcgagacattgtgtctacaaaaaaaatttaaaaattagccatgcattggtgacacgtgcctggagtcccagctactcaggatcaggaagccgaggtgggaggatggcttcagccaaggaagtcaaaactggagtgagtcatgttcaggccacagcattctagcctggacgatggagtgagaccccccccctcaaaaaaaaaaaaaaaaaggccgggtgcagtggctcacgcctgtaatcctagcactttgggagaccaaggcgagcagatcacttgaggtcaagagttcaaaaccagcctcgccaacatggtgaaaccccgtctctactaaaaataccaaaaaatcagccgggcgtagtggcaggtgcctgtaatcccagctactcagcaggctgaggcaggagaattgcttgaacccaggaggcggaggctgcatctagctgaggtcccgccaccactgcactccagcctgggtaacagagcaagactccatctctataaaaaaaaaaaaaaaaaaaagagaaactaagataatgttaagtgaagggaaatgtatttttccaatttatttcccctaattaaaggttcaggtatttttttaacggctcatggggatgtaaaaactgcccagaaagactacaactaacataacaaatactgcaccatattatcagagctagaatagctcaagtctcgcttttaaaaaaattcaaaatgtacaaaaacagtatactgtgaagtctttctctacccacttaccatgaccacccactttccctcccaacaggaaaccaatgctaccattttctctaacagtctttctgtagaaaggaaagagacatagaggaatgaagtctggacccaaatgaggtctgactgcactcagatcccttgccctgctagtatcttcctctgcagtgcttttctccacgtgaaaaactgtacattcgcttttttaaattgtctctcttccactaaaaagtaagttttataaaatcaaggtcttcacctagcttgttcactgttgtacctccagcacctagaacactatctgatatacaactggtcgtcaaatatttgttaaataaatgaatgctatatctaaatataaaaagtgacatctgccatatcaaataatagaagttattctgtagcaaaataattcaaataatgtagcaccggcaaagaaaagatgaagaaaactgaatgttctacaaatagactgaaggatgtacctgtattaaagatagcacgtgaaaaataacaccaaatgagggtgtagtctactggggacaaaaaccagaaatttattttctagtgtgtttactgaagcacatggacactgaaagaaagactccgatgttcaggcacctatcaagcctcggcctgagtcacatttgctactgtcctgttggcccaaaaaagttacagaaatcagccaggctggtccagaccagaagaacttggctgaatttgtctattcattcaataatcgcgtacgaataattttcttgttggaataaaaacacctcctatgcattcattaaacaaatagtacaggcatgaggcagataaaaatctaagtaaaaccaagttctgaccttccaccaaccacctagctaatccatagacgttagataactcattggaacttggaagcgtagataggcgattttaaaactcaggaagcaccgaggatgaagcgatggaagacagcaaggcggggagagctccggaagaggtggtgaaactggaggagtcagacttcattccagaaacggccttcatgtgatgttatctgcatagttcattccgcttaccaaaaaactcactcgtcctctcccgcgtaacccacccacattgcctcagatgtgtaaccctcgggttaaaataccggtaagcgccgatgctcacggaggggacgaaacggggagcgcaaccaccgggaaccacgcaaaagtcgctcatgcccagggcggcttgcgggggcagggacaggtcagccaggacggccacgtccacccgggccctacagggggaaggctcgaggaaagggggacgggaacacccaggcgtcggccctgctcgccgcgccccttgccccagatccgggcccggccgctcaggccctgaggccggcccagcgagctccttccccgccccgggcaagcagggaggctcggcccacctggtccatcttgggcatcaccttccgcttgcccccgatccggaagcgcaccaggttgtagaactcttcggggtggccaaggcatttcacgaactccatcctggcgcaggcggcggactcccgggcgcgactctcacctctgcggtccccaggcgctcaccggccggctggacctgtggagtaggtgcttcgaggggctggccggacagggggcaggcctagtacggcgacgccccgcccgccgctccgcccacttcaaccggcctcggccgccagcggggctagctgcggcctcgtggggtgggctgacgggcgctgattggccagggccgctcacactaggaagaccccggccaatcagtcgcggaaggagactggcgtgataacaccctagaagctcattggaggccgagaaagaggccgacgagcgggattggtgccctgatggagccgggcctttgttttcttccgcttaccccggctgggagcgcgaacgctgtggggactggaggtgaggcggtggggcttaggatgcgcatgagcccaacggtggtccgcagtcgggagagcagtgcggggctgcttcctccccacttggtcaataagtcgcccacgtgtccggcctcggtggctcctgccagccgggtgagctctgcagccgctctctgtagagcctaaaaccgtgaaaaggccgggccagcg

SEQ ID NO: 733 - DNA, 8877 bp, Homo sapiens
gaattgtactgtataaactcgaattattcttcagctattttcttctcatttgtattatgttgtactatatttgggctttggtacttaaggtctgatctcagcaatctgaaacagcctttgcaccgcaagagtcttccccaaacattcctttttttttttttttttttttttttaaatattgctcccattatgcccaaaaatcaaagattcttttgtttgggtggaggactctctgtccacttagctccctcccaactcagctacagattaggtttgtttcaataacataaggactgttctccaaaagctctggcaactgtggacaaaaagggcttcttcgagctattacacaacatgtgactttgctaaatcaaacctttatttataagatatggaaaaatcagttatttgtgtgataagacatgcgaattctaggatagtaggacctaggcagatgtccacatgaacttgagggactttaaaaatcttaggattttaactataacccactttactccaacaaaatagaccaaatagctaatacttacagaatacttaccctgtaccaggcactaagtactttatatgtgcgaaattaatcctctcagctctaactttacaaacgaggagacggagacacaaagcagataaggaacttgcccaggatcacaggtgaagtggcagaggctcgccctagctgccaacagacaccgcccccatgccaggctgctgcccatcgtgagcagcagtcccatgctaccaggctccgggtagtcaagaggccagcagtgttacaggtaggctgcatcatacagtcggcaggcttttgtgagctagcctgagaatctttcacaacactaaaatttgactgcgtcttcccacaggaagaaacactggacttccaatactgataataacagcagtagctaacattctaagagcattacctacgttaattctttgaatcctcagaataccatgaggtaggtgttattattacccctattttacagatgaagaaactgaggcacagagagtctttgtaagtaaccaacagtttagtaagtgggagatttgagattccaacccaggcagcctggcttcagagtcttggctaccggagtttttaaccctcacattatgctgccctcagaatgcttatttaacctttctccacatgtatggaggctaccggacaaccacgttagcaattatgaacacaacagtccgtagacaagatgcgtaaccccactcaccgttgggaagtcctccagcacctggcgaaccttctccttgctctccatgaaccgccagtctggttggtaaaggaaagagtgaaagttgtgtaacagcgggacctttttttccacactgatggtcatgtcatcttccagtgtgtccagagctcggagaaccagataaaatatgcccactgcgttgctgtaaaaaagggaaaactattaatatattggaacaaacagccaaagattttttattttaaaataacttgtgcctggccactttctaaacccatctcacccttaactctaaagaactataaggatatccaacgcttttcatacttaacgaaagttacattagttttccttccttacatgagagtaatgaacttctgtagtttattaaaaagcctactagttgaatgtcaccactactcccagaagtgagttgcatttaaccaatgtagaactatggagaccagaagaccaaacgtttagaccgaactaatatgtagcaaatagaaaagaaagtcaaaaaacacagtaacttctcagtataaatacgatcatacataaaggcaactggtctaagttcatgggtgtaatgtgcacagaggcagcttcaaaagaatcaacccaatatgctagaaatagaaatgcaaagttggataagggaagccgagaaatacacgacctgctcacaggcaggttcagctgccaagactaaaaaaagttaataaacatcaccccctcccccctcttctctgaaaggctgggcccgcagggactctactagatggcaaagagcctggaagggctttctaaagtaaacacgtagggccgggctatgttctggataagccacagcaacgaggctgcaacgctgagcgctatatcaaaaggtagcttccaacacactcaaaggtcccggacaagctttcctccaagccagaggcgctgcctccatcactcaccgcatttccccatccagcgcctggataacagctgcgaaactgcgactggtctgattgagatacttgtagcaagttttcaggctgctgctgagcgagtcctgcgggcagacaacacacacggcggtgggagacgtcgaggagcaggagtgggagtgggagtgggagtgggagtgggagtgggactggggcaggcggctccacagcctgccgccctctccccgaggccagtccttgcagggccaggcggcaggaggcaagcagcagccccgcggggcggtgcctgcgcccgggcccctgggcgccgcggcgggactcagcaccaaggtgcgcttgaagagggccatggccttggtgccgcaggcggctgcggccatgggaatcgcggaccccgcggagtttttcctccatagactcaagcagatctgggaagcgcccgacgaggggcgggacgggctcgccctctactcgaatacgcgctgggccgacccacaacgggcccgccccgcagccccgcagccccgcccccggcctcccgctccgcaccggcgcctcctcccgctgttgcccttctcaccagaacccactggccgctaagggaacccagcgcacttccgagcggctcgctcgtcctcccagtgacagagtctccctagaccaaactctactcgggctccgctgaaatcctcttcccaataaggcctggactttgtactcaacgcatctgtctttgcatcgcccagttttaccaagaatcctgctaaattgatttgaccagaatcccccaacttcagtatctgatcaccctagacagccgattaggttccacatccccctccatccctcaggtgatgtctgataactctggcctgccttcagcaagaatgcacacccctgtgtttcctcgtaataattttccatccactgacatccggctcccccgccatcaattcctacttttctttgtattcgcagtggagcagttctgtaccgaggtctctctcctcttactgcagtagtttttctgaataaaatctgttttgccgttttactaccactgtccaaccctggtttttctatgacacctattaagcctctactattctctagaaagccagccattcctttcaagatgtcttctcatctttcccttcgaaattaatgcaatgcagcgcactgacctttactcttccctaaagcaaacaaggactgtgtttttccaaaagggagaaaaagcctgattttaaatgcaagcatatcagaaagagttgctgtttgtactatgtattttttcatggactattttttagagcagttttaggcccacagggagtggaaaatacggcgggttcctatttgtcccttccctcccctcaccccacagtcttacaacagttctttttgggagagactggaatcatttatccaacagggccgggtgcagtggcgcacgcctataatccctgcacttcggaaggccaaggtgggagaatcacttgagcccaggaatttgagggcagcctgggcaacatagtgagacctcgtgttcataaaaaagtttttaaaaaattttttaaaaagccaggtgtggtggcgcccacctatagtctagctactgaagactagctactcaggaggctgaggtgggaggatcgcttgagcccaggagatacacgttacagtgaactatgatattgtacactgcagagtgggaccccatctcaaaaaaataaaaaacaaatatccaataggagtggttaaaaaaatatggcatatccacttctaggaaattccatagtcacttcagaatggtaacagtgaaccctgggctctggtgggaggtttaagtgaactatgttgtttttatttgtatatatttcctatcatgaatacgtattttgccaaaagggtcaatcttttaaatcacataatcctgaaaaagtcattttattgccataaaaaatattagtaaaaacaagtatttactgggcaccataatattagtaaacttcagcgtctggcacataaatatattcagaagtggtgtcatgaataaatgaagacattcatcgaggattttaaaacaattcaccaactccttccttctcaaaatatcgagaggcaggatttcagagtgaaagaaacagaatacccgctctggactgagctccagagcagctcttcacatagcctgaccattaccaggctacagcaggaagtgtttttaactgcactgccaaatgtcatgttcagtccaactaacagtttcggggtgatgttaagccaggagtttcaatcaatgccaagacacggtccccctagatttaaaccccaacactcttcaagaacactacccctcctttccatacagccctccattctgaaagagagcaagccaagccacttactcctccagctcgtacccctgctgctctttttcctgtcacctatttgtttcagtcccttaccttgtaaacaggtttcttcaaatcaccaagaacaaaacaggaagacacaactagtaagcatactatggaaaacaacactcactaaaaatttctactgcttgattcccatgagccaggggagaaagcaagctcaggctactggtgcctgtccctcttgggtttatctattgcagtctgagattcagcacactcccaaaagctcgcaagcgggagaaaaacagggatggagggaatttagaggaagggtgtgggggtggtcaggaagacgacaagaccagactcccaggaaggggctccagcctcaggctgaaagttccacaagtgaacagctaccagctaccagccctccacggagccttcctcactttaaaatagaatagatttctccaggaggggaaaaaaaccacaaacttgagaactgaatttacataaatttacataatcagattgataaccaccatttatcaagcacttaactccatgccaagcacaatgcggacatcacctgtgatccttactcaatcaaccctttaaggtctcacaggcccatagtccactgaaacatctgtggcaagacctggggcagaatttagcatttttagtgttttagaaaataggcaataaaatgcatatacaaccctagtcagtgtgaagtagcacctcataattatttctttagcaaaacatttgaatatactaagtgggatgaatgaagcctcaacttcaagtcaggttttgctgccaagtgattctgagccaaacactcaaaaaattcttttcagaccatcttagagttgggaagttgtggttaaaaaatcgttaccatacatacatccctattttacagatgaagtaactgtggttcagaggttaagttaccaaggttgttcacctaacttaatagcgtcagaaatcggacttaataacagacttaagatattagtctaaataacaggatttagattggacaggagccagatctgcctgattactaacagcctgctctttccattactctcggcttttgggtgatgccacacaacttgcaggcggcatatgcccgtagatttactgatatgcacctaaaaattcagtgtaaatcaagtttactaaaccctgaaattctatagccaaatgcttctgtgatagaaataatcagccctcagtatctgctaagcgtaaattttttccctagtttgcagagagaaactggttgggtgcagtggctcacacctgtaatcccagcactttgaaggctgaggtgggaaaatcgcttgagctcaggagttcaagaccagcctgggcaatgcagcgagacattgtgtctacaaaaaaatttaaaaattagccatgcattggtgacacgtgcctggagtcccagctactcgggatcaggaagccgaggtgggaggatggcttcagccaaggaagtcaaaactggagtgagtcatgttcaggccacagcattctagcctggacgatggagtgagacccccccctcaaaaaaaaaaaaaaaaaggccgggtgcagtggctcacgcctgtaatcctagcactttgggagaccaaggcgagcagatcacttgaggtcaagagttcaaaaccagcctcaccaacatggtgaaaccccgtctctactaaaaataccaaaaaatcagccgggcgtagtggcaggtgcctgtaatcccagctactcagcaggctgaggcaggagaattgcttgaacccaggaggcggaggctgcatctagctgaggtcccgccaccactgcactccagcctgggtaacagagcaagactccatctcaaaaaaaaaaaaaaaaaaaaagagaaactaagataatgttaagtgaagggaaatgtatttttccaatttatttcccctaattaaaggttcaggtatttttttaacggctcatggggatgtaaaaactgcccagaaagactacaactaacataacaaatactgcaccatattatcagagctagaatagctcaagtctcgcttttaaaaaaactcaaaatgtacaaaaacagtatactgtgaagtctttctctacccacttaccatgaccacccactttccctcccaacaggaaaccaatgctaccattttctctaacagtctttctgtagaaaggaaagagacatagaggaatgaagtctggacccaaatgaggtctgactgcactcagatcccttgccctgctagtatcttcctctgcagtgcttttctccacgtgaaaaactgtacattcgctttcttaaattgtctctcttccactaaaaagtaagttttataaaatcaaggtcttcacctagcttgttcactgttgtacctccagcacctagaacactatctgatatacaactggtcgtcaaatatttgttaaataaatgaatgctatatctaaatataaaaagtgacatctgccatatcaaataatagaagttattctgtagcaaaataattcaaataatgtagcaccggcaaagaaaagatgaagaaaactgaatgttctacaaatagactgaaggatgtacctgtattaaagatagcacgtgaaaaataacaccaaatgagggtgtagtctactggggacaaaaaccagaaatttattttctagtgtgtttactgaagcacatggacactgaaagaaagactccgatgttcaggcacctatcaagcctcggcctgagtcacatttgctactgtcctgttggcccaaaaaagttacagaaatcagccaggctggtccagaccagaagaacttggctgaatttgtctattcattcaataatcgcgtacgaataattttcttgttggaataaaaacacctcctatgcattcattaaacaaatagtacaggcatgaggcagataaaaatctaagtaaaaccaagttctgaccttccaccaaccacctagctaatccatagacgttagataactcattggaacttggaagcgtagataggcgattttaaaactcaggaagcaccgaggatgaagcgatggaaggcagcaaggcggggagagctccggaagaggtggtgaaactggaggagtcagacttcattccagaaacggccttcatgtgatgttatctgcatagttcattccgcttaccaaaaaactcactcgtcctctcccgcgtaacccacccacattgcctcagatgtgtaaccctcgggttaaaataccggtaagcgccgatgctcacggaggggacgaaacggggagcgcaaccaccgggaaccacgcaaaagtcgctcatgcccagggcggcttgcgggggcagggacaggtcagccaggacggccgcgtccacccgggccctacagggggaaggctcgaggaaagggggacgggaacacccaggcgtcggccctgctcgccgcgccccttgccccagatccgggcccggccgctcaggccctgaggccggcccagcgagctccttccccgccccgggcaagcagggaggctcggcccacctggtccatcttgggcatcaccttccgcttgcccccgatccggaagcgcaccaggttgtagaactcttcggggtggccaaggcatttcacgaactccatcctggcgcaggcggcggactcccgggcgcgactctcacctctgcggtccccaggcgctcaccggccggctggacctgtggagtaggtgcttcgaggggctggccggacagggggcaggcctagtacggcgacgccccgcccgccgctccgcccacttcaaccggcctcggccgccagcggggctagctgcggcctcgtggggtgggctgacgggcgctgattggccagggccgctcacactaggaagaccccggccaatcagtcgcggaaggagactggcgtgataacactctagaagctcattggaggccgagaaagaggccgacgagcgggattggtgccctgatggagccgggcctttgttttcttccgcttaccccggctgggagcgcgaacgctgtggggactggaggtgaggcggtggggcttaggatgcgcaggagcccaacggtggtccgcagtcgggagagcagtgcggggctgcttcctccccacttggtcaataagtcgcccacgtgtccggcctcggtggctcctgccagccgggtgagctctgcagccgctctctgtagagcctaaaaccgtgaaaaggccgggccagcg

SEQ ID NO: 734 - DNA, 483 bp, Homo sapiens
agcaggaagtgtttttaactgcactgccaaatgtcatgttcagtccaactaacagtttcggggtgatgttaagccaggagtttcaatcaatgccaagacacggtccccctagatttaaaccccaacactcttcaagaacactacccctcctttccatacagccctccattctgaaagagagcaagccaagccacttactcctccagctcgtacccctgctgctctttttcctgtcacctatttgtttcagtcccttaccttgtaaacaggtttcttcaaatcaccaagaacaaaacaggaagacacaactagtaagcatactatggaaaacaacactcactaaaaatttctactgcttgattcccatgagccaggggagaaagcaagctcaggctactggtgcctgtccctcttgggtttatctattgcagtctgagattcagcacactcccaaaagctcgcaagcgggagaaaaacagggat

SEQ ID NO: 735 - DNA, 1637 bp, Homo sapiens
ggctgtattattacttaagctatgtttacaggtagacttctaagccttctagctttccactagtaccaggtgagaaagatacgtgctcatgtactgtataatgatgtttcagtcaacggagactggaaatacaatggtgggcccttaagactgtaacaccctgtttttactataccttttctatgtttaaatacacaaatacttaccactgtgctccaattgcctacagtattcagtacagtaccatcctgtagagatgtgcagccttggagcaatggcctgtaccacagagcctacgtctgtagtagctatgccatcttggtatgtgtaagtacactctatgatgttcacagaatgatgaaatcatctatcaatgcgtttctcagaatgtatcctgtggccattcattaagtgatgcatgactgtactctaatcgaacccctaacatacaatgagatttctagaaagcctgacttgaactggtatcaactaatgatcactaaagtataaaggatcaggttcaatctactgtacatcgaggcggaagtcactgggttagaacactgtattgaggcttattcctaaattctgcaaggcctgggataagaggacaaatggaggcccacatactatatgtagctaaaaatttaaaaatgatcaatcgagctagtaacttaagtaaaatatattgtatcctcctgcactgacaaacttatctttgtaacaacctggttgattcaggtttgaatttagaattcttagtccctcagagttttattccagaatgcagcagggcacagacagctgatccccatatcccaggctcttcccttccactgcttcctgaatcccgctctctccagcactgggaggcacctcacattcatttgagaggatatcccagccctcggtgccaggatccatccacaacactccccaacacagcccttggccatcactcaggcccaagggcacagtcaatggtggcacgttcccacctggaggagatggactgaccttaggaaatagactgtgcggacgcagacgtgggctcagggatttggggcaaggaactccagatgtccagaacgtggtacagaaggagagcccacgagagctgaacaagcacattcccatggccccagtgatccctcacccctttgggagtgagggggcctagaatggggcactctgaagtgaggagtttcacttgccccagtctaagagcagtactgtgtgtgaggccaaggtatcagtcctctttcacactacttgttccatcctgggacctcttagccaaaagctgattgcaggcctagccccagacaactggtttcaaagacatactgagctatatcagcacatacacaaatcactccttaagaagacaaggcactgttaattcccatacagtcccatctcaaactgaatcacagactggagggacctacaactcaagtagcttaaaattatatatgcacgcaaaacacacaacttagtacatcttcatattcgtaaggatacaaaaggtgaacaacagtgaaaacagccgtgcctggcttacgccttctgctcccttttactcttcccggggcaactgtgctttcaagaggatggaatctctaactctactaccc

SEQ ID NO: 736 - DNA, 522 bp, Homo sapiens
gggcgtctttactgtaacacacccgagcacagcccagctcgcctgcccgccaccgccatccagccccagggagccccacacactcctggagcttcagctgccccctctctagtgtttacttgagatccagcttagtcctagaaaaaggagctgaagccttagagagcctgtaacaggaatgtggaaacttctctcatcctagatctctccagccctagaaactactggctacccgtccaggcgtggtggctcacgcctgtaatcgcaacactttgggaggccaaggcgggtggatcacgaggtcaagagatcgagaccatcctggccaacatggtgaaacccgtctctactaaaaatacaaaaaagccgagtgtggtggtgggcgcctgtagtcccaactactccggaggctgaggcaggagaatcacttgaacccgggaagcggagtttgcagtgagccaagatgacaccgctgcactccagccaggccaacagagcaagactacgtctccaaaaaaaaaa

SEQ ID NO: 737 - DNA, 1637 bp, Homo sapiens
ggctgtattattacttaagctatgtttacaggtagacttctaagccttctagctttccactagtaccaggtgagaaagatacgtgctcatgtactgtataatgatgtttcagtcaacggagactggaaatacaatggtgggcccttaagactgtaacaccctgtttttactataccttttctatgtttaaatacacaaatacttaccactgtgctccaattgcctacagtattcagtacagtaccatcctgtagagatgtgcagccttggagcaatggcctgtaccacagagcctacgtctgtagtagctatgccatcttggtatgtgtaagtacactctatgatgttcacagaatgatgaaatcatctatcaatgcgtttctcagaatgtatcctgtggccattcattaagtgatgcatgactgtactctaatcgaacccctaacatacaatgagatttctagaaagcctgacttgaactggtatcaactaatgatcactaaagtataaaggatcaggttcaatctactgtacatcgaggcggaagtcactgggttagaacactgtattgaggcttattcctaaattctgcaaggcctgggataagaggacaaatggaggcccacatactatatgtagctaaaaatttaaaaatgatcaatcgagctagtaacttaagtaaaatatattgtatcctcctgcactgacaaacttatctttgtaacaacctggttgattcaggtttgaatttagaattcttagtccctcagagttttattccagaatgcagcagggcacagacagctgatccccatatcccaggctcttcccttccactgcttcctgaatcccgctctctccagcactgggaggcacctcacattcatttgagaggatatcccagccctcggtgccaggatccatccacaacactccccaacacagcccttggccatcactcaggcccaagggcacagtcaatggtggcacgttcccacctggaggagatggactgaccttaggaaatagactgtgcggacgcagacgtgggctcagggatttggggcaaggaactccagatgtccagaacgtggtacagaaggagagcccacgagagctgaacaagcacattcccatggccccagtgatccctcacccctttgggagtgagggggcctagaatggggcactctgaagtgaggagtttcacttgccccagtctaagagcagtactgtgtgtgaggccaaggtatcagtcctctttcacactacttgttccatcctgggacctcttagccaaaagctgattgcaggcctagccccagacaactggtttcaaagacatactgagctatatcagcacatacacaaatcactgcttaagaagacaaggcactgttaattcccatacagtcccatctcaaactgaatcacagactggagggacctacaactcaagtagcttaaaattatatatgcacgcaaaacacacaacttagtacatcttcatattcgtaaggatacaaaaggtgaacaacagtgaaaacagccgtgcctggcttacgccttctgctcccttttactcttcccggggcaactgtgctttcaagaggatggaatctctaactctactaccc

SEQ ID NO: 738 - DNA, 522 bp, Homo sapiens; identical to SEQ ID NO: 736

SEQ ID NO: 739 - DNA, 1637 bp, Homo sapiens; identical to SEQ ID NO: 735

SEQ ID NO: 740 - DNA, 3089 bp, Homo sapiens
ggggggtagtcggtctataagcctcgcccgttccgctccctggggcttccccgagcgccgtcggtggtcatggctgccccagcctcccggcaggtccgacgcagagcccgggcagcgccgcggccccgctcggccgaggattggtggtgggaccggctggcgccgaggggctcggggtaccacctgctgcagtccgacagcatgctgctggtgctgtctgaaccaggccccgcccggccccgcgcacagcggcgcgattcccgccgcattccccggcagccgccccggggccccagcgccgcggccaagcccaaggccgggctcaggtccgaggcggcggccgcgcccgcacccgcaccggcacccacgcccacgcccgaggaagggcccgacgcgggctggggagaccgcattcccttggaaatcctggtgcagattttcgggttgttggtggcggcggacggccccatgcccttcctgggcaggtaacgctggtgccgggcccgccgccgagcgtagcggcttgggccagacgtggtccgagcggtggcccgggcgggggcggagggcgaaagcatcggagcgcgcaccgctcagtccgagagcgcagccccttaggcgcccagttggagtcccaggagcccggctttgagccggggtgtctactgcgctgcgagaggggggcatcgcctacggaggggccggcaccctcagcacgctgtcctcccagggctgcgcgcgtgtgccgccgctggcaggaggccgcttcccaacccgcgctctggcacaccgtgaccctgtcgtccccgctggtcggccggcctgccaagggcggggtcaaggcggagaagaagctccttgcttccctggagtggcttatgcccaatcggtgaggggttccctcttttccttacccctggctccaggctccttccgtctccctgcaccaaggtgttgggtgggaaggactcgtgtgggaacattagtgcagctctgcctccgctgtcggcccaggttttcacagctccagaggctgaccctcatccactggaagtctcaggtacaccccgtgttgaaggtgagagctccaggctgtcctgcacatcagctgtgacactctgggactgttcagtactctaggaagtgggtcaggcaccttgggggcccaacgctgctccgtggggatgtctgcttgcctgcctggttctcttttcctgctgtttcctccagcagggaggtatcagaggcggggacacccaagtaggcctggcatgggcagaaaggaggtcacagctaaggcggtagagtggggttggcaccagccacttgtctgtttcccttgtggatcttagcctgttgtttcccaaccccagctgcccctctgtctccccgcagctggtaggtgagtgctgtcctcggctcactttcctcaagctctccggctgccacggtgtgactgctgacgctctggtcatgctagccaaagcctgctgccagctccatagcctggacctacagcactccatggtgagccctgtgtcccaaggggccctgaaaaaacccaggccggggtgacgggtgctcttgtattggggccccaggtggagtccacagctgtggtgagcttcttggaggaggcagggtccctaatgcgcaagttgtggctgacctacagctcccagacgacagccatcctgggcgcactgctggtaagttggcattggtgggagcagaggcagatgctgagctggggactgccaggccactgaccctgtgacctaccccctccccccatctctgcagggcagctgctgcccccagctccaggtcctggaggtgagcaccggcatcaaccgtaatagcattccccttcagctgcctgtcgaggctctgcagaaaggctgccctcagctccaggtacctggcgccctgcctctcccacctgtcacaccctcccccatctacagcctggaccttgcccccaggtgctgcggctgttgaacctgatgtggctgcccaagcctccgggacgaggggtggctcccggaccaggcttccctagcctagaggagctctgcctggcgagctcaacctgcaactttgtgagcaacgaggtcctgggccgcctactccacggctctcccaacctgcgcttactggatcttcgtggctgtgcgcgcatcacgccggctggccttcaggatctgccatgtcggggtcagcagtcctgggtggtggccgggcgggtgaggtgtgggggcccttgtcaccttgtagcttatgctcactcctttcactgcagagctggagcagcttcatctgggcctgtatggcacgtcagaccggctgactctagccaaggagggcagcccctttttgacccagaagtggtgccatacactgcgagaactggacttgagtggccaggggttcagtgagaaggacctggagcaggccctggctgccttcttaagcacccctgggggctcacacccagccctgtgctctcttaacctcaggggcacccgggtcacaccaagcactgtcaggtcagcatcccctaccccagtccctggagccagtgtggctgtcactgtgtctgcctggggcctggaagttgtgtcctgcctggcctgagacctccaggggtcagaggggcatgcatactgtccaagcccctgcgtggggtgggcctgaggacaccaggggaactgggcttggccttggtggctatgggtggcagagccaggtgtcgaacaccagcaggcacagctccctagcctggcccagcccttctgaggcaacagctcaacttcctgtggtctgccctccccacagctctgtgatcagcagctgcccgggcctgctttacctcaacctggagtcctgccggtgctttccccggggtttgaagcgggcctaccggggcctggaggaagtccagtggtgtctggagcagctgctcaccagcccctcacccagctaggcagccacagacctgggacacctcagccagcttgcccaccctccacctttgcccaatttcagatatttgagcattttgttaaaataaaacatttttaggagtt

SEQ ID NO: 741 - DNA, 2722 bp, Homo sapiens
ttaatgccaactcattaaatacaaatgttttattacgcaaaccacatgtaggtcccaggctcaggggcttaccctacagcccccactggtccctggctccaagcctgctccttgcccttgcccaccctggaaagccaggatctcctatggagtgtgtaggtgtccacgagtgtaccggtgtgcgggcctcctgggctgcaggcactcaggcatggtggcagcattgagggaaagacaggtgttggggagcggggtccccacctgcccaggctcaggagtcacaggggtctgcacagtcctttctgctgtggaacacgtgatagatgctggtcggggggaacatagcaacagcgccgagcagagagcccacctggatggccacgccggctgccagcaatgccggccggcccccgccatgcagcagggagctggctgccaccttcacgtaggagaacacgccaagacacagcacccacgacagcacctgagggggacacagcaccagctgagcgtgagatgtgcctgctccagggcaacgcccccccaccccacttcatgtccccctgtgctcaccacgaggaccacccccgccgaggtgcccaccaggggcgggcaggggctcaggactgccagcgccatcaggtagcccccacagaacacgcccagcagagagaggccgcccagccctgccaaggacctgcagtgagcgagcagaatgtcagggctgactgcgccaggacctggctcccagccctgagttccacccgcacaggggctgggggtccttgtgtacctgcacagcacacccatggccaggaagcaggccaggggattggcagcactgcccagcaccacagccaggtggtaggccagacgcccgtagggtaagcaggaaaagctctgcacggcaggcagcacgccattggtcagcgcgttggtggcggccaacaggcccagcaggcaggcactgcgggctgatagaagctgataggccttagggtctggaccaggggtggtgcctgctgcctggcttggtggctcttgcagtggtgaggactcttccacctcttcctctgctcctggggctcccacctggaggcctgatcctaactcccctgtgggtacagatggtggtggcggcaacagcagcagaagaccctggaaggcagcagctgaagcgaccagaagggcagtcagtgcccagaagaaggtgctggcgggaaaacgctcaaggaagtcgagcggggggccaggggtgccgttgatgggggctggcgggcactcgaggcggcccacaccctgcactagggccagcacgcagggcagcagggcactcaggccttgacccaggaagaatgaccgtaagaagcgaggtggcaggtggctcaagaagggcaggaaagtgacattcgaggcacagcatgccagtgccagcacaaaggccagtgctaagaaggccacagaatgcaactgtcctgccactggggccacatggtgccacagagaggccagcagggctgtgcccaccatgcccagcacctgcaccacccggatggggacctgctcgtcctttcctggggccagcctcctccagagggtcaccaccagcagacccaggttccccagagccacaagcacagagacgtaagaggggaggctccaacctgcagggaagggaggaggccatgtcagggtcatgatgcccaagggaggaagagtgccaaagcccaccttcctgggcacacctgcacctcctcccactcaccctctggaagctctctgaccaccacaggtagctccacccagatcccactgaccgcagcccaggagtcttgggcacacctgcacctccctcccactcaccctctggaagctctttgaccaccacaggtagctccacccagatcccattgaccgcagcccaggagcccatgccgaagagagccaccagcaggtgggtcagcaccggacgggcgggcgtgggtgctgccattcagcccaaggctgggcccttccaggtcagggcaaaggtcacagccagttcttttcccacctagggccagacacgctttggctctcctgggaagtgaagacttcttctagcttgaaagaaacagagaaacagataggatgcagagccggagtcagaacagggtgagaccaggggaactgggggagccccgggcaggagcgcagatggggaggattggctaaaacgtacccagcgggaccgccggcaggcagggaagcaggaagccggcccgagtcgctgcggccccaggggaggaggccgaaggagcgagtggagccctcctctccagggagaggcggggctggagtcaacgccaccaccaccccaagccggacgccgggaaagggcgcctaccaggaggagccacgcacaccccagggcttcacggtgcccgcgaccgcaagagccaagtcagatcccaggggagtggccgggacggctctgctcggaggggcgccgccctctcggtaccgtcaggtgggcgactcgggagccgtccggtccctgcgcctcccggtcccgcgcccagtgcgctcccgctccagtgccggcttcccgccacgccgggacaccgccgtccggcccagggacgccacctcagtccggagcgcgcaggacccggcagcagccacgacccgactcacccgtggcggttccgggcccgcccccggcatggcccacgaccggaag

SEQ ID NO: 742 - DNA, 2263 bp, Homo sapiens
tccattctttcttaaccatcttcttctgcccccatctttaaaaaaaaaaggcagtaggctttatggctctaaaatcaaatgcttatgttggattctaataagggggttttatttcaggtatttgtaggcaaaataccaagggatttatatgaggatgagttggtgcccctttttgagaaggccggacccatttgggatctacgtcttatgatggatccactgtccggtcagaatagagggtatgcatttatcaccttctgtggaaaggaagctgcacaggaagccgtgaaactggtatgtgataattatccactgtcttagcaagtcactatttgaggaaataaactttaattcaaaaatgtttgtagttaacattattttgatttcttcagttgttgcttggaatgtttttatactgaccaagttggtatgtgacgtttatttttctctgactataaaagtaaaaaagaactgaaaatacccaaaaagtaatgttttatagaaagtctcccattgatttaagaagttatctattagattgatatcagaagtttcatatgagtatttggcttatgcatttctgtcttttggttttaggcaaaaggatgtcaattcttgatgttaaactttaggattcttaaagtataatgaagactggaatgggctgtggggaacataatagtggatgacagtgacttaggattcaattcagaaaatagttgtgaatctgttttattttggttacagcctactcatacgatttatttcatattttctaagtgtatttttgttcttcctgtatgtttcttggcccttgagtcttctctgtctttaatctttctctcctctcctactatttatagccagtctcatattaatttcctttctctagggcctttaaccacttggtgctcatttcagaccagtagtagtagcaacaaagttctgcaaatcaaatgtatcttcactcctgctgtatttaagacacagctatctcagtatcttaaaataacaatgtaattattttttggcatacccttgcctgacttctgaggacctcactaagtctagttctagcctttgtagaatggtcaacttctttcatcaaggctttggtttcattactggtgtctgaattagttccactcctagcttgacccagattttagtttttattatggattttttcttcaaacttgtttatttaatattaagttttcatttttggcagcatatggatgattttatttttaataatcatatctcttagtaaactaatggttaaataatattaaagtataagaagctaaaattggccaggtgtggtggctcacgcctgtaatcccagcactttgggaggctgaggcaggcagatcacctgaggtcaggagttcaagatcagcctggccaacgtggtgaaaccctgtctttactaaaaatacaaaaattagctgggcgtggtggcgcatgcctgtagtcccagctacttgggaggctgaggcaggagaatcacttcaacccaggaggtggaggttgcagtgagcaaagatcatgctactgccctccagcttggatgacagagcgagactccatcttaagaaaaaaaaaaaagggctacaatttatcaagaaaatccactatagtgatttaaataaaacatttttcaaaattttataaaattttgaaagtattgtgtttggtagacaatttaaaactatatatttagaattctgtgacttctgtagaatttgaaatttttctaatatctttgcattgattaaacatagttgttaccctttacatattgttattttgagtatggcttacctatatgcaattacatttccaaggaccctgaatgatcagtctcaggtatttttttctgaaaaatctgtggaaaaacattttcagatagataaaattaaaatatgaaataagatattttaaacaataaagtgagtcctttttatatggaagagtagtgaaggttaacaaaaccaaactaaaacaagagactgtaacaatgaagtttaaaatatacattcatattatggaaagcatgagggaacttggtgagttgatgaagcagggagcgtttggccttaaattgttgaattttttagattaagatcaattgtcctgagtttggggtggttttggggtctctggttcttttcttattgcagtgtgacagctatgaaattcgccctggtaaacaccttggagtgtgcatttctgtggcaaacaacagactttttgttgg

SEQ ID NO: 743 - DNA, 14327 bp, Homo sapiens
tccattctttcttaaccatcttcttctgcccccatctttaaaaaaaaaaggcagtaggctttatggctctaaaatcaaatgcttatgttggattctaataagggggttttatttcaggtatttgtaggcaaaataccaagggatttatatgaggatgagttggtgcccctttttgagaaggccggacccatttgggatctacgtcttatgatggatccactgtccggtcagaatagagggtatgcatttatcaccttctgtggaaaggaagctgcacaggaagccgtgaaactggtatgtgataattatccactgtcttagcaagtcactatttgaggaaataaactttaattcaaaaatgtttgtagttaacattattttgatttcttcagttgttgcttggaatgtttttatactgaccaagttggtatgtgacgtttatttttctctgactataaaagtaaaaaagaactgaaaatacccaaaaagtaatgttttatagaaagtctcccattgatttaagaagttatctattagattgatatcagaagtttcatatgagtatttggcttatgcatttctgtcttttggttttaggcaaaaggatgtcaattcttgatgttaaactttaggattcttaaagtataatgaagactggaatgggctgtggggaacataatagtggatgacagtgacttaggattcaattcagaaaatagttgtgaatctgttttattttggttacagcctactcatacgatttatttcatattttctaagtgtatttttgttcttcctgtatgtttcttggcccttgagtcttctctgtctttaatctttctctcctctcctactatttatagccagtctcatattaatttcctttctctagggcctttaaccacttggtgctcatttcagaccagtagtagtagcaacaaagttctgcaaatcaaatgtatcttcactcctgctgtatttaagacacagctatctcagtatcttaaaataacaatgtaattattttttggcatacccttgcctgacttctgaggacctcactaagtctagttctagcctttgtagaatggtcaacttctttcatcaaggctttggtttcattactggtgtctgaattagttccactcctagcttgacccagattttagtttttattatggattttttcttcaaacttgtttatttaatattaagttttcatttttggcagcatatggatgattttatttttaataatcatatctcttagtaaactaatggttaaataatattaaagtataagaagctaaaattggccaggtgtggtggctcacgcctgtaatcccagcactttgggaggctgaggcaggcagatcacctgaggtcaggagttcaagatcagcctggccaacgtggtgaaaccctgtctttactaaaaatacaaaaattagctgggcgtggtggcgcacgcctgtagtcccagctacttgggaggctgaggcaggagaatcacttcaacccaggaggtggaggttgcagtgagcaaagatcatgctactgccctccagcttggatgacagagcgagactccatcttaagaaaaaaaaaaaagggctacaatttatcaagaaaatccactatagtgatttaaataaaacatttttcaaaattttataaaattttgaaagtattgtgtttggtagacaatttaaaactatatatttagaattctgtgacttctgtagaatttgaaatttttctaatatctttgcattgattaaacatagttgttaccctttacatattgttattttgagtatggcttacctatatgcaattacatttccaaggaccctgaatgatcagtctcaggtatttttttctgaaaaatctgtggaaaaacattttcagatagataaaattaaaatatgaaataagatattttaaacaataaagtgagtcctttttatatggaagagtagtgaaggttaacaaaaccaaactaaaacaagagactgtaacaatgaagtttaaaatatacattcatattatggaaagcatgagggaacttggtgagttgatgaagcagggagcgtttggccttaaattgttgaattttttagattaagatcaattgtcctgagtttggggtggttttggggtctctggttcttttcttattgcagtgtgacagctatgaaattcgccctggtaaacaccttggagtgtgcatttctgtggcaaacaacagactttttgttggatccattccgaagaataagactaaagaaaacattttggaagaattcagtaaagtcacaggtaaaacaaaaatgtatttagaaattacttttgcgaaatatgttgtactacttacaagtgctcaaaaaaactgaggggttgtatgtattaaattaagaattcaggtctgaagtatctaaattgcttcctttctgctttatagtggtttgggtttaagcaagttcccttatatccttcatttcttggaatgtccccttcacttctttgtcttaattgaaccttggcttttgctggagcttttgctctatagccctcaagtgaatgctttttttccccttgacaattagtgtattttaggaccaagaggatgaaagtttttactctctccctgctgccttgtctagatcagattttttttttttttgagacggagtttcgctcttgttgcctaggctggagtgcaatggtacgatctcggctcactgcaacctccgcctccttggttcaagcaattctcctgcctcagcctcccgagtagctgggactagcatgtgccaccacgcctggctaattttgtatttttagtagagacggggtttctctatgttggtcaggctagtctagaactcccgacctctggtgatcctcccgcctcggcctcccaaagtgctgggattacaggcgtgagccacagtgcctggctgatcagatttttttaaatatccaattctaaatccatggaattgattgagaagtagattttatatcacagttctatacacatttatatataactgaaacaatttaacaaaactgtacttttatttattatacatgatttattttgatatttcttattctatttcattttttaaaatgccaattgtgatctaatactacctatgatttaaaaacactgcgttagaccgctgcctccccttgtaaaaaccactgtttctttacatttttatcatccagacatatcctttcccttttgttgaagctgtcattcgttgctcttgtggtttcagcctttcattaatctaaagattgcttctggctcactgtcttcctcttctgccctaaattggcttctttctaatacctttaacatctacattggtgaaccatccagggctttagactcctacctacttctatgtctacctcatctttagtcctttacttcagctccaccatatccagattacattctggatctagtcaccagaaattctatgcactctgaactcttgatttctagcgtcccactttgtaaccactgctaccacccgctatattgtgttgtcaagtattgtgttgtcaactgctggcacagttctttgacctcatcactttattatctatagctccttctggcttcatgatcatttattcattctttcagcaggtgtttattaaagttcctgttaagtgctggcattgtgctatgtgcctgggatacactgatggctaagagacatattctctgctttcatagatcctatatcctgagaaaggagataagaccaagaatataaaaaataaaaattaaaggaatatttagacattgtgataagacactgaagcaggaaatacaggatatttagctagagaatagctactatccctgtttccatggttttggaagacttttctgataagatgacatgtcaaccagcacctgaaggatgaagaggttgtagcatacaaagagcaaaaggaagtgcattccaagacagcaacacgtgccaaggttccaaggcaagaaagaagtcagtatattacagtaactgaggaggccagtattattaaaaggtagaattaggagtagagttgtatgaaatgaagtaggcagggcttctgtaggccatgtaaggagttgggtttttattgtatatataatgagaaggtatttaaaggttttaagcaggaaataacacctatttcttgtttatgggatattattcctagcgctctgtggataggggcttggagagaaggggtgtgagtggaagctgataaattagttgaagctgtcatactagtacagatacaggattagactagggtaatagcagtggagatagaaagaagtaaatgagtttggaattggataggagagatgaaggaagaaatcaagaatggctaaccaatttctggcttcagaaccaggtggatggcactgtttattagataggaagtctagggaaggcagattttggccatggtggttcagttttggaaaagttaaatttgcaatgtctaagacatcaaagaggatacatcgggtaagaacgtaggcacatctagagcttagagaagtctggggtaggaaaaaaatctaagtatttataagggtataggtaacatttaaaagtagggctagctgacattatttagaaagaacacatacggagagataagggcaaaggactaagaccagaggaacactaatatttagtgatcacttccattcttggtaaaaatagtaacttttaagttagcttcaaggaagatttttggccatgattagttgtcaaaagttagttctcttgggtttatattactaattttgtttttaagatccttgttagtgctttaataaagtcatgttatatcaaacgctctaaaacattgtagcatgttaaatgtcagaatatagtagatttgttgtatatggctgtaccttcagaacccctaaaattaaaaaggaacatcaaatactgtcccaaaccccatatctaattatgttgatctaattgtctacaaaattagtgactcatgttgaggctgcttcacttatattttgctcatcgtcaagtggatttaggtctgcctaatcgctagatgtgtggtggatgcttttggcttatatatctggctgttggtttaacagagggtttggtggacgttattctctatcatcaacccgatgacaaaaagaagaatcgggggttctgcttccttgaatatgaggatcacaagtcagcagcacaagccagacgccggctgatgagtggaaaagtaaaagtgtggggaaatgtagttacagttgaatgggctgaccctgtggaagaaccagatccagaagtcatggctaaggtaaatacagttgcttggaatgggcatagggtcatcatttaaattttgtactcagaataaagctcaaatattttgagttttatgataaatagaaattgtagctttagacttcaactgtttggcaaggagcggctttaacactaaagttaacagcctgtcttggtatccaggaatttccattaacaatcccttttcctgcagattaaatgtgcaaaaggaactgaaatgaaattccttcaattaagtagtcccatacacactgggtgtttgtttagtgctaggcactgtgagggatagaggttttttttttttttaaaagtcctgagtaaagagagaagtaatgttttggagattataagttataatcttcattgactatattatgactttattacttggccatgaattatgttttatttagatttatagctaatttttctttttttaagctttttttgtagtttttatttttaaaaatattttatttattattattattttttgagacagagtcttgctgtgttgcccaggctggagtgcagtggtacgatctcggctcactgcaacctccacctcccaggttcaagcgattctccttcctcagcctcccaagtagctgggactacaggcgcctgccaccatgcccggctaaattttgtatttttagtagagacagcatttcaccatattgcaggctggtctcgaactcctaagctcatgatctacccgccttggcctcccaaagtgctgggattaaggcatgagccaccgtgccccgcctcttgtttttaaatgatcagattcccttagtgtattgtccccatgaagaaaggcaaaagattgtcatgtttgctcttatttgttagtggcaaaatatgcatggcaagtcctgtaaagggccctcaattccctcctgattcctgtacttgcgttgccaggatcttaatagtggtgccttgagtactggttcttaagttttcctttgggcgactcctgggacacatcagagttgcatttctttttttttgagatggagtcttgctttgtcccaggctggagtgcagtggcgcgatctccactcacggcaagctctgcctcctgggttcacgccattctcctgcctcagcctcccaagtagctgggactacaggtgcccgccaccacagctggctaattttttgtatttttagtagagacggggtttcaccatgttagccagggtggtgtccatctcctgaccctgtgaaccgcccgcctcggcctcccaaagtgctggggttacaggtgtgagccactgcgcccggcctcagagttgcatttctgctgcttgcaatgagctcttgagcattttagttgtctcttcccttcacagggaggcagcaactctgaatggccatgagttaatggttggattcttcttgataagtcagaagtcaaggtttttattccagaatttgaggaggcaaaccctcgttctaagtagtttggaggagaactctggtttatacttgtataaagtctgggttggcagtgacatctttgggttaatcagataagttctattcagaatgaaccagagaggctctcagaagtgctactcagtatcttttatctcatattccttgagtagatgggtgtctaggaaagggatagagaatttaaatagctctgagtttttattttgattttttactagcttgattttaattcctattgtttcttctcctaatacaactatgactttgggtaaactactgaacatgaatgtcatctattttattgagcctggatcaatctctaagatccaccacaactttgaatctacctgtagtaactaagtatagcctgtattactttttctgtaaaaatattttaaaatagtattatagatgtattataatagaggaataaaatattataaaagaggaataaaatcccatgaaaaccaaaagtatagcttgtaatttgcttaccagccacttctcacataacctttagtaactgctcagatggaagttcatcctaatctttttttagggttagaaaacttcaagatttcattctggtaactcctttttcctagatctaaaacaggtttcagaatgaaaaggaggtctctataaacttaggattaaatattatggagccctttattgtttcttttttttaaaagatggggtctcatgttgcccaggctggagtgcagtagctgcccacatgtgcagtcatagcacactgcagccttgaactcctgggcttaagcgtccctcctgcttcagcctcccgggtgcttgcaaccccatccagctcctttattgtttcctaattgaaaagaaaagtttatccatttgagtaaagcttctgttattcacactatcaatttacaattcactgaagattttttttgccaagttgggtcagttttacaatgtaccataacctaaaagcctaaatatatgtctcttaaagggaccctttttcctgttgaacattttaaacacaatttcagtaagtaattttcacatagtatgttatcgtttcatcatagaaaagtccatgttgaattttttttaaaaagcaactaaaccagtgggagtctgtgtaacatagaggctggaccttagtatgacaaattgagaataataaaggggatggagcgtttgtggaaaatgttagtttttttcctccttaaattagtatcttcttattagatagccctttatctgaagcaacaatttgttcaatatgttagttttttatttggataggtactatgttttcttagttcaaaagttatatagaaaagtatagacaaagaaatttcctttctacccctatccctgtgtctaccaaatcccctttgtctcctataaggcatccagttttaatagttgctggtttccttttagtatttccttcggcaaatatggatatacttccttaattcttagatgagtggtagtaatgttggtagcctaccatatccactgatctaccttttgtttattcaccatcctgtttcatcagctctgaggaaatacatcattactatatgtactactaaatagttaaaaaacactgccaactaaactatggcacagtacttgcttatcacattgactgtaagttgtcctatcctacaactcatagagctcctcttcattttttgggtttttgttttttttttttttttttttttttttgagacggagccttgctctgtcacccaggctggagtgcagtggtgtaatcttggctcactgcagcctctgcctcccgggttcaagtgattctcctgcctcagcttcccgagtagctggggttataggtgcctcctaccacgcccggctaatttttgtatttttagtagagacagggtttcaccatgctggccaggctggtcttgaactcccaacctcaggtgatctgcccacctcggcctcccaaagtgctgggattacaggcgtgagccaccgcgcccagccctcttcttcattttttatgactacatagtagtctattctgtggaggtactatagtgtatttaaccagctggatattgtttctaatcttttgctcttacagtgctggaaggaataagcttatgttagttgatacaagtggagatatatctgtaggatagattcttaggggtagaattgtgggccaaagggtagatatatctgtaattgttaagatactgccatattcctttctgtaggagatacactattttacattcctaccagcaaaatacaagagaattattttcctcattcttgacaaaatagtgtataatcaaacttttgaattttgccagcctgataacaaatgtctcagtgccattaatgattaatgatttgcttctcttactatgaatggtttgaactttaaatatattttaagagccatatgtgtttctgtgtatgaaccatgtattcaggaattttgcctatttttctattcagttgttgagctttttgttattttctggtgctctgatataaaagagagattagctgtttgtgatacatgttgcaaatttttcatccatatttattgtctttgcttatagtatttttttgccatatagaagtcatttatttttagtagttgagtataacattcttatggctcctagattttaagtcataaggtcatccccactccagtgttatataaaggaatcattcttgttctaaaatttcacagtcctccctccacccttttattatttaaattttcaatctatttggagtttatccttgtgtatagtgtaaggcatggaccagcttttctcctttttttctaatttaacactacctgatttaatgatttaagcattatagtttgtttatatttggtagggccagcctctaaatttcactcttttttttcctggttattcttgcttatttattttttcatatgaacttttgaaagttactcagttttagaggaaagaaacagaaaaacttgttttgaaagggactttttgttgattaacttggtaataataattatgtgttggttccttgaaggttctactcagtgttaggtgctttaatgacaacataggagaaggcaggaaccaataatttttgtaaattggtgactgatatcagtgtcattttcctagcaatttctcttactacctgtaacaacacttttagcacttaatgttttagaggagaaaagctatgctatgaagacaggaagaaacacttttcaggtaaaattaagtagccaatgacggttttgtttatttgttgcttactaggtaaaagttttgtttgtgagaaacttggctactacggtgacagaagaaatattggaaaagtcattttctgaatttggaaaactcgaaagagtaaagaagttgaaagattatgcatttgttcattttgaagacagaggagcagctgttaaggtaggaattttgaaattttggttcttgatatttgaattttgtttttgaaacttgccaaacgcaaagtaactttaaaaactgaaacaatattggttgtcagcttttgctgaactctttctatttaatctctgtaaagtggtaatagtatgtaacagataagactccatatttcaaagccaggttattactgagtttgtgatcttaggcaagttatttttaatctctgtattgttttgtaagattcgatagcatgatgccttggaagtattacaaggtataaaaattagctgctgtaaacactgaataggtaatgaatgcattataactacttagttgacctcagtttgtgtacctatgaaggaaactgagtggtgtacatgactcatacagtataccatgtttaattgagtagatagattttgagggtatgattagttttacctttatttaatcattttagagttaaaatagcattcactatgttttactgatttcggtaattgttagagatatcacttgtgtataatagttgatttagtctttgatgataatgaaaagtttgaagaaagtattttcatatggtatctggaacacaaaacctgctttctatcgacaatggtttaggactatctttaatgggtgaaattttcagtttcttttttttattcatctctccttccttgggggggtgggagcaagacaaaacactactaaaatcttatttatgttattaggaagatagatccagaatgcttagtgacacaggcatggttctttttctgcatgtttggtcggtgggatactgccatctctaatctgagcattttttggttttgttttttgcccaggctactgcttttaaaacaggctttatagaatccctgattggtttataattaattggcttgctcattgatggtagctaattaatgaggcagtattgttcataaaattcataacttgtccaagatcacaaactcagtaataatctggctttgaagtatggagtcttatctgttatgctgttatactcttatccgttcatttgtggcttctgaaatttcactggtatagaatgcagataactaataattttatgctgtctaaatattcctcctgactcgactggtttcaaataactggttgtcctgattgaaaatatttataggatggtttgccaaagaagcctatgaaattataaaatatctagtccaggaactgggagtcaccaggatggtcagggcagagggtagatgtttcattttttaatttatgccaggaagcttttgtaaacttgtttagttgctttaactgaagcaacgcaaagctgaggtggtaaaagggaaaattgcagtcttgaggactagtttcgtttttgtctagatacttataaatcactgatagctccaatagaacatttttttatgtgtgcccagagtggggaaaggtatagggaaacaaaaaataaaatatcatgaggaggtgacattttgttactgagtacctgaaccttttgatgtatggcagaggttgttaggtggaacaacgtgaacaaagggctagaacatggaatgtttgattactgctttctacataattgcttgagtcttcattagtccaggccttttctggctctgtacttttaactgttcaagcaaagtacattttgggttaagcattgtgagggaaacctaggcttttttgtgttagtatcttcttgaattttacagataatctcactcagtaacctcatttgtgcttcaaatccttgaaattgtcgtataagaacagtggaagacctgtatgttgtatgctacatgtttattttaaaattctaatcctgagaagttaatctttgtctggctcgtattaatactggcatttttccccggtatggatttgcttctttggtatggcttatcttttaaggagttatttggaattaaggagcagcaataggtggcagcccttttaccttttaaaatataatatcaggtggtcggttttgttctaaatgtaatttatgtataaaaagataacgtcaagggaaacgtattttctttgtgtgttagtgtttaactttctggctagattcaccttttgccatttaaaataattgtgaagtaaattgttaagtgtattaaattacacaagtataatagcttacatactatataaaacaaaatacagttttatatcgttgtaaaataatttttctaattttttataggctatggatgaaatgaatggcaaagaaatagaaggggaagaaattgaaatagtcttagccaagccaccagacaagaaaaggaaagagcgccaagctgctagacaggcctccagaagcactgcgtgagtctacattttagtagatatatctttggacaaggaataacgtgataatggagatcagattaataaaacaaaatcagagtcttgaagcaaactgatttgttttttcttttctcccttctctactttgctaggtatgaagattattactaccaccctcctcctcgcatgccacctccaattagaggtcggggtcgtggtggggggagaggtggatatggctaccctccagattactacggctatgaagattactatgatgattactatggttatgattatcacgactatcgtggaggctatgaagatccctactacggctatgatgatggctatgcagtaagaggaagaggaggaggaaggggagggcgaggtgctccaccaccaccaagggggaggggagcaccacctccaagaggtagagctggctattcacagaggggggcacctttgggaccaccaagaggctctaggggtggcagagggggtcctgctcaacagcagagaggccgtggttcccgtggatctcggggcaatcgtgggggcaatgtaggaggcaagagaaaggcagatgggtacaaccagcctgattccaagcgtcgtcagaccaacaaccaacagaactggggttcccaacccatcgctcagcagccgcttcagcaaggtggtgactattctggtaactatggttacaataatgacaaccaggaattttatcaggatacttatgggcaacagtggaagtagacaagtaagggcttgaaaatgatactggcaagatacgattggctctagatctacattcttcaaaaaaaaaaattggcttaactgtttcatctttaagtagcattttgctgccatttgtattgggctgaagaaatcactattgtgtatatactcaagtctttatatttttcctcttttcataaatgctcttggacattattgggctggcagagttcccttattctggggattacaatgcttttatcgtttcaggcttcatttaagcttcaaaacaagctgggcacactgttaaatcatgattttgcagaacctttggttttggacagtttcatttttttggatttgggatagattacataggagtatggagtatgctgtaaataaaaatacaagctagtgctttgtcttagtagttttaagaaattaaagcaaacaaatttaagttttcttgtattgaaaataacctatgattgtatgttttgcattcctagaagtaggttaactgtgtttttaaattgttataacttcacacctttttgaaatctgccctacaaaatttgtttggcttaaacgtcaaaagccgtgacaatttgttctttgatgtgattgtatttccaatttcttgttcatgtaagatttcaataaaactaaaaaatctattcaaaacattacctatttcaaattcaattgtgtcctaaaacattattttattcgtaatccttgcaaggaatattgttttcaaagtataactgcctatgtgagtgatcaaattcatgcaaaatttcttgtttattccaacatgtgttgtggatattagactgaggattagtctaaattcaagtatttattccaattagcactttcattgattggtgttctctcatagtctcttctaattttgaaattttatcttttattaaaaaaaaaaaaa

SEQ ID NO: 744 - DNA, 482 bp, Homo sapiens
tcacgccattctcctgcctcagcctcccaagtagctgggagtacaggcgcctgccaccatgcccggagaattttttgtatttttagtggagacggggtttcaccatgttagccaggatagtctcgatctcctgacctcgtgatccacccacctcggcctcccaaagtgctgggattacaggcgtgagctgccgcgcccggccgaggttgctttttaagtagtaaagattttagagttgaggagataacttgaggagagctatgtcaatcttttattcaattattttatttttattcatttttatttttaatttataaattaattttttaattttaaataatagaaatggggttttgccatgttgcctaggctagttttgaactcctagactcaagtgatccgccttccttggcctctcaaagtgctaggattacaggcgtgagctgctgcgtccagcctcctttattctgtttttatgagaa

SEQ ID NO: 745 - DNA, 188 bp, Homo sapiens
tcacgccattctcctgcctcagcctcccaagtagctgggagtacaggcgcctgccaccatgcccggagaattttttgtatttttagtggagacggggtttcaccatgttagccaggatagtctcgatctcctgaccttgtgatccacccacctcggcctcccaaagtgctgggattacaggcgtgagc

SEQ ID NO: 746 - DNA, 6126 bp, Homo sapiens
ggagccgcgagacaggtgcgcatgccagtgcgcgtctgcgagaccgacttggacggagccgagctgaggctcggcttcctgctgatggtcagggttttggcaactccccggtgtgagaggggtagggagtgctcccggcggcgacggggccgagttcaccagccgccggggcagtagtcgaaggcccggcgcggcatgtcctgggtgccgcggtgcgggcagtgaacgcgcgccgggcgggatgggccgccgggcgccagagctgtaccgggctccgttcccgttgtacgcgcttcaggtcgaccccagcactgggctgctcatcgctgcgggcggaggaggcgccgccaagacaggcataaagaatggcgtggtgagagcgcagggccactggggctgggtcttgctgcgggctggcggcgattccagggtggccggggggtcgcggggcgggccacactccagcttcgggccctgcccacttctgttgggaagacccgcttgcctgacgcccaggggcgaatttcagtcgagaactcagcgggcggaggagaggcttttaaggtaaagtgaaaactgcacacagctgcagagtcgccaggaacgcttcagctccgcctcagagcagctccaggggtcttatactggccttttccgggaggtcttgcctgccctctagcagcggcgagagtggtgcatttgggtttaggctaagttccttccctctcctgagcttcaccctgttctgtaaaatagaggtaataatcccagtcctgctcactgtgtagatttgtgaggcccaaatgagagaaaaaagactcgagaaacccttgtgaactagaacgtgcagaaagcaaaggggtaagacatcagactcttccctaaacgtgctctctgggcacccctgaacttgctcatccgggttccccctcccacagcactttctgcagctagagctgattaatgggcgcttgagtgcctccttgctgcactcccatgacacagagacacgggccaccatgaacttggcactggctggtgacatccttgctgcagggcaggatgcccactgtcagctcctgcgcttccaggcacatcaacagcagggcaacaaggcagagaaggccggtgaggagctccctctctaaccccttggggaaagggttgaacgagtaaggtcactcttggtgtctctaaagaagtgggtctggaagtagggttttggtagcaagctagaagttgtatggcacctgccatggagagaggggccagtactccttactgtagaagcctggaacctggccaagtgtttgtgttacaggttccaaggagcaggggcctcgacaaaggaagggagcagccccagcagagaagaaatgtggagcggaaacccagcacgaggggctagaactcagggtagagaatttgcaggcggtgcagacagactttagctccgatccactgcagaaagttgtgtgcttcaaccacgataataccctgcttgccactggaggaacagatggctacgtccgtgtctggaaggtgtgggtttgcagggttagggagggtgaatgtcagtagcaacaggatcaaaattgtgagaagttgaacgtggcatctgggaaacttgtgaatgaagcttgcattgaggggccattagaaggggtggcgtgggcatcagtcacagtgtacttgctggacacctgagttaaccatggtggttgtttggctacaggtgcccagcctggagaaggttctggagttcaaagcccacgaaggggagattgaagacctggctttagggcctgatggcaaggtgaggggctgggggtgggaggaggatggagaaaggagagaggaggtgcttatgctgcttgcccagtaagtggatcccctaactgtccatccttggaatctttattcctaactagttggtaaccgtgggccgggaccttaaggcctctgtgtggcagaaggatcagctggtgacacagctgcactggcaagaaaatggacccaccttttccagcacaccttaccgctaccaggcctgcaggtgtgaagactttgggtggtggctgaaagaggcatagcccagctgtggtgggggagagggaaaagactggggatgggagagctggggaggaacttgttgagtgttaccccaggtctgaccagggtgcaggtggtgcacaaacctctgaggagggttggcaggccctaggagctgaatagcccctcatccggcccccaggtttgggcaggttccagaccagcctgctggcctgcgactcttcacagtgcaaattccccacaagcgcctgcgccagccccctccctgctacctcacagcctgggatggctccaacttcttgccccttcggaccaagtcctgtggccatgaagtcgtctcctgcctcgatgtcaggtgtgagacattgctgccttggctaggtagggggtccctgagggagcttggaaaggagtcctgcctgggtccctacggaccggtattggggtatgagggttgctgcacaagcctccaggacaatgagctctttattgtttgttgcagtgaatccggcaccttcctaggcctgggcacagtcactggctctgttgccatctacatagctttctctctccaggtaatgggtggaggttggcatggccctgtgggtggactgtaggcctgtctctaccctgagtttgcaggaaggagtctggcccatcctatcgagggaaatcctgggggtggggaacatgctttccagaaagagagttcccagctaggcctttcctcactggtattccttctgcccacagtgcctctactacgtgagggaggcccatggcattgtggtgacggatgtggcctttctacctgagaagggtcgtggtccagagctccttgggtcccatgaaactgccctgttctctgtggctgtggacagtcgttgccagctgcatctgttgccctcacggcgtgagtcattggggcagggcaggcaggcaccaccccacgtttaatgaccagaaacgtgccccccggaggctgggctctttgtgccactcctcctttgaagggttctggttttcaggctgggaagcccttttgcccgctgacctcctccctttccctcctgcagggagtgttcctgtgtggctcctgctcctgctgtgtgtcgggcttattattgtgaccatcctgctgctccagagtgcctttccaggtttcctttagcttccctgcttcctgggaatcaggagcctggacactgccatctctagagcagagtggaggcctggactccctttgctcactccattcgggtccacagctgaggttgccgctgacaagatgaatgggcactgcctgcccttctagtgaaaaggcttggctatggccctgtgtgactccaggtcccaggaaccttgccttcgtcatctgtggatccatccagaacagcggtatctgaagcccaggccatactccctgcctcctttcttctgcctaccagaggctccagagttgagcttgtccttatctagaaacatgtgaagatgcccaagagcctggaggcactgctgtccttcctgcagaaacagtttctcctcctcccctcagccttgtggccagttcctcttcacatgaagcccctggcatttgctggggaagggactggcctggtacttgctgttagggcaggaaggggcaaaaggaagacttgggtagtaatctgggggttcagatgggtagcactaagccagctggcctaaagatgcaataagttcctaggtagtctacccttaccttgaggaatgggaaaatgaacctcagcccattaggcaggaaaagttgatatttaataaacaaggaaagagtgaactgagaccccaaatggtactcttgtcagctgtttctgtcctcagaaggtaagagagccctgaggtcaggcagcccctctgggtcctggaagatggctttggcgtactgatgcaagaggcggctcatgtaccagtgctgccacgggagcagcccttccaggaagccgatgtggccaccccgggctgtgatgagcagcgcaacgtagggggagtgttgggcggcctgtatgggaagggctaggagagggtcagaggttagaaacactggccttcactgggagcccaggctgtctgttgcgtccctcatggcccattttccttggggccaaagtgtcctgaatcagagtactcaccacagacgggggagaaggggtcatctgctgcactgagatagagcacagggatccggatggcatctatcttggttctagggcttgctgctttgtagtaggtaacacagtcttgatatccaaaggccacagatgtgtagcgctcatcaaactggcggattgtacgggcctgcaggtcttaccataggataggctaagatgataaagaataggaagatagtggaagactcatttgggggaaccaggggcatggctgaatattatacctgtagtacaaagtctatgtccaccaccttttcaatcacctttctgtttctgcaaaagtacataagagtttggcttgacacctggatctgatcccccacccccaggccctgtcttactatctcatgtgtgaggaagcccagagagaactgaccaagcactaggagagcctggagtgtctgccatcctactctgtctactgcctcctcccacttgccacgaccctaccgttccacaagttggcagagcccagcagtgaggggctgattgaagagcagtgagttgagtggggtttccagggagcgagtggtctcaaaggaatcccagcatgcagacagagtcagtgctgccaccagccctgcagcctgcctggcctgtgccaggtgattcagcaccagtatcctgtggaattggacaagggaccatgaaagaagggtttgcattaatgtgggttgggacagaggaaggggacatggaggaggaaaaaaaggaagactgggcctctgggctaagcccaggcaatctttaccctccaaaagagatgcccacggccagcagtggagcttggggataacgatgctttatgtggttcacgactgtctctagatcttcagtattgctggcacaaaaagccctgtgggtctgagggcaaaccagatcattgggtagggagggagaccgtggccagaaggtggaggggaaactgaggaaggataggtaggaggtgagccccagggccaaggatctctaaagggagtgggtgaagggctgctatgaggaaggcagctactcacccgcagttcctccccacggcagccccggttgttaaacacgacagccctgtggcacacacaggtacatcttagccagacccttcttagcccctctcccctttcagtattcagaaagacccctgtccaaagactccctttgtgtagcattcttcttatctatcagtgtccggattgacttctccctaatacacgttctcagatgccaccccactctggggctgcacccatccttactggtagccatccctcagagcttggttaactaggtgcaagacgtatgtatcctggctactgccagtgatgccaggaagcagcagcacaatgggctgggtagtaggatcagggtcttggctgctgtcaggctgcttggcccagtctagcaggagctggcctccatctggtgtttggaggatgtcactggttttggaggaagaggcacacaaagatactattaagaacttaatgtaattcaaaagctttgccccctgccccacccacaaacaagtcttatcacttcccgtcagcatcatctgagggtgttcttcatgtaaaacagtaaggcttgacaatgtgtgatggggacataaaagatgacctggtggccgtgcaattatatagcccttccatataacatccattgtcattgaaccctcaacacagggatgtagatgaggcagattacctacattttaaaagtggtagataggtttttccctagatacctggggtttcatgttcaccctgttctgtcccttcttacctctgataaaggactaggggctgagactgcaggaggacttggaagatgctttgtagtcgcccctcaaaac

SEQ ID NO: 747 - DNA, 102 bp, Homo sapiens
aatggcgcgatctcggctcactgcaacctctacttcccaggttcaagtgattctcctgcctcaggctcccgagtagctgggattacaggcgcacgccaccac

SEQ ID NO: 748 - DNA, 8143 bp, Homo sapiens
ctgcatcctccgtgcccggcctgagctggagtcccccgcgccccccgcgttccgcccggccatggctgcggtggcgctgatgccaccgccgctgctgctgctgctgctgttggcgtcgccgcccgccgcctccgcgccgtccgcccgcgatcccttcgccccccagctcggggacacgcagaactgccagctgcggtgccgcgaccgcgacctcggcccgcagccctcgcaggtgaggcgcgtgcggtgccaggtgccagcgggggacgcgggatctctccgaaggaggaggcgttgggatgggcttctcttggatgacagcaggagactttggtgggggtgtccgtggggaggtgggggtcgggaatggggagatctctccagtagttgacgggctggggttccctctgatgggggagtgcttggggatgcaggtccttgcgataaggggccgataccacctcccgggctccttccgcactctgctgggtaaggaccctctagcacccaacccccagctccctcaggcctgatggtccccccacctcattcctcctcctccacatcgtgttccctccccactcagagctaccagcccctactcataccaccactccccaggattcaagcctgatctgcgtgtgaccaaaaccccctcctctgagcctccccctcctcctccaggtctgagaatccttctccatgtctcccctcctccctggaacctagtggggggaaggctcatttctctccaccttcactgtccatttctcttctcaagctccctccccatctccctcctcagagctaagagcccccactaatatttgtagcctctcccaacttcatctccatctggctagatgtcgtggggagcggggaagcctttccctgcctctgctgaatgctccggtccccccaccctcctcctgcccctccccatggcctgagccccctgtcctcccctcccccaggcggggctggagggcgcctccgagtctccctatgacagagccgttctgatcagcgcttgcgagcgtggctgccgcctcttctccatctgccgatttgtggccagaagctccaagcccaatgccacccaaactgagtgtgaagcaggtgagggcccgccggcagggtgggccagcgtggggagaggtggcctgggaagggccgtccccagtcacccgctcccacctcccacagcctgcgtggaagcctatgtgaaggaggcagagcagcaggcctgtagccacggctgctggagccagcccgcggagcctgagccggagcagaaggtgggcctcccactgcggcctggggtcccttttcccaatacccccaccctcttcaccccgtgggaaatcttcattcacgtgcagaggctctgccagactctgcgttctataccaggcctgcagggcaacctccatccagccccgtcatgtctccagccttagttacatgcaacaacgccccccatgccccaccaccttttcaggaataagtggcagaaaacagccatcatttatcaaacatctgtcctggttcgggcctgacttcaacctgtcccaaatgtttttgtgtcacttggaggcacaaaggacaatgtcacccccatttagtgcccagggggcaacctcccaggtcatacacagggctgtgcaaggggcgagatttgaagccaccagagctgtggccactcctcacctcactcctcttaggcgcccccagagctgccaggtgctggtctaagcccttcccctgtgatgagctggtggtcactgtcacctggaggggctcagaactgcggctcagggtagagcaggcttgcctcgcaagcacgcacacactgccttatgggagaaataataacggttcatctattgtagtccaagcaatgctgcatcatggggaaactgaggcacagaaaatcatgtagcatagccagagacctaggggctgggactccccagaaagccctttccccacttcccccattttcctccaccccttcccagctttcactgctgttcagaaaagctcactgcactgtcagcccttccaattcagagctccctcttatttatttatttattttttgagatgaagtcttgctctgttgcctagcctggagtgcagtggtacaatcttggctcactgcagcctccgcctcccgggttcaagtggttctcctgcctcagcctcctttgtaggtgagattacaggcaccccccactacaatcggctaatttttgtatttttaggagagacagggtttcatcatgttggccaggctgatcttgaactcctgacctcaagtgatcttcccacgtcggcctcccaaagtgctgggattacaggcatgagccaccatggccggccatcagacctccgtcttgacgctgtcaaaataagaataatgaggatgatgatatttttagtaatagggactactacgcattaagtgcctgtgccgtgccaggcacctggcaggcatcctctagttgaaatttcatggctactccatgaaggaagagaacgatacccattttagggctcagagagcacaatccacttccctaagggtacacaggaagccaactgccacgctgagatctgtgttcactataagaagtcctattggcccaaatcacttagccacatccaatccaagtgaattctcctagctcctctcctgttagtttatttattcatttatttatttgagatggagtctcactctttcacccaggctagagttcagtggtgtgatcttggctcactgcaacctctgcctcctgggttcaagcaaatctcctgcctcagcctctggagtagctgagattccaggcgtgcgccatcatgcctggctaatttttgtatttttagtagagacagggtttcacgatgttgtccaggctggtctcaaacttctggcctcaagtgatcggcctgcctcagccttccaaagtgttgggattacaggcgtgagccaccacatcctgccccctcccattcattggttaatgccctatttcggtgccatctttgtgtcttggaccttttttcaccagagaaaggtcctggaggctccaagtggggccctctccctcttggacttgttttccaccctctgcaatgaccttgtcaactcagcccagggatttgtctcctccacctggacatactacttgcagactgacaatgggaaagtggtggtgtttcaggtgagacctctgacaggggccacgccagagtggcagatgggtgggcagggtaagaagatgggatgcattggctcttagctcatgagatgcaaagtccacagtgggcgagcttcaggcacagctggatccaggggctcagtgtctcactccatgccttgactctgctttcttttgtggtggcttcattcccaggcatttacttcttcttggcagtaaggtggatgccagaggctctaggttacaaacgctgtggtttttttttgttgttgttgttgttgttttgagatggactcccattcttgttgcccaagatggagtgcaatggcatgatcttagctcactgcaacctccacctcccaggttcaagtgattctcctgcttcagcctcctgagtagctgggattacaggcggccaccaccacacccacctaatttttgtatttttagtggagacggggtttcgccatgttggccaggctggtctcgaactcctgacctcaggtgtttcacctgcctcggcctcccaaagtgctgggattacaggcatgagccactgccccggctccctctggggttttaactgagctgggatttactctgattggccctggctggatcatatgaccatctctcaggcaattcactggcttggtctggatcatgttcctacttctggagctaaaggatggggttaaggcaaatggaggagcccatgaaagcagaaaacaacatccctgacatcaagcccacccctgatacccaggggaactgggtatcagctgggcgtgggacatggcagtcacagagggcctgcctgggcccaggggtgctgttctcacaagcctctctgtgctgtcttgttcctggcccagactcagcccatagtggagagcctcggcttccaggggggccgtctgcagcgcgtggaggtgacctggcgaggctcccaccctgaagccctggaggtgcacgtgggtaaggtgcaacctagaccagtgttccttccatgggtggccccactgccacaaggagtcggcctggcaaacagaccttctaggatcgggatctccatctctcaagtcctgggttccatggctcatcccccaggtctccatggtctatttcccagggttccatggtccacctcccagggttccatggtccacttctcagggttccgtggtctacttcccagggttccgtggtccatctccccgggttccatggtctatttaccagggatccgtggtccacctctcagggttccgtggcccacctcccgggttccgtggccacctcccagggttccgtgttccgcctcccagcgttctgtggtccacctcccagggatccatggttcactttccagggttctgtggcccatctccctgggttctgtggcccatctcccagggttccatggttcatctctcagagttccatgggttcatctcctagggtcatctcctagggtccatctccaagggttctttggtccatctctcagggttccatggttcatctcttaggattctgcagttcatctcccagggttctgtggcccatcccccagggttctgcagtccatctcccagggttccatggtccatttcccagggttccatgttccatctcccagggttccatgttccatctcccagggttccatgggttcatctcctaagggtcatctcctaggatccatctcccagggttccatgggttcatcttctagggtcatctcctagggtccatctcctagagttctttggtctatctctcagggttccatggttcatctcctaggattctgcagttcacccccagggttgcatggttcatctcctaggatccatctcccagggttccatggtccctgtctcagcattctgtggtccatctcccagggctctgatctccattccaggactctatgccccaggtcctgacctcctccctcctggtcatggttattgtggcctcttagcaaagacctggtggtcgctgagtggcagctgatctctcagaccctgtaggccccctggacaaggtgaggaaggccaagatccgagtcaagaccagcagcaaggccaaggtggagtctgaagagccacaggacaatgacttcctcagttgcatgtcccggtgggtggcaggaccttgggggtgggaggggggtgggactggaggtacgggtctccctggtcccggcctgggcagctgagtggtgcctgccgggcggggcaggcgctcgggtctgcctcgctggatcctggcctgctgcctcttcctctccgtgctggtgatgctgtggctgagctgctccaccctggtgaccgcgcctggccagcacctcaagttccaggtgggtgggatctgtgaatggcgctgggccgagggagggggtgaaggcagagagagctgtttgctggtcctggatttggccacctgctcccatggaggccaggacctcagacatttttttcttttttcatgtatatacatatatatacatatacgtgtgtgtgtgtgtgtgtgtgtgtgtgtatatatatatatataatatatatatatatattttttttgagatggagtcttgctctgtcacctgggctggagtgcaatggcaccatctcggctcactgcaacctccacctcctgggttcaagcaattctcctgcctcagcctccgaagtagctgggactatgggcgcgggccaccacacccagctaatttttgtatttttagtagagacggtgtttcaccatgttggccaggctggtcttgaactcctgacctcaggtgatccatccgcctctgcctcccaaagtgctgggattacaggcgtgacccaccgcgcccggcctatatatatatttttgagacaggatctcactctttcacccaggatggagtgcagtggcatgatcacagctcactgcagcctcggcctccctggctcaagcaatcctcctgcctcagcctcctgagtagctgggaccacagtcacgtgccaccatgccccgctaatttttgtattttttgtagagatggggactatgttgcccaggctggtcttgaactcctgggctcaagtgatccacctgccttgccctcccagaataccgggattacaggcatgagccacctcacccagccaggacctcacacttgctgcatgacttgggccagtttcttcactgccctttgaattggtgggaagaaaatccactcttagttggggcgacatgaagtcagaggtggccacacttctgtggtgttggcctcacctctatcatgcccaggtgtgttggtgacacctctgtggtgcccagagcctgggcaacatagtgaaaccttgtcactacaaatcatttaaaaattagctagatgtggctgggcatggtggcccatgcctgtaatcccagcactttgggaggccgaggtgggcggatcacgaggtcaagagattgagaccatcctggctaacaaggtgaaaccccatctctactaaaaatacaaaaaattagctgggcgtggtggcaggtgcctgtagtcccagctactcgggaggctgaggcaggagaatggcgtgaacccaggaggaggagcttgcagtgagccgagatcgcgccactgcactccagcctgggtgacagagcgagactccatctcaaaaaaaaaaaaaagaaaaaaaaaattagctagacgtggaggtgcatgtttatgatcccagctacttaggaagctgaggtgggaggatcacttgagcctgagagttcgaagctgcagtgagctgtgatggcaccactatactccagcctggacaacagagaagaccccatcacacacacacacacacacacacacacacacacacacacacacacacaaaagtccaggtgtggtggctcacacctgtaattccagcactttgggaggctgaggtgggcagatcacttcaggagttcgagaccagcctagccaacatagtgaaaccccatatctactaataatacaaaaattagctgggcgtggtggcgtgcacctgtagtcccagctacttgggaggctgagaaaggagaatcgcttgaacctaggaggcggaggttgcagtgagctgagatggcgccactgcactccagcctgggtgacagagagagactctctcaaaaaaagaaaaaaaataaaacaatcagaggtgggaaggagacagtcagggttgggggctcggcctctccccgtccctccacttccctcctcccctctcttcctgcagcctctgaccctggagcagcacaagggcttcatgatggagcccgattggcccctgtacccgccgccgtcccacgcctgtgaggacagcctaccaccctacaagctgaagctggacctgaccaagctgtaggcctccactggccccatcactgccaactgcagggggcccctcgggcctcacttgccctgagcccaggagtccaagggcagggtgggtccagccttgagcccctccacccccaaatccttcctctcctcccagtcccaccccttgccccacggagtcctggggacgcagtgccccagctgggaagagggcgggatcgggcactggttcctccttgtccccgctttcttgggggcttgctactttttgtcttctattgtgtggctttctgagtatttgaaccccagtcctgtgtcaccttcctttttccttctatgtcccctctctgcggggggggcgctgaggctgagggggagctgcgtcttgctagggcttcccccttctccccatcccggtctccagagacccagcttctgagagacagggtgtgggcatctccatgcccctataaagcgtgcctggggcttgtctggggctggggaggaataaaccatgtatataaaagag

SEQ ID NO: 749 - DNA, 13275 bp, Homo sapiens
gcgaaagtccagcttcggcgactaggtgtgagtgagccagtatcccaggaggagcaagtggcacgtcttcgggtgagtgtgcggctgtgctggagcccgggttaccagctcttgcccgcgcggaataggctttaagaaatcggagctgcagccatctgtttttctcttaatgctgcatctctgttctcacggtggtccttggggtgaggttagagaaggagccgagggatcctgacaccacctccacagcaccggcgggcgaggtgccctactttaggcgtagccttctgcttttggagccagatgtctgtggacttctgttcgcgttcagaaatgccgcctcaaacttctctcaattgttcattaagtgaacttctctcattcccttcccctttgccgataattggaggggaaaagaagtaggaagcgggacacggtgtcctggggcaagggacttattacctaaaattcgcggccccttctgtccctaaaggttcttctccctgcccactttttggtctctttttagacctaggctgcccctgccgtcatgtcgcaagggatcctttctccgccagcgggcttgctgtccgatgacgatgtcgtagtttctcccatgtttgagtccacagctgcagatttggggtctgtggtacgcaagaacctgctatcagactgctctgtcgtctctacctccctagaggacaagcagcaggtaaaggaactggggagtggctggggcggaaagtgatatcctcaggccaataattgtccatacagggtagtatgaggtcaaagactagcaatcctaaaggtctgagatcaattcaaaattaagggcatttaggacaaaatggctatgaaaagaaaaaaagaaaaaaaaattaagggcatgacaagtaaaaaaaaaattgagttgtgtgtccagaagaactataatttgcattgcattaatgaaataccctcaaatgcatgctcttagttaatctttcagggaataatagttatctctctttgccttgaggcccagttgtgctaaataatttgcacaaggtcatataggcattatgtaagtggaatgtatgttcaggttttaatagtatcaccatagcttcaatttgttgtaggtttcctgctaggccagggtttctcagttacagcattattgacatttggggctagacagttcttgtagggatctgtcctgtacatttcaagatgtttaatagcattcttggcatttacccactagatgtcagtagtgccttcccatttgtgacaatcaaaaaatgtcttcaggcacttcaggcattgctaaatggcccttggagtggaaatgaccctggttgagaaacactgtactaggtcctatgctaaacattaacatacattgtcagattttgtgctcttatagagtttctcttagagacttataaagttccatgagagcatggtccttgatgatgtctctcactatggactatcagagcttctcagttcctaggccatagtagacactctaaatatctgggttttttttgttttttgggtttttttgttttcgagatggagtctcgctctgtcccccaggctggtgtgcagtggcacaatctctgctcactgcaacctccgcctcccgggttcaagcagttctccctgcctcagcctcctgagtagctggaattacaggcacctaccaccaagcccagctaatttttgtatttttagtagagatggggttttgctgtgttggccagactggtctggaactcctgacctcaggtgatccaccctctttggcctcccaaagtgccgggattataggcgtgagcccctgcacccagcctctaagtatctgttgaatgaatgacataggtgctattattaaccccattctgcagatgaggaaactgaggccaagaatttcaagaactcataattcaaggtctcatagttactaagtcatggaattgggactcaaattcaagtgtttgcctctgctttgctttaatatcacatactaattttcataccagtcaataaattcgaactcagatcatcggtgtggcaagccacatttgcaggataatgacgagacagggaagggtgacaaagtagtaaaaatgtccatgtgggttggaatgattgtggaaccaaagagtagctgcacagagacatttgaggtgaaatggggtagtgttatcatagttcctagaaactactgtttgcccatttgctcagaggtaactgctgaaattaatctgtggttctgggctgggattctgccacaggttccatctgaggacagtatggagaaggtgaaagtatacttgagggttaggcccttgttaccttcagagttggaacgacaggaagatcaggtaagtgtctgagaagggaggattcaaggtgaaatgatgcagtacaaaagattcccaggaatgccttctgtgacaactgtattttctcccttctcagggttgtgtccgtattgagaatgtggagacccttgttctacaagcacccaaggactcttttgccctgaagagcaatgaacggggaattggccaagccacacacaggttcaccttttcccaggtatggagggtactggtttgtgaacaaaagaccaacatgtaagggcaactttattccctctttagagggaaagcttctcttcctgactgtgagttccttgtatatgcacacctacaattttgagggccctagttatgtgttagtcaatgtgtcaagtaacatatgtatatcagttctgaaaaattctattgttattatcattatttccttattttcctcacaaggatagtgtggctcaatgaatgtaatattgctgaagccatgtagctagtcactagtagagttaggacctgagtctagatccatgtatctccaaagcccatacttgtgggccattatattgccccattgtgtgtgcagcatcaggcctagggcatagcattccttaagtgtttgttgatttggtggaaagatggactagcagagagtgcttgagtcctcagtgtttagggaacagccagcagcattgcaggaagaagctgcttgagtggtctccagagccaaccactcaggaaggaatatatctgctggctctgcacaggaggcaagtgggagatgaaggagaggcctctaaaaaactgggtctctctctagatctttgggccagaagtgggacaggcatccttcttcaacctaactgtgaaggagatggtaaaggatgtactcaaagggcagaactggctcatctatacatatggagtcactaactcagggaaaacccacacgattcaaggtgagtagtaagccttcacgggattcctgattggctggtaatggtgttgtttttaccttttgagactctgagttagggggagaagggcacttgcctcagctgtccatctttcatatgcctccaggtaccatcaaggatggagggattctcccccggtccctggcgctgatcttcaatagcctccaaggccaacttcatccaacacctgatctgaagcccttgctctccaatgaggtaatctggctagacagcaagcagatccgacaggaggaaatgaagaagctgtccctgctaaatggaggcctccaagaggtaaagcattggtatccatggcagtgggggtagggggtacaaatctcggggaagttttgtgcttaccttctccctgtgcccctccaggaggagctgtccacttccttgaagaggagtgtctacatcgaaagtcggataggtaccagcaccagcttcgacagtggcattgctgggctctcttctatcagtcagtgtaccagcagtagccagctggatggtatgtaccgtgactgggctctgccaaaaaatagtaggaactcactccctgttcctaatagctgccaggagtacagaccagaggttgcaatctaaggtctgccttccaaggcccctgcaggccaaaagagaggtgaactgctctaggttgatgccctatacattggcttcttctccagaaacaagtcatcgatgggcacagccagacactgccccactacctgtcccggcaaacattcgcttctccatctggatctcattctttgagatctacaacgaactgctttatgacctattagaaccgcctagccaacagcgcaagaggcagactttgcggctatgcgaggatcaaaatggcaatccctatgtgaaaggtaaaggaacatggggaaagctggcatgaaccctggagggcaactggggagagactggcaaaagagttggatgttcccatcttacacccctctcctttggccccagatctcaactggattcatgtgcaagatgctgaggaggcctggaagctcctaaaagtgggtcgtaagaaccagagctttgccagcacccacctcaaccagaactccagccgcaggtgagtagattgtaagaataaactcttcactgtgttccaggaaacattagtcctctgcctggtcatggaaaatgtgcaatgactttttgtttttcttaacttccagtcacagcatcttctcaatcaggatcctacaccttcagggggaaggagatatagtccccaagatcagcgagtaagtttatccatttagaaatttgggcttcttggccataaatgatagttgggaaagcatggaggaggtcctcaggggaactatgtgttctccttctttgggtacagagattcttagtgggccgtcccctctccagaattatacaaagggccagaaggctcataacatgtgaggcccttatgtcagatcctgtgcatcattctaggctgtcactctgtgatctggctggctcagagcgctgcaaagatcagaagagtggtgaacggttgaaggaagcaggaaacattaacacctctctacacaccctgggccgctgtattgctgcccttcgtcaaaaccagcagaaccggtgagcttttgactataattcctgggctctgcaatttgctaagagacttcctggacaccactggggatggtgctaggatacccaaagggctggtgttctgctcacagctctattatctctgattctctgccaggtcaaagcagaacctggttcccttccgtgacagcaagttgactcgagtgttccaaggtttcttcacaggccgaggccgttcctgcatgattgtcaatgtgaatccctgtgcatctacctatgatgaaactcttcatgtggccaagttctcagccattgctagccaggtgagaagctagaggtgtgatgggtgtgcgcacttggaactggtaactctaagaaagctcctagggactacttatggagtcaagtaagatattttttttccctctagcttgtgcatgccccacctatgcaactgggattcccatccctgcactcgttcatcaaggaacatagtcttcaggtatcccccagcttagagaaaggggctaaggcagacacaggccttgatgatgatattgaaaatgaagctgacatctccatgtatggcaaagaggtgagaatacaagaaagctttagtgtagcagcttagtagctacacatttttccatggtgccttccaggtgggcttgtgccttctgagggcatgagcatctgatgacctctgacatgtgtgtctctcctaggagctcctacaagttgtggaagccatgaagacactgcttttgaaggaacgacaggaaaagctacagctggagatgcatctccgagatgaaatttgcaatgagatggtagaacagatgcaacagcgggaacagtggtgcaggtactagctgagtgacccctcttgctctgtcacctgagacagagggtgggaagtaaggagttaggtggagttgtgcctcaagatctgttccccaagttcactcctcagaaccttcacttacctctcttttctcctctgtttctgacagtgaacatttggacacccaaaaggaactattggaggaaatgtatgaagaaaaactaaatatcctcaaggagtcactgacaagtttttaccaagaagagattcaggtgagttgccctgagccagctccaattagctgctcagatttccatcactagcttgcctgaagtaaagagattttataaactactccagtaagggcaggaatatataactcccttttctctattccccatagtgctttgggttcaatctatgtttggtgaattgattaagggtttagttggccaggaaatcgtattaagtgctaacaacaggttttcaagggatcagtgtcacaagtgctttgtttgttcagtcatctgtcttagcaatatttttctggctctgcaaagaattgtgctctctgcttccctcttaggagcgggatgaaaagattgaagagctagaagctctcttgcaggaagccagacaacagtcagtggcccatcagcaatcagggtctgaattggccctacggcggtcacaaaggttggcagcttctgcctccacccagcagcttcaggaggttaaagctaaattacagcagtgcaaagcagagctaaactctaccactgaaggtgaggaaagagacaggcaggaaacataacagtggttcagggaagagctgttacttaaacccaggccttctaactcctgctctaacataatttcctaaactgcaagctacatccccctgacatttcaatctaggatacacatagcctcactttttatatttgctgcaagctactgttacctcagttaaagaggttagtccaaggctaaaaaaaccccacatattttaagtttcctgtttccttccctcagagttgcataagtatcagaaaatgttagaaccaccaccctcagccaagcccttcaccattgatgtggacaagaagttagaagagggccagaaggtaattaccaccattctctgtttaccaaactcttacctaaggcaatttcccacatccaacactctatcactggttcatgtgaagacaagatgttttttgtgcacagttctggagagtggctatttcactcagctgactagcctttctaattttacttctcttcaaatggctacctgacccctccagatcattatcctggttgctcttggccacaatatgattcctacttcccctttttcagaatataaggctgttgcggacagagcttcagaaacttggtgagtctctccaatcagcagagagagcttgttgccacagcactggggcaggaaaacttcgtcaagccttgaccacttgtgatgacatcttaatcaaacaggttagggcaaactatatacccacttctgtcctaccagcccactccagtgtatatgtgagaaaggaaagaggaccagaagaaaaaggtaaagatttttaggctgaatttatagtgagagcagtatatttgcaaaataaaaataactattctttgttaagcatttactaagtaccaggcactgtgctaagtaatttataggcattttctgtcacaaccaccttagggaggtagttactgtcatatttcatctaagatgctactgattataagaaaccattattttatgtactactaagaaaaaagtaacaatttctcatcagtaagatgcatcctgattccaaagagattaaaatgttaaaattgtgtatcttaaactaaactcaacatttaatttgacatttagagactgaggcacttagaaattaaatttactcaagctcatactaccttatgtgttagaagatgtcctattcagcactgcttatgttttgttctcagaaaatgtccccttattcagttataagctccgaccttaaagagttttaatctttgaagaaacagttgttagtaactagtaatggatggtatgtattacccttagccctctcgtttctctaatataccagacaaaagtgttttctataactttattgatcttccttaggaccagactctggctgaactgcagaacaacatggtgctagtgaaactggaccttcggaagaaggcagcatgtattgctgagcagtatcatactgtgttgaaactccaaggccaggtttctgccaaaaagcgccttggtaccaaccaggaaaatcagcaaccaaaccaacaaccaccagggaagaaaccattccttcgaaatttacttccccgaacaccaacctgccaaagctcaacagactgcagcccttatgcccggatcctacgctcacggcgttcccctttactcaaatctgggccttttggcaaaaagtactaaggctgtggggaaagagaagagcagtcatggccctgaggtgggtcagctactctcctgaagaaataggtctcttttatgctttaccatatatcaggaattatatccaggatgcaatactcagacactagcttttttctcacttttgtattataaccacctatgtaatctcatgttgttgtttttttttatttacttatatgatttctatgcacacaaaaacagttatattaaagatattattgttcacattttttattgaattccaaatgtagcaaaatcattaaaacaaattataaaagggacagaaaaattaagaatcaaacatcactctggaccatgggaaccttgaaaaggcatggcagtggagaccagtaactagtatacagcttgcctgagaaggcttagtaacaaatgaattcaagtcgtattagatattctaaaccttccttaatataagatgaagtgtcatatgttaggaggtaaaaacgtaacacaaaattctgggaataagaataaagtctggaccctgagctcagaatgatccatagcatctactgtgcaaatatattacagcagacattatagcatattacctcctgctgtacacacatgcacaggcctgaaactctccaagagcaccataagaatgattccctttacctcatctagataaaggctgaaaaaaatgtattctgttgcagatgggagggaaaaaaatagacaattacgttgaaaatttattaaaacagaccagcttgaagtgagtttattcttgtctgtataatcaccaatgttatttccaaatgtccgtgaaattatctataatcctatctccttgcttgctttggtaggagtatagctaacaatatagccatcttttgccctcagtaagggctatcagcagttccaagctctgtgagattatttttgcccttcttttattcaactctagttgaataaagttacttccaatttgaaagctttagaagacccccccaaaactgttttggaagattgtctccctagagagtaagaacaaatggatagctctattccatttaaacctaatctctgacatcagaatagggatcatgctcagcaaatccaagagcaaggtcatttgtatccattgctctgacttcttcctagggtactcagtgccctactgccagctcagggtagagtggcagactttcctcctttctttcactctcagcagcattgaaactttgttcctgtagcattgcctgtgctaaagtgctataaaagggactttcttgggggccaaaaaaaaaaagcattcagggaagaaggccaagatctatagccactctttggacataagtgagacagaagtacttctaactggcaagataatgtctgttcctgccaggattctgtcagttggcctctgaaggtaattatacaagctgtccctatggagctgttgccatctgtagaaacaagaagagctgaggtccttggaacagacgtgctgttctttacatggaggtaaggcttaattaagatgggtctaacaatgtgctggcttgagagtagccaactatggcgtgacagaagacaagttgagtggagaaactctgcgtgtgggggtattgttagcagagagtgaagcaggtaggaaaaagggagcaggcacctcggtggtaggagtctcgccttggttccgaagctgtaggatttgccggagtaaggccttaccttcttcccgggtctgcaacaaagtcagggaaatgtttcaaaacatgtccaaagctagtctcgaaaacaagttattaagatgctgttaaacaagttccacagatcaaggaggcgggaggcttgcttgttttttttttttgagatggagtctcactgtgtcacccaggctacagtgcagtggtgtgatcaaggctcactgcagcctcgacctcactgcagaggatcaagtgatcctctcacctcagcctcctgagtagctgggaccacaggcatgcaccaccaaacctggcaaaatttaatttttgtagagacaagctctcccttttttgtccaggctggtcttgaactcctggacacaagcgatcctcctgcctcagcctcccaaagtgttgggattataggtgtgagccgcttgcctggccaaggtaggctttccacttaaatatcttatgttctagcctaaaattcaaaccttttattaaagaactgatactcacatcattaaatgcacaacacttttgtgcacaagttgaagcttcatcccacagtttgcacttaaaatagtactgggccagatagcgaaaggcagtgctttcctccaagtgttctactatttcctagaaagggaaagcaaaattactgaggtgacagtaataatatcagcagtacaattctcatggtatgatacataccccacaggaatagatatcttggatatatttgatgtaacactgggcagcctgttctgactcagtcaactgttcatgaagcctacaaaagaaactgatctttaaataccaatgatatcccaaagcaacttagtgataaaaaaagtaaaagtacataagaccaaaaaaaacaatacataggtaagtatcaattttgacataaatgacactcttggaactagaatagtattagatgtgatagttactgttatcaaagcttagaatcattactctgctaatgatggaaggagagtcagtaaatattaatatctaagctagataaaccatccttgcaaaaattatctagtaatacccagagtaaagtggctcatgcctgtaatcccagcactttgggaggccaaggagggcagatcacttgaggtcaggagtttgagaccagcatggccaacaaggtgaaacctcatctctactaaaagtagaaaaattagccgggcgttgtgacacatgcctgtaatcccacctactcaggaagctggagcaggagaattgctttaacttggaaggtggaggttgcagtgagccaagatcataccactacactccagcctgggccacagaatgagactctgactccaaaaaaagaaaaaaaaaaaaaaaagctgggcactgtggctcacacctgtaatcccagcactttgggaggccaaggcgggtgggtcatcagagatcaggagttcaagaccagcctggccaacatggcaaaactctgtctctactaaaaaatacaaaaattagccaggtgtggtggcaagcgcctgtaatcccagctactcgggagactgaggcaggagaatcatttgaacccaggaggcagaggttgcactctagcctccgtgacagagcaagactccgtctcaaaaaaaaaagataacaagtggccaggcatggtggcatagggccataatcctagctactctctaatctggctgagaccaatgacttcaagaccaacctggtcatcacagcaagatcctatctataaattacaaaaaaaaaaaaaagataccaagcaactcaatttttttcctaagaatccagacaggaacctctttacatttaagaacctctttgcctactatttgagttattcctaatttttctggcccttagcaggaaattaatactgaaagtagtttgacacaaaaatgttatcctttcttcaaatcaatcttgatctcttgctttaataggaaagcaacggccctccttcaagagaagtagcattctctttttattttttttattttgagatggagttttgctcttgttgcccaggctggagtgcaatggcgcgatctcggctcactgcaacctccacctcccaggtcttgaactcctgacctcaggtcatccacctccctcagccgcccaaagtgctagaattacaggcatgagccactgcacctggccagaagtggcattctctaggaacaagatggctacattcacaaaccagcattcacacaccctgctacatccctacacctatgtagaatgatgggtgtatgggaggctctagaccatgcaggacccaccatcccagagaagccaacagaaatatcaatagcatttcactcctttcactcactttgccagtttcaccagagccattttctccacatctcccacggcgtaagctctccaataacactgtcaaaaaaataaactggtcattttgaccattgtcccatgtgtcacaactaaatcatatgaaggttaagaccctgcaagcctcccagaagttcagatttatagaatgcaagacatttttactagttctgataggtctaggctacacactgacattcccactgatgaccttggcccagctttgctttcagactatgtatctataaatattcagactttcctatgcacctagatcagaataagggaaaaattagagcacagatagcccaaccttcatctaaacagcagatttccactcaaattcttcaggacccaatttaaggtacctttttggcttccactagttgattgagtttctcgtaacattctcctaaagcaaccagcatgcgagaatcattgggtctgagaaagaagaacaggcagtctgagcaaagactttacagaaactgaagttctcttttgaggaaccagtacaccactatttcaaatctatgcaacaactggtctttaacctgatgctccatataatagattactttgtgttcataattatactattaacccattagtgaaatatactaaatgaaaataaccaaacagccttcagcaactttaacctcagatccccaagagccaaaaccatccactgtgatttgtcaatagctatcaaaagaggaaaaaaaagttattagcccttcccatatcagacgcattgtcaagtgaccaggcttaccgaagctggtgggcccgtctataataataaaggcagtaaaatggcatcttaaggatttcataggtctgcccgaggccataccaagctctgtagtcccgtttgttgacctcaatggcatgtctaagaaatggaaaagac

SEQ ID NO: 750 - DNA, 39119 bp, Homo sapiens
ttcctattgtgtaaatacatttatttatagagtaaaaggcttagaaaagatctaatggaattgtctttaaatcaagccgatggaacaaagatgtgggcaacatttatggcataaatccaaacctcagcttcccctttttttctttatattatgtccacatgcatctttgactcgttggttgtgagttaaggtattattcttgttggaaaagaaaatgaggacatggcaaagaagtaccaggatcctctctaggtcagagttccgggagagattcaaactctagaaaaagtcaggatagcagctccaggttagaaaacaggttttccatcatctactgggttagctggttctccttccagactacttgagccttttcttttgtctaaccagatattcagtacctaaagggttaaggaacacatagcaagctattatgaaccttaaacactaaagtattgcaagtttatttttttggcaaatagactcaactatacttttttctttaaagtatgatgctacccagaaaagaaacccacaaatgtcttctagctactatatcttatcccctaaagatgggaaagtgtgaacgtacattaataacaacagatgaagcaaccaaaaaatacacagtgactccagcctctttggagtttagcccttgacttgaggctctggaagcgggaattcccattacttgtctatcctcagctctcttgagagctcttcactgctgcctgcattcctagactacttcactatcagagctggacttactgaggctcagggttttccaaaccagcaggcacattatcaatccttcagggccttaatcacctttaaaaataaactctgagaacacagtcacctcgaaatcacctttattctcataggcgttctgaaatcaagattccagaggctacaggtatctgcatacagtacctgaatctgctccaggacttctcgccgcatctccacagccatatggtatacatgatgatcagagtcattgtacattacagcattttggaacatcagcatcaggtctcgcaggaattgggccatggtgcgaatccgacccttagagagatttctcttcaggctagttaagtccatgggtctgcaggtggccaagaaaaaacaaagaaaatcaaaccttcatgtggaacatatgataacctaacacgttctcttgaagaactaaccagttcttaatgaaaacagtagcaaagataacaaccctcatcagataataaaatagcaacagcagttaatatttgcctgtttacaatgggccaaacactgtatttctatactaactcacttaatcctctcaataaacctgtaaggtaggtatcattaatatctcattttttttttttttgagtcggagtttcactcttgttgcccaggccggagtgcaatggagcaatctcagctcactgcaacttccaccttccaggttcaagcaattcccctgtctcagcctccagaatagctgggattacaggcgtgcgccatcatgcccagctaatttttgtatttttagtagagatagggtttcaccatgttggtcaggctagtctcgaactcctagcctcaggggatccaccttccttggcctcccaaagtactgggattacaagtgtgagccaccgcccccggccttattatctccatttcacagatgaagaaattgaaatctaaagaggttaagtactcactgaaaggcacacagcctgaattccaattcagaggcagcctgactccagagcccacaggtcaagccactatattctactatcagaggaggagtgctggccccaggtatcaaagttgtaaagagcaccaatcatcagtttatcacacagtagttatttgctgtttacaatgtatagtcatatattatttcatctacttctcttactgcacaaataaaaagctaagaataatttttttctcctttcatggagatgaaaaaaggatcaagtgaatattaagacaatattaatgagacacagaaagtagatatataagagaaggcacagcagtgtagaaagaagactgaactgcaggtaagaatctggggcttagttctagctctgctattaactgttggttgatcacgagcaagtcatgaccaagcacctctgagctttagtttcctcattcctaaagaagtttgtctctgctgtttgaatgatggtatcattgtctctgctgtttgaatgatggtatcccctccaaaattcatgttgaaacttaatcccaagtgcaacagtattaagaggtggagcctttgggaggtaattaattcatgagtgctctgccttcatgaatgggattagcatccttataaaagggctccatatcgaagagagtgccctcttatccttctgtcccttctgccatgtgaggatacagcattcgtcccctctgcagaatacaacaacaaggcatcatcttagaagcagaagcagagagtaacccacctcacacaccaaaactaccaatgccttgatcttgcacttcccagcctccagaaccaaaacaaagaaacatagatttctattatttataaattatccagcctgtggtattgtgctatagcagcacagactagtgactctccaaaggtcctatcatgatcttttacattctattaccatacaggtttatgacagcattttagatgacctatgctataaaaacccaaaataggccgagcacagtggttcaagcctgtaatcccagcactttgggaggccgaggcaggcggatcacgaggtcaagagattgagaccatcctggccaacatagtgaaaccctgtctctactaaaaatacaaaaattagctgggcgtggtgacgtgtgcctgtggttccagctactcaggaggctgaggcaggagaatcacttgaacccgggaggcggaggttgcagtgagccgagatctcatcactgcactccagcctggtgacagagcaagactgtctcaaaaaaaaaaaaaaaaaaaatccaaaataggctaggattacctgcctgtaatcccagcattttggaaggctgaggtgggaggattgcttgagactacgagcttaagaccaacctgggcaatctagtgagaccccatatctacaaaaaatttaaaaattcctcctcagtgatattctgaagaaaaataaagttattaataacatttcaaacaaagaaaatattttattataataaaaatatcaggccaggcacagtggctcacacctgtaatcccagcactttgggaggctgaggtgggtgaactgcatgagcccaggagtctgagacaagcctgggcaccatggtgaaactctatctctacaaaaaatacaaaaattagccgggcatggtggcacacacctctagacccagttattagggaggctgaggtggaaggattgcttgaacctgggcagttgaggctcagttatccaagaaatgtgccactgcactccagcctgagcaacagagtgagacctgtctcaaaaaataatagtaagtaaaaatttaaaaaataataaatttaaaaattagctaagtgcagtggcacatgcctgtagtcccagctactccggaggctgaagtgggaagattgcttgagcccaggaggtcaaggctgcagtgaaccatgattgcaccactgcactccagcaacagagtgagaccctgtctcaaaaaaatttttttaaataaaaaataaaaataaaatcccaaaatactgagaggtgaagctggctgggcttctgggttgggtgggacttggagaacttttctgtctagctaaaggattgtaaacacaccaatcagtgctctgtgtctagctaaacatttgtaaatgcaccaatcagcgctctgtgtctagctaaagctttgtaaatgcaccaatcagcactctgtaaaaacgcaccaaaaaaggtttgtaaacgcaccaatcagcactctataaaaatggaccaatcagcactctgtaaaatggaccaatcagtactatgtaaaatggacaaatcagcaggatgtggaggaggccaaataagggaataaaagctggcccctcaaggcagcagtggcaacccgctggagtccccttccacactgtggaggctttgttctttcactccgcaataaatcttgctgctcctcactctttgggtccgcactacctttatgaactgtaacactcaccgtgaaggtcagccgcttcgctcctgaagccagcaagaccacgaacccaacaagaccacgaacccaacgggaggaataaacaactccggatgtaccacctttaagagctgtaacactcaccgccaaggtctgcagcttcactcctgaagccagcgagaccaccaacccactgggaggaacgaacaactccagaggcgccacctttaagagctgtaacactcgctgtgaaggtctgcagcttcactcctgaactcagcgagaccacaaacccaccgggaggaagaaactccggacacatctgaacatccgaaggaacaaactctggacacaccatctttaagaactgtaacaccacgagagtctgcagcttcattcttgaagtcagcgagaccaagaacccaccggaaggaaccaattccggacacaatactacaatcaaccaatgttcataacttccatttggatcgacatctgtgccttactatacctataactaactgaataaatacagggttccttttaaagttttgctccaaaagaatagtgtcaaaaacaaccaaaggctaatttaagattataattaatgatcaggctggacaccaaggctcacacctataatcccagcctttggaaggcctaggcaggtggattgcttgagctcaggagttcaagaccagcctgggcaacatggcaaagctccgtttctacaaaaaatacaaatattagccggacgtgatggctcatgcttgtagtcttagctacttgggaggctgaggctggagaatagctgagcctgggaagaggatgttgcagtgagccaagactgtaccactgcactccagcctgggcaacagagtgagaccctgtcaaaaaaaaaaaaaaaaaaaatatatatatatagaatggatcatattacttaaaagtcaatagtacaaaataaaaaccctatatcatccttttgttccctgcattccttcttaaatgaagatatgatactgagctcatcataactttataaacttgtttggctatgaaacatatcttgagtttgtaagttataaaaataatctaacagatgggaaataaaaaatgaaaaggcagatataaaagcaaccaacctttcttgacccctttttcactgaccttttcaccacatccttgtaccctggggcctgcctttctgacacaggcttcagaaatggactgctgaacctgttaagggacaaacccagagaggataaagaaaccctggcaaggcactctgaaggagaagagtagctcagttcttagtagacttcctttaggggaatgcagactgtcagcaccattaggaaaaaatctatttgttccctcttgccagagagttaaaaaaaacacaaaactataaaatatttcactattattacaatatactgatttagggctcagaaatttgttcaaagttcccaaggccctgtctctgtgaaaaaagagaatccaccagattgaaaagaagaatatacattttaaatataaattttatcatgtagtaggaaccaatttctagaggcaactcaaatggcacagcaactatttcttgtacagacttgtgaaagcagctgtgggtactttgggataaatcgggcttagatacagaatctacctttcaactatggctcatttgagggatgaacatatctccttttatgcttaaaccccaatatgtattactgcttcagctctgaacataatcctattaccactttggagacctacctgtgactggcaatcatcttccagactggcaggagagtcttcttaaatagcaaatgatcctgaacagggtcatcctggcttagatcagtcctatgaggataaaacatgaagaaaagagacagtaacttcacaaataatattctatctcccccaggtgggtaatgaggttttcttaagacatgctcctaattaatatctgaagctttttatctccccttatctggccaagcagacttagttattaatatctattgttttctcttttaattttttaattttatttttctgagacagagtcttgctctgttgcccaggctggagtgcagtggcatgatctcagctcactgcaacctctgcctcccgggttccagcgattctcctgcctcagcctcccaagtagctgggactaaagttgcataccaccacacccaactaatttttgtattttccatagagacggggttttgccatgttggccaggctggtctcaaactcctggccttaagtgatccacccgcctcagcctcccaaagtgctgggattacaggcatgaaccaccatgcccagccaattttttttttttttgagacagggtcttgctctgttgcccaggctggagtgcagtagtgtgatcgtggcttactgcagcctcaacctgctgggctcaagcgatcctcctgcctcagcctcccaagtagctgggactccaggcacatgccaccacgccctgcagctaatttctgtatttgttgtagagacaaggtcccactacgttgcccaggctggatatctactgctttctaataaagatttcatatttaatctaaattgtaaggtaagaatgtggaatttaccatccaagactatgaactgtcatgagataagatgtctcagattgggcccggtgtggtggctcacgcctgtaatcccagcactttgggaggccgaggcaggcggatcacaaggtcaggagattgagaccatcctggctaacacggtgaaaccccgtttctactaaaaatacacaaaaaattagctgggcgtggtggcgggtgcctgtagtcccagctacttgggaggctgaggcaggagaatggtgtgaacctaggaggcagagcttgcagtgagccgagatcacgccactgcactgcagcctgggcgaccgagcgaaactccgtctcaaaaaaaaaaaaaaaaaaaaaaagtctcagattgcagatttcctgctgtttgtacagtcacagtatgtcatctctgcactctattgctcatacttaaggagttaaagaaaagcaaatgaaggcattcctcaccaatctacattttaaactgtatcctatttgtgtaccaaaaattgaaatctaggctgggcacagtggctcaggcttataatcccagtactttgggaggctgaggtgggattgcttgaagccaggagttcaagacccagcttgggcaacaaagcaagaccctgtctctatgagaaaaaaaagaaatctgctcttcaaaaaatatatatatatatatatattcatatataaatatatgcatggttcagctgtatatcttaaacaaaaaaacactagaataattattagttttacctttccacagacaactgggtggatctgggatatactgaagaaaaaaaaaacagttcatactatattctctcaacagatggatctgacacaggctggaaaaagaacaatttatttattaccataacaaaaataactttgctggacgtagtggctcatgcctataatctcagcactttgaaaggctgaggcaggagaatcacttgaggccaggagtcacagataaaaacaactttgtttttctgctttaaaaagtaattcacttcatgccagatgcagtagttcatgcctataatcccaggactttgggaggccaaggcaggggatcgcttgagtccaggagtttgagaccagtctggtcaatgtgatgaaaccctgtctctaacaaaaatacaaaaaaatcagctggttgtggtggtgcacatctgtgttcccagctattcatgaggctgaggtgagaggatcacctgagcccaggaggcggaggctgaagtgagccaagatcatgccattgcactctaacttgggcaacagagtgagatcctatctcaaaaaaaaaaattaatatttttttggtttcctgttaaaaaaaaacagcccccattaagatttgaaaatgtgttatttagtcctataattatctatacaaagatgagacaattgcataaaccaggggtgtccaatcttttggcttccctgggccacactggaggaagaagaagaattgtcttggaccacacataaaatacactaacaatagctgatgagctggaaaaaaaaaaaaaaaaagaaaaaaaaaagggaaaaaaaaagggtcagtgcataaatctcataatgttttaagaatttgtgtttggccacattcaaagctgtcctgggctgcaggctagggattagacaagcttgacataaacaatcccctaagagatgtgaaaaagaaacaaagatcacaaacttcaaaataatttttttcttctcttttatttcttgttttgttttctgagacagggtcttgctctgtcacccaggctgtgtagtgacatgatcatagctcactgtaaccttcacctcccaagttcaagcagtcctcctgccttggcctcctgtgtagctaggactacaggtgcatgcccccacacccaataaattttgtttattttttgtaaagatgaggtttcactatattgcccaggctagtctcaaaatcctgagctcaagcaatcctcctgcctctgcctcccaaagtgctgagattacaggtgtgagccactgcgcctggcctaattttttctttaaaaaaaaatttttttatcctcttccttgtctccatcaaaataattttccatttcaagttcataaaatctattttaatatttttaaaagaggtatagtttgggccaggcacagtggctcaagcctgtaatcccaacactttaggaggctgaggtaggaggatcacttgaaaccaggagttcaagacaagcctgggcaatatagcaaggccagccctgtctacaaaaaataaaaaatcagctgggtgtggtggcccatggctgtattcccagctacttggaagcctgaggtgggaggatcccttgagttcaggaagtcaagctgcagtgagtcatgatcgtgcccattgcactccagcctgggtgatggagctagaccctgtctctattaaagaaaaaaaaagcaccatagtttgtatattaggcatagtttgtataatattagctccatcacccaggctggagtgatacagacttggctagagtacagtggcacaatcatggctcactgcagcttgacctcctgggctcaggtgatcctcccacctcagcttccggagtacctgagactatagacaagtgacaccatacctggctaatttttttttaatttttattttgtagaggcatggtctccctatgttgcccaggctggtctcaaagtcctgggatcaagggatcctcctgccttggcctcccaaagtgctggaattacaggtgtgagccaccacacctagccttgaaagacagtcctaatattgattaaacatatttgttttataacaggagagcatatagacttctatttatatgatgttaaaattatacttaattaattatattttttgtgttttccaactctaattttctttaacttataaaagtaatccatttcatgattcaaataggcataaacagaagtatgaatcttaacaaacttggatgaaagtctacgcttacagctttgaggaggtagcatggctgaaaagtgtatccaccaagggagtctccttaatgttaaaggcatcatcacactcgcctgaagggggctggtcttccatctctgacacatatacttcaccctggtcctcccctttggattcttgctgagcctccccctaggaatgccaggaaacaggaaactttagaaggagatttactttctgcatagtaattttacttgcatagagtaaatgaaggctgcccttaaggtgagaagaggtcaattacataaagctacaaaagaaattaaagaaagctgacttaactagatttaagttaatgagttcttggtaacaatcttgctggaggactttgactctgtgccactcacctccagcaaaatggaaaagcattatttgcccaattctcattggattctttaaaaaccatcatgatcacctgtggccctggagttaactactctagctggccagataattttttttttttttttgagacagggtctcactctgttgcccaggctggagtgcagtagcatcatcatggctcactgcagccttgcactcctgggctcccccgagactcctaagtagctggaactacaggaacatgccaccatacctggctaatttgttttttgttttttgtagagatggtgtctccctgtattgcccagactggtcttgaactcctgagctcaagagatcctactgcctctgcctcccaaagcactgggattacaggcatgagccattgcaccccacctgccagataatattaataatgatgacggtattctaaattttactgattgcttactataagccaggcactgtgctaagtgctttacatgaattatctcatttaaacctcacagcaatcccacaaaatagggtgctattattgcatttctgcagagaaaactgaagttctaaaatgttcactaacatgctaaaggtaacacagctaaaactggtgctaaatccaggatttggatccaggtagtttaactttctggagttagcctatgtgctctaactactctgttctgcttccctaggcagaagaccaacaagacagctgatttaagttaccttcttacctcttcactctctgtgagtagtccctgaactgtacaaataactgagggagctgaagccacctctggctttccattttctcccagtggcttttcagctactaaggggtctcctttagctgaaagctcttcagtctctctgcagagctccctttctccttcgctagctttaatttcccttccttcttgtctggtaccagatggagggcagcagccttcacttgattcgttgctgctgatgcacaagggctccattaaataagctacctgcaatcaaagtttattattagatgcacaggaacaccactgaaaatcatcatccacatatcaacaatgccacatgctaacactgtcacagtgactaagtctgagaggacaaaatggtttaattaatacaatcatctaaaatctgccaaaatatcttatatacacaggcactgggctggttggtggggacactacagtgaacaagaaagatatggttcttgcctcttccaggagtttatgttctactttttcatctcagctgtcaactctgatcaattgggagtggctgtctagaataaagtgttgaaaattttgtctaccacagacacttgtagagagaagtggcaacatttgaaatggatgcttgctgatcttgatctagggtcttctaaatgtgttcaataacagcatacatataactctctgtccaattctgtttatttctggtcctcagcccttaaccaaggtaatgacacttaaaaatactaccttaaagttacagcattttaagcttcaaggaaaatttgggcaagtataacttcccacaactccaaaagcatgaattacaaggatactcataaagcagtccttatgacccaggcccctaatgactgaagtattagaaattcagtcaaaaagcatgttttttttatttttaatttttttacttttgagacggagtctcgctctgttacctaggctggagtccaatggcacgatctcagctcactgcaacttccgcctcccgggttcaagcgattctcctgcctcagcctcccaggtagctgggattacaggcacatgccaccaagcccggctaattttttaattttaattttaattttaattaatttatttatttagagacagagtttcgctctgtcgcccaggctggagtgcaatggtgtgatctcagctcactgcaacctccgcctctcaggttcaagtgattctcctgcctcagcctcccgagcagctgggattacaggcgcccgccaccacgcccggctaattttttgtatttttagtagagatggggtttcaccatgttggccaggctggtcttgaactcctgacctcaagtgatccgcccgcctcggcctcctaaagtgctgggattacaggcatgagccactgcgcccagccatttttgtatttttagtagagatggggtttcaccatgttggccaggctggtctcgaactcccaacctcaagtgatccactggcctcagcctcccaaagtgctgggattacaggcgtgagccactgcacccggcccaaaaagcatgtatttggtgcatattctgtatcagcaccaagtgctgaggacatagcaatgaacttaatccctgccactgtggagcttatattttagtaaacaatattaagagtggtagaagcatgtaaggataagcattctcttagaaagttgaggcttttccagctttggaaataagagctcactgttacctcagagagaaagtggaggaggttctggtggctggctttccttgccgcttcctgagattcctcactgcctccatccccaacaagcagttcactaggttctctctccgggctgctttcctctagttcctcagcctctggatcctcagtttccctccagttgcccacatcaagatccagactggagtcccatgagctgaagagggacctgcagtcattgctcaactcagagtcattgggatgatcttgttcagaatccagccaaacccactcgtgtcccatctgtaaatacacaggaaaacatgcattaaattcattcaaataaatattcctgaggcatctccatctcccgagttcagtagaaaaataaggggccagaaatttatttgtattcaagtattcatcattaggaagaattaaaatcttgctgaagggagacatgagatgaaattatatttgtctttgggaataaagaaagccccatgtcagtataacagagatattgcaccatacaatacagtataatagagacattaatattacctaataattatttttacttggaattcctcatattcacaccaaaagaagggaaagaactggagcatagctagctcaattattttcctctagcccaaatcatccataactaaaccgtaaggcaaacaaattgagggggcaggggatattttcctcagtgtataaacatttttaacctatgaaccattaaaccttcaaaacacactttaggattgcctttggcatccttctggtcatatccaaattgatgttgagaaacattaagcttaaaatatatcttcccttgctctcattacaccactatcttggtttttttatatctttctttgtcctctcccttttacaactttcaataaatccctaccttctatgttcatgcttggtcctctgctttcttattaatgtattttaaaaaaatgtatatatactttgaggtttcaactttgacctctattcaggtggctcccaaatctctctacctttacttcttatatgaattctggtgtcatttctccatgcatccaaaagtcaattccctttagatgctctaccacctgctgtaacatttctaaaataaaaatcacatttcctttatctccaaaatcactgcttcttcccaatttccttatccccatcaccattttcttttcttttcttttttttttttttttttttgaacgaactttcactcttgttgcccaggctggagcacaatggcccaatctcggctcactgcaacctctgcttcctgggttcaagcaattctcctgcctcagcctcctgagtagctgagattacaggtgcccaccaccatgcccggctaatttttgtatatttatagagacggggtttcaccatgttgactaggctggtcttgaacttctgacctcaggggatccacccacctttgcctcccaaagtgctgggattacaggcgtgagccaccacacccgaccccatcaccattttcttagtctacagaacccacaattctgttttgacccttccttctcttatattcagtaagcaagtcctcttcccagttttctcccacaataagttttctcagtgtccatcctttcctgaataaatgccatagtctcctagtcagcttttctatctttaatcctatctgctctcaacaaatatagttattctactcaaggctttataacagctatcacctcaaatataaatttctcaatctgccaaagtcctccacaaatttagccttattttgttcccttcactcacatgtacacctccttattccttagtataatccctgttctaattacatttttctccgtattgccacccaccacccccaccagatgcctacaccttccattcggtttgctagtctcatttatcaccttctctaccaactcaaaacgtatgtcctttaatggaccttttccacacacttctcccagcttttagagcttgtgtttgtatctcatgcctgtttgcagactgctttgggactacaatgttattttttattttcctttcttgtttgcaacatgtccatgtaacaaggaatttcatgttctaactcctggactaattgaatacctttccattgcctcacaaagactgtatcttctcttccttagcatcctaatatagttctattaaaggcaaaaagatctgtgacttctaatcgtatcctcttaaacccttctcaagaagactttgactattagaccaggctccagtgtgacatattgtctaaatatttagttataaagtgatattcatctaatattttttcatcatagccatgtttataataaaaagttcataacttttttttttttttttttgagatggagtcttgctctgtcgccaggttggagtgcagtggcttgatctcggatcactgcaacctctgcctcccaggctcaagcacttctcctgcctcagcctcccgcgtaactgggattacaggcgcccaccaccatgcctggccaattttttgtatttttagtagagatgaggtttcaccatgttggccaggatggtcttgaactactgacctcaagtgatccgcccaccttggcctcccaaagtgctgggattacaggtgtgagccacggtgcccggcactatttcatttcactatttttaaaaatgttggcagggcgtggtggcttatgtctgtaatcctagcactttgggaggccgaagcgggtggatcacctgaggtcaggagtttgagaccagcctgaccaacatggagaaaccccacctctactgaagaaaccacaaaattagccgggcttggtggtgcatgcctgtgatcccagctactcgggaggctaaggcaggagaatcgcttgcacctgggaggcggaggttgcagtgagccgagattgcgccattgcactccagcctgggcaacgagagtgaaactccgaatttaaaaaaaaaaaaaaagtttagttggccaggagcagtcactcatcacttaaaaaaaaaaaagttattaacagaagttggaattgaactgagattttaaatttaggggtgttttttctctgttgcccaggctggagtgcagtggcatgatctcagctcactgcagcctcaaccggccagggttgtgatcctcccacctcagcctccaatgtagctgggaccacaggtgcgtgccaccacacctggctaatttattatttgtagagacaaggtcttgctatgttgcctagactggtcttgatctcctgggctcaagtgatcttcctgtcttggcctcgcaaagtgctgggattacaagtgtgagccaccgtgtctggccaaattcagtaattcttaaaactgggcttagccttcaaacagcaatgttaagaactatatttatttgagaaagggtcttgctctttcacccaggctggagtgcagtgatgcaattataggtcattgccaactttgaattccgtggctcaagagatcctccagccacagcttcccgagtagctgggactacaggtgcacaccaccatgctgggctaatttttttttttttgagaaagggtctcactttgttgtccaggctggtctcaaactcctaggctcaagcaaccctcccacctcagcctcccaaagtgttgggctattttttttttttttgagatggaatcttgctctgttgcccaggctggagtgcagtgacgcgatctcagctcactgcaacctccgcctcccgggttcaagtgcttcttctgcctcagcctctcaaatagctgggactacagacatgcgccaccacgcccagctaatttttgtattttttgtagagacagagtttcaccatattggccaggctggtctcgaactcctgacctcgtgatctgccagccttggcttcccaaagtgctgggattacaggcatgagccaccacgcccggccgccaagaactctttatacagagtctttaaccataaaaacaggaaaaaaatggtaacacactatcctagaaataccatctgcaaagatagcattaagtgagacaaatgttcctgaggtaagggtcaatgctacctatgtccatgctctaatcttctttaagcaatgccatgaacagaattctaaaaaccttacttttcccaaacattcaagaaaatctgagtaaggaagtctttcctgcgcaatgcaacaccttaaggtatattaactataaactcaattctggttgcttaccttctcacactacagcaagcagttcataagacttttcccctgtaacaatctcattcctacaaatgaaatagttatgcagaagaaacaagtttcaaatacacacacacacacacacacacacacacacacacacacacacagaacaagccaaaggctagttttttttttcagtttattgtatacacacacatttcactggtggttgttttttttaaaaagtctgtacaattgacaagacaatacaaactagctacgatctgctagctacacattaggacattaacatagcccatggtttctgccctaaaacaggcaattgtgctactccaactctctaagagagattttccagctcatgtcgtgtggcccaggtacctcctcttctgtaacttccacctctggaactgggcccgcaagcccaagctctatcttgtttacttttattttaggttcggctcaaagagggtaactctgaggcttcactttttcatcttcatatctgcttcaatggcacagcggcgtcccctggttcctccatcctagatgacaggcagagaaagaaagggagcatgagttggtcaggagacaagagacggtgcaacagaaaagttggggatttggtttcttgggggagagggaagagaatcagcagaaaaatccagagggatgaggggcatatttctgtcttcccacagagtggctaaagaacacctggtagtttgtgagaggaaatgtaggatggaatatcttgctcatgcccactacagaggtccttggaattcacctagggtcccacagaataactattagtcatcccacccaggcccaaatcatgtgcaaaggagcaggagagtaaaagaaaggtaggagagtcagaatgggcaatgggtagtgaggttcttgactaacatacctgtccaactgttggtccctataagaaaggcctttcctgcagactgaccctggcactagttccctagcacctcctgacagtggttttccatgagatcaggacaattagaaggcttctttccatctgctgctctctccctgcagcccagctccttcctcttgtgcaatattttgctgtcttcaatagataaaagatcccattaaccagccttgcaatagccagccaaatgctttgcttgggggatccagagtcactgttgtaggccaataagaaagaacggagattataatgttctgtctgtggtacagcctgtaggcaagatgaattactgaaacctttgctgggccaggccatttttacatttctaatatgcaaggactctaaaatttttagagtccatgaacataagttgcccatgaggcaacagtgaaaataaaaaggtggtaaccttgcatgtgtataatgcttttcttttttttccaagccagtttcatatctattatctcattttatcctcacaacatccctgtgaggtaggctggacaagtacctcattatattagcttcatcacacaccaaggaaaacaatgccccaagagattatccaatgaccttaagaccatgtagttttctagcctgatgcccttccattacatcatacctcactgtcccataatgaacaacacagagtcagagccagttaatttatggaggaaagtaataaaagtctttaggctagctctcctaagcttatctgtaattccagcagccactattgatgcagtggtcacttttttttttcttttttttgtttgagacagagtttcactcttgttgcccaggctggagtgcaatggtgcaatctcagctcacggcaacctccgcctcctgggttcaagcgattctcctgccttagcctcccgagtagctgggattacaggcgtatgccaccacacccggctaatttttttttttttttttagtagagacggggtttttacatgttggtcaggctggtctcgaactcccgacctcaggtgatctgcccacctcagcctcccaaagtgctgggactacaggtgtgagccaccacacccagccacagtggtcattattactgagattgtttttttttttcttttgagacaaggtctcgctctgtcacccaggctggagtgcaatggtatgaacagtgcagccttgacctcctgggccccagtgatgctcctaccttgccttctgagtagcttgtagttagggaccacaggtgcgcaccactccgctgcacagctagtagggttttttgttgttgttgccgtttttaaattttgtagagacagggtctccctacgttgcccaggctggtctcaaactcctgggctcaagcaatccttccacctcagcctcccaaagtgttggaattatagacgtaaaccaccacacccagcctatactgagttctttagcttaaattttactgtttgttacattagtcttgcaacttaattttaggagacaagagaaaaactatttgctgagtactgccattatgagaaacactgttaaaaagccagctagcagctcctgctctgaccaattttaaatttgttaagaaaagaattggtaaaaggtgaagtcaggaaatgacgagcaggtacatcctagatccttcacccctagaatacatttcagcccagtgatctcaaaaacagtccctacccagcccacacacacacacacatgcagaaagacaggaatgcagaagaaaagagtttcttattcaatgacctgaataaacagaagttcaagacactgccacagtctgcatgttggatttccctctgccacccacccccattaagagctgagaatctttgtggcaacaccaccccttgcagccattcaatacttacaaagagagagagaaggaaggcaggagagcccattgggacactgtcctgttagaggacaaacaaacactgatcaggttccacagaaactctcagccacaagcaccccaaacctcaggacagagacacaagcaccacacacacaaggacaaaattttaaaactcaagaacaagaggaaagagatccaaaagcaatctgtccattacgcctctagcacagaaactgatggtccccaactgctgcaggctaagccatttcccccgccttgagagcactctcccagaggaattaataattcccctactcatgatttctcccatgtgactgggcctttcggttacaataggcttattcaacgtttagatgggtgcaaaccaccatcattctaagatctatgtgtctgtatatcattggaatctagaagcccaataccaagtagtaacataagggtccttggatgcttcagacttctactactggaacactggcacacaggttccttcctgatcgcctcaccttctctgaagcatcctgtttgcgggtagaatctctccctcgaagacttttagcactgatcccagactcggatgtttgcataatcaactgcgtggccaagaattgctgtagggagaagaaacagggtaggccatggagacctgatttagtagggacaaattaagtacactttaagcactgtaaatagaactttgtatagtactcttctggctcaaatatattttgactgattggaagtttagcatattaagttttaattctagttgcaatagggatgctaaagaatcaagcagccctaacttttttttgctataacataggatcaaaatctctatcctccaggaatgagaaaaataataaaactagaatgaaccaaagatcattcagcaatttaagtaatttgacaaatcgtgcaaagatttgcaatattcttccaagttcaacaccccaaaaagtacctggtaacacaatcataggataaaagcagggaaaaggaaaggagaaactcttatttgctgatcacctactatgtaccaggtacttaatgtaattaaaaaatatacattcaccatttttaaaaaattttatttaaaaactttatgaaactgcaaataattgcccaagaaaggtagaatattgtatcacaactctttcaccacaccaaagaaaataaaagtaagaacaaaatattatgttttcaattgtgtccctgacagctatccacgtaaaagccacagcaacccttcttggcatcaatatgaatcctccccttgaagtattttaatttcatccttgctgaaacacaaaggatcctcaaagtacctggatctgttccaagacatctcgctgcatctccactgccatgtgatagacatcatggtctgagctattgtacattacagcattctgaaacatcagcataatgtcacgctgaaattcagctgtgcttcggatcagtccattttctatgtttttcttaatagttgacaaatccataggcctaaaaaaaaagaacaggggtaagtagcagtggggatggaaagaggacgcacctagatctatgaatacattatcatatagactttctcatatataccttaactcccagctgccaggacttaaatgctaaccccttatcccaaaacatgcacttaacccaagaaacaatctatataataagcattgagaaaggtaataaagggagtttatttaggttttttttggagacagggcctggatctgtcactcaggctgtagtgcagtggcacaatcatggttcactgcagcctcgaacttccaggctcaagcaatccttggttcactgcagcctcgaacttccaggctcaagcaatccttcccacctcagcctcccaggtagttgggactacaaatgcgcgacaccacacctggctaagtcttgtattttctgtagagagggggtttcgccatgttgcccaggctagtcttgaattcctgggctcaagtgattcacccacctcagcacccccaaagattacaggcgtgagccaccgctcctggtggagatttattcttttagactatcagtggtgatctagccactggaattatcagtttagcactcagtgccccttatagcaaaaccataaacttacttgctttaaactttctatcgaaagcaaaacttcactaagactggacaatttataattcaggcaagttaccatgctgggtggaccatggctcacctctgcacaatgctgtggtagccaggtgctatgtcatctgtaacaggctgcaggaagacattggcatacctgtccaaaaggaataaggtgcaattactgacattctccagaagtgcagggagggaacttactctaagtaactaaaggtagtaagaactaataccagcagttccacagaagcctactcagacttttttccagtcaccaacaatgaagagtaggagaaaatgaacctactgactggtaaagcccactcacctatgattagctgcagctctccatacaagcatgatggctttcttccaaattttctgtgcctgaatagcttcctgatcctcactacagacagagctgaaacagagatacagcaattccactaggcacaagttaaaaaataaaaattataattctcttttctttttgagacagggtctcactctgtcccccaggctggagtgcagtggcatgatcatgttcattgcaccctcaacctcccagactcaatcctctcacctcagcctcccaagtagctgggactataggtgcataccaccatgcccagctaattttttaatttttttgtagagatagggtctcactgtgttgcccaggctggtctcaaactcctgggttccagcgatcctcctgccttagcctcccaaagtgctgggattacaggtgtgagccactatgcccagccctaattatttcttgtcagctgtttattccaggtcaaaaaagggaaacactaaagaaaagatcaggccaggcatggtggctcatgcctctaattctactgctttgggaggtcaaggcaagaagactgcttgaggtcaggagttcaagaccagactggaccacatagatcctgtcccttaaaaaaatttttttaaaataaaaatttaaaaataaagaaaaaggccaggcatggtgtctcacgcctgtaatctcagcactttgggaggccgaggcaggtggaacgcttgagctcaggagtttgagaccagcctgggcaatgtagcaaaacttggtttctactaaaaaaattttttttaattagcagggtgtggtggcacaggctggtagtcccagctactaaggaggctgaggtggaaggattgcttgggcctgagaagtggaggttgcagtgagctgagatcgcaccactgccctccagcatgggtgagtgagaacaagaaaaaagagaaggaaaggaaaggaaaggaaagggaaaagaaaagaaaagagaaaagacaggaagaaagacggaaggaaggaaggaaggaaaagatcctctcctcaccttcactgccttggcctcaaagaaagaatctcagatactcacaactgtgaagaagcagggctgctggggatggagtctgccagtgtgtgtgactgcagtgtagcattgtgtatgctgaagccatcatcactctcgctcacaggaggttcattatccatttctgacaagtagccttctccttgatcctcttccttaggctcctctaggctggccgcttcactgacaccatcttcctcctcatcctcacctggggcatccttagatacagtatgctccagttaacaaatgcaagcaaagctatccagcaaagcatcattaaacatgatctgtcttttgggttagaattagttctagaaatgacctcacgctgtttcctgactcagctgtctatcacttatactaccatctacttacagacactgcgttaagtaatttagaacctggacaaagaataatacccaggatcttttaaaaagaaagaaaaaaaaaagctacttacttaagactaagctaagaggcgttccttctttccccttgctcgagagtaactctgaccctgggtacaaagttatcaaaaataatttttattttgtgtctcatttgatggagcaagctcacatcacattctttaagcctctgttactgctgctttaataattctaaaaagaaaactctggatgattctctttggatagtctaattaataaacttgattcctgtatgttctccttggctcaggtatccttattcactacaaatcactctaagtgtatcaagccttcttaaggactgtgtgatattcacatgctgtttcatatgggaggcacctgttgctatagtactcccattatgcctgtctactgcagcttttccccatgcaactccataccagtctcttatcagagaataaagatgtgactttactgaaattcattaaaaagtagtgctatagggaaatctaatcacatggcaagaggaataaagaaaagtctgaaatacctttatctggcttccaaaaatagtccctgattcttctttcaatgagtctgcagaggagagaaagactacctgaagatttttccaccttagccttccccttcctatggaccataatcccctgcagctctcctttacatgctgacctgttctacctcctctacttgcccacaacccacaacccctcagaagccaaagcaaatgatttcaagtcagtgaaagaggactttatttacctgacatttcaaacttgtgctgagtctctgcctctaaaggatcttcaatgggatttgagccatgtgatggagacaacatgctttcaggggatgcctgaaaaccagaaaagaaaaaacaccctaagtactgataaatcgctatagctcacacaactttattcttcagtgataatgagaccatagaagaaattctaagtcctactcatgtaatgtgactccaatggtcaccttaacaggaataagtatatataacactaatcacagcctatgggctttggacacatcaaacatgtcagaactcaggaatgcaactggaaaaccaaaaagcctaagctgtcacttcttatctaaggtataaacctccatctccccagccccgatctttcttaagtacctctgtcttcacatttgtaagtggagtctcatcgcctttcccaatggcaacatctgcttcaacaatctctccagctgcagtacttcccagttcctcatctaagtcctgactcctgagttctggtggctccatacttgtggctggaacaactccagctactatttcggctcctgaaatgactggctctggttctgcaggttccaccttgatctctgcactgggctccctgatgtccaccagttcatgtattcccttgttttccgtttcctcaaagtccagtctctcttgcttgaccgtcatttctggtgcagggagaggtactggcttgtcccgctcctgctggataggatgctcccaggggccaggcagggactgaggatcatcattttcttcacaaaatgacagtgctgcttccactgctgccacatccagcacttcaggatgatcatctacctgtcccacaaaacacaagactattgaggtcacagaaagaagcccaagtccttcaatttttgttagcaccaaatgtgatggcttgaatctgcagcttttcgctccattttttccatgtagtggaggcaaacaatgaagaggcacctgccctgtgcaaaccagtaacatgggtagacctgaggagatgactagtatgttagcaccaaagggctacaaagatggagatgggcagaagtaggagagttgtttaagtaattcttactgtaagaagcaaagcagccgagtatggtggctcatgcctgtaatctcagcactttgggaggccgaggtgggtggaccacttgaggccaggagtttgagaccagcctggccaacatggtaaaactcatctctactaaaaatacaaaaaattagtgaggcgtggtggcatgtgcctgtagtcccagctactcaggacgctgaggcacaagaattacttgaggctgggaggcagaggtaacagtaagccaagatcgtgccactgcacttcagcctggatgacagagcaagactctgtctccaaaaaaaaaaaaaaaaaagcagcagcagcaccaaagtgaggctgaaaagagaagcctatgtaggacccatgagattctctggggctttgctgaatagttaccttgtcctcaatgatggcaatgatgtctccaacagtctcaaaatccagctcttcacctgtgtaagacacagcaatatccatcttctcagccagatctaattcttccttcccatctatgctgggagcctttgatccaacaggagcctctgctacccctgatcgaaaacactcttctttgatagaattgatgatcatggatatttcactgctgtccatggaaacagtcacagtatgtggatcccccacagcctccatgggaacacagttgtcgggttgactcactgagtaacagaaagagaaaagcatctcagaagcttattgggtacaaagcgaccaccttgagatcacataagcgctacagacagatgtcaaatatccaaacacttaaggtcagaaagagtcatcaacatgtgcctatgttttcttctccccagttttatctagaaaggtgagaacatattttcaagcctgctcatatctgtatacttagcctcttcctgcaatacataaatgcccacccacctcttctcacatctatttctaaggatatttatttctaaggataaagatggcacatgtctatgtagaacagagaagaagcatctgaatcggagctgatgctcttggtcatttttctctaactaaagctcaaaatgaaattttagatctagtggctgctcagggacgcacctggagctacactttcagtagtggagacagccggagcagaggatggtgctggcagcgcaggcatcatgacaatggtagcttgggacacagactctacagggggtggcacaagtttaactggaggctcactggcaacagtagtgaaggaagcaagaggtgtggtgaactgtgtaggaccagcttctaaaagccgggaaagagtgggagcacctaacatataaagaggtacacaaaatgaagtaagaagaaagcacataaataagaagcaatagctacttgaagactcaactaagaaaattcttatggtctcaaaggatgagagcaactcctgcattgaataagttcatcatctatatccttactctaaccttacttaagatcttcctccaagttaggaatgaaccaaagcactagaacacacaacatatataaaaaatgggtggtaaggctaggtgcagtggctcacgcctgtaatgctagcactttgggaggccgaggcaggtgggtcacttgaggtcaagagtttgagaccagcctgggcaacatagcgaaaccctgcctctactaaaaatacaaaaaaaaaaaaaaaaaaaaaaaaaaaaaaattagctaggcgtggtggtgggtgctgtaatcccagctattcaggaggctgaggcaggagaactgcttgaacgcaggaggtggagattgcagtgagccaagattgtgccaccacactccagcttgggcgacagagcaaggctctgtctcaaaaaaaacaacaacaacaacaacaaagggtggtaatttttcctcagaggaaaattaatcaccaagaaacgaaaaactggtatgaataaatctgtcgcttctgctgaagttcagcatattgtaaaccacccaagttcaacaccattcaaataccaataaggtttgtatggtattctatggagctttttttatttccctgctttatactttctacctcattaaattctcatcacatccttgtgaagtatatatgttacaataaaaaaggaaactgaggctcaaaagctaagttacctatccaaggtcacaaaaccaatgtgtggcaggcctgagattcaagcccaattctctggttccaaatcttattccactattctataatcttaggtatctctagcaccttgattttgcaagccctaagaaagcagttcaatattactctcaatatccatgctgtggtcaatcagggctatcactatcttgaagatagatggctttataatatggagactacattgtttaccaggtaaagtagctccaaaaaaaagttagaaaaagttgggctttaaatctagcactgacaactgcttagtaacagtgaaactgaggtcagtcaatgtcaagttcaacacctttgaggttgataaaggaaaagtggtaacttacctgatgcagcaggggaggctgcaacagtattgggtgtttgctgtatctccccaccatgtatcatgggaaggaccccgcctacctccaggaggacacctgtactgttcaggtggccagaagccacagccatttcactctcattgacctaccagggaagaatagaggtgaaggctacactcaagctttccttcactaccatttcccaacaaagctccagcagttgatcaaacttcatgaaaactaatagctaatatccacagagaataatttaagacccaagggaaactctaaactataatgttcaaaacttatttgacaagagttctctggagaagagaaccaaaataattgtgattcagatacctcaggacccatgggtactatcaacttactgtatttttaaaaaattaacatttaattaggagatcttttcctcttttgaacttttattccccatgtcacattttaggtcccaggcactcccttccaagtactaaatcaccacagctctcaaacacccacagaagtctccataccagtctggggctagtaggcaggaggctgcccttcttcaagagctctgacagcagaggggaggggggtggagttgctttctgtccaagcatctttttctggggtgaatcatctgttactggggtcatgggggcttctaagggtgcagagcctggaggaagggtgtcaggaatcccaggaaacgaggtgactggggtactcggcaaagtcccgggggttacctaagagacaacagagaacctttatctgacttctcaaactatggaaggttccctactaatctgtatgggttagtgtgtctaactattattttattagtcctgagtggaattgcccagaaaccctctatccctcctgctcttagccatacttttcttccccacaatcttctctttcatccactcaaacccacagtgactcaaccatcccacccaacctgccttttatgaactccttacccactaccaatattacatttacaaggattttgtcccttatttcagcaggaatttcataagactagtatgaaacaatttcttaaaatagttttttacctatctctcaaaaaggtcaaaagcctcaatgcttttaggtccgttcttatctcagagcacagaacatggtaaattaagtctttagcattcagatcaagagaggaagttgcctctaggccaaaagtggtttcctcatcgctcagctctgccggcttattgccccttcactgatcaattcccacagatggaaatatactcaccccagaggtagcctcttccatagtggttggagtcaagtccccaagtggataatcacctcctggggaggcagaatctataggagagcgaaccatcacagtgggtaacctccgggggggtgtttttactgcttgacgagctagaacataaaagagaacaatgtccaaatcttcaagattaaataaatgaaacttgacactagtctgctattatacaataaaggacaaataggtatgttgcattactaaagcagcataataagtttggattagaaagctttaacacttctagagatggataactttttagcctaatttttcctaagggcaattctcacactaagaaactcctttaacaatctcaaactacttaattatcccaaaggtccttggagtgggaaagtagtttaaacatcctttaatattctctttagcaacttactaatattctgcttttaagaacaggaaggccaggtgcagtggctcacggctgtaatcccagcactttgggaggccaaggcaggtggatcacctgaggtcaggagtttgagaccagcctgcgaaaccccatctctactaaaaatacaaaaattagctaggtgtggtggcagccgcctgtaatgccagctactcgggaggctgaggcaggagaatcacttgaacccgcgaggcggaggttgcagtgacccaagatcgcgccactgcactccagcctgtgcagcaagagcaaaactccgcctgggggaaaaacaaaaaacaaaaacagggaaagacctcactggcgcacagcatgtattcctagagttgtaaatgcttaaatttctcctcatctaatgactgagctattctcaatcttttcacaggcccttgacttctaaaacattatgttcaatatctcatcaagcctttgtgtcctgaagttaatttaaggtctagtgagatctgagcacaacgcatgttctaggagtttcttcttaagacattaagggatgtttttattctggtagaagagaaaactgcaagtaaatttaaatcaatgtattctatgttacaaaacagtccaactgtcattagcatgcagtactgtgcaatcaattgctaaagaggcatactaggttcagcttaccctggtatgcagcatctgtagccttcctctttacttcagcctcctcttcttccaatttctttttcctaaacagggaattaagggttagatgctagacagctctggctcctccccagagttcacagaacccttacaaagtaattttttttgccaggccagcactttctggaagaaaggcctaaacaggaattctaaccagcaaaacagtgaattggggtatactgcctaactcccagttcttcacccaggcaaactatagccactcttaagttagaactaagttatgttttcatactgaaatgtcccattatattaccttctaggactcactcccccctcccagccaccaaaccactttgcagctttccccttccagaatctgtctcaagtctaaagggacggcaattggaggaaataagccagattacttgaggggaaaagagggtaaaaagaaagaagcacagaagaacaatataatataacccacgttgcaatgtcattgcaaagctcatccagtctgctgtccatgtgtccagcttgaattagttctgcatctctctttagccgtctataggaagaaagagaggtaggtagactgggttttttaatctgctattttaaaagttctgaccagtaccagaagacagtcccttatgtctttctcaattttttggcattctctctgataagtacctatatctctcctgggtttcctttatcactttctttagttcttcaactcgctcagcagtcaatttccgaacaataacatcttcaacagtttccaccacttctcccttttcacctcgtttccgtctgtggaaaattgaaaaaaaaaaattcatattcaaataacataacatttatcccctctcctacttgcttttaccacttaatcatagataacttctgctattttttaatcatccagtatcataactaagtataaaccagaattcctcagtaaatactctccactaaagaaatatggctgaagtacctggctttgtactcactttggtgtctcagtggtctctaaaagctccgagtactgggaagcacaatgctattaaaaaaaaaaaaaaagtgaaaatgtgatgagcaaggctggaaagaaatgacctttcaaagtttcaagagattagagtaagatttagagaagagaactatatgtaagacgggagtggtttactaggagggcaagtaactttataatcaaatcagttcaaaataatcaaaacaagacacagaaaaagacagtcttatggactggagtttgtgcatttgcggaaaggcaacctaactgccaatatttatagctaatatctaccaagtagttactacatgcaaggcactgtgttaaatgttttacatgtattacttcaattagcttcacaacaatcctgaagcaactcttttatctctattttacaaatgaaaaaacagaggatcatggcccaaagtttttagatggagtaataatgaacccagatctaattcccaagcttgggctcttaactgttatgcaacaccaataagaaaggtctaatatgatcatacatggatggattagcaaacagtaggaaaaagaaaaaggtattctcaactattttcccacatcatggtataaaagctttgtaactaaaagtcagggcctggtagagaacctactttacaacccaaagactgctctaaaagagcccttgcttgggaacttactttttgagagaaccagtctggagggcggccaggttctgcaaagggcttgattgctctgctaactgataccctacaaaatgaggaaagctttattacacaccaagcagaaaacaataggagaggtatgctgagagtgcaaggcttggagttcaaactttggaataaaaaagatgcgaatggccaggcgcggtggctcacgcctgtaatcccagcactttgggaggccaagacgggtggatcacaaggtcaggagatcaataccaacctggccaacatggtgaaaccccgtctctactaaaaatacaaaaattagttgggcatggtggcatgcacctgtagtcccagctactcgggaggctgaggcaggagaatctcttgaacacaggaggcggaggtcacagtgagccgagatctcaccaccgcactccagcctggggacagagtgagactccatctcaaaaaaaaaaaaaaaaaaaaaaaaagccaatgaatgcgaggtgtgcaatggaccgtgcctgtaatcccagcactctgggaggcagaggtgggaggacagctcaagcccaggagttcaagccacccgaggagatcccatccctacaaaaaaaaaaaaaaaaaaaaaaaaaaaaatcgacaaggtatggtggtgcgtacctgcggcctgtggtcccagctacttgggcagctgaggtaggaggatcccttgagcccaggaagtcaagaggctgcagtgagcccaaatcgcgccactgcactccagcctgggtgacagagtaagaccaccccctccgccattcaaaaaaaaaagaacagcatatatagtatataatcatttgtgttagaaaatgagggggatgaaggggaaaaagaaaatatttgctcacataaaattttgctggagagacacaagaaactgctaacactagtagacgggggatagtaacgggaggaagacactgcatataattttgaatcttatgacttagtatctgctgataaaataataaaatttaaaacttttactcaagtattcttatactatttttctatggctgggcgtggtgactcacgcctgtaatcccaacacttcgggaggtcgaggagggcagactgcttgagatgaggagtttgagaccagcctggccaatgtggtgaaaccccacctctactaaaaatacaaaaattagccaggcatggtggcgtgcacctttaatcccagctactcgggaggctgagccaggacaatcacttaaatccaggaggtggaggttgcagtgagccgagatcgtgccactgcattccaacctgggtgacacagtgagactccatctcaaaaaaaaaaaaagattcttaacactatttatctaataaaaatgtgaggaaatatacagattagattctatttcaaaccagtttacctgttttgtttaaaaatgagctcaatttatatacatatacaaatatatgtgatgtgtatacacacacacacacacacatacaaaacacacattgtttttgtttagacagtatctcactttgtcacccagacttcagtgcagtggcacaatcatggcttgctgttgcttccacctctgaggcttaggcaacctcccactgcagccccacccaagtagctgaaatcacagatgcaccatcatgcctggctaattttcttttttgtagggaacagtttctcttatgttgcctccctggctcaagccatcctcacacctcagcctcccgagtagctggaactataggcacacaccaccagacctggctagtatttttgtgtttttttatagttttgtcatattgcccagactggtctccaattcatgatctcaagcaacctcctgccttggcctcccaaagttctgggattatagatgtgagccattgcacccagccccattctattctctagttctgtgaggtctataatttttcctagattccacatataactgagatcatatggtatttctttatgtgtctggcttatttcactttacatactatcctccaggctcaaccatggaatcacaaatggaggatttaattcttttttatggctcaacagtattccattgtgtgtgtgtgtgtgtgtgtgtgtgtatacatatatattttttctttacccattcatctgttaatggatactataataattaccttaattgtggatagtttcacaaatgtatatatatttcaaaaataccatgtcttatgctctaaatgtgtgcactggccgggtgtcgtagctcatgcctgtaatcccggcactttgggaggccgaggcaggtggatcatctgaggtcaggagttcaagaccagcctggccaacatggtaaaaccctatctctaccaaaaaatacaaaaattagccaggcatggtggcaaaggcctgtagtcccagctacacgggaggctgaggtgggagaatcacttgaacctgggaagcagaggttccagtgagccaagattgcaccactgcactccagcctgcgcaacagagactccatctcaaaaaaaaaaaaaaggtgcagtttactgcacatcaattatatcacaaaaaagttgttaaaagggaagagatgtgacttttcttaccaacccccttccttcttgttgcatggaacaaggatgtgatagctgaaggtcaagcagccaccgtgaaccataagataaccagaagataaactatgcactgaggaaggtggaacagaaagagaatatcctgagcctctaatgtcactgtgaagttgctatgagagctgtggactgcctagacttcctgtatgtgtgacaaaaaataaactcaagttttttttttttttttttgagatggcgtcttgctctgttgcccaggctggagtgcagtggcacgatctcaaatcactgcaagccccgcctcctgggttcacaccattctcctgcctcagcctcctgagtagctgggactacaggcgcacgccgccacacctgatttttgtatttttagtagagacggggtttcaccgtgttagccaggatggtctcaatctcctgaccttgtgatccgcccacctcggcctcccaaagtgctgggattacaggcgtgagccactgcgcccggccttaaacttaagtttttaacccatttctttgttgctattgctttctatatagtgtttttgtttttatggtggccacatattacttcaaaaattagatttaaaaaacaaacaaaaaaaatgctaggaagcatgacaatcagcaaagtactgaattgtttataaatgtggcaagagagttaaattcataatggatgattcaaaagaaagggggtgaggggctgataccgagaaaggtaaaatgatgatagttctaggctgggagtgatggctcacgcctataatcctagcactttaggaggctaaggtgggaggatcacttgagcccaggagttcaagaccagcctgggcaacaagtgacaaaaaacacaaaaaattagtcaagcatggtggcaagggtctgtattcccaactactcaggatgctaaactgggaggatcacttgaggccaagagttggagaccagcctggggaacatagtgggacctcgtctctacaaaaacataaatatttaaattaaaaaaaaaaaaaaagttcagcctgggcaacatggcaaaaccccatccctaccaaaaaatacaaaaattagccaggggtgatggcatgtgcctgtagtcccggctactcaggaggctgaggccggaggatcacttgagcccaggaggcagaggttgcagtgaaccacgatcgcactactgcactccagcctgggtgacagtgagaccctgtctgcaaaaaaaaaaaaaaaaaaaaaaaaaagtcaaacataataaagttactacataacccagcaatttcactccttgaataaaaaactcaagagaattaaaaacattgtccacaaccttgtacacgaatgtgcacatcatcagcattattcataatggccaaaaagtggaaacaacccaattgtctatcaagtgatggataaataaaacttggtatattcatacaacagattattattcagctaaaaaaggaattaagtattgatacatgctacataagaatgaaccttaaaaagtgttatgtcaagtgattaaaaaaaacaaaaaaaagtccagaagagcacgtatcattccatttgtatgaaatatccagaataggcaaatctacagagacaagagagttggctgggtatggtggctcacacttgtaatcccagcacttttggaggccaggactggtgcattacttcaagaccagcctggacaaaacctcatctctactaaaaatacaaaaattagccaggccactcgtggcgcatggctgtaatcccagctacttgggaggctaaggcacgataatcgcttgaacctgggaggcggaggttgcagtgagccaagatctaactactacactccagcctgtgtgacagtgagactctgtctcaaattaattaattaattaatagaaagtagatgagtgcttgcttgggggtggtgaggaggggacaacatggactgacagttaaggagtaaggggtttttcttagaataaaatgttctaaaattagattgtggtgatggttgcacaactgtgaatatactaaaaaccattatattgtacattttaagtaggttaattttatagtatgtgaattatatctcaataaagctgtttaaaaaaagaaatacagctggcctggtggctcacacctgtaatcccagtaggttgggcggatcgctcgaacgcaggagttcgagaccagcctaggaaacatgatgaaacccccatctctacaaaaaaataaaaaaaattagctgggcatggtggtgtgcacctgtagtcccagctactcaagaggctgaggtggaggatcatttgagcctgagatatggaggttgcagtgagccaagatcacaccactgccctccagcctgggccacagagtgcaatcttgtctcaaaaaaaaaaaaaaaaaaataggcctggcagtggctcacgcctgtaatcccagcactttgggaggccgaggcggacagatcatgaggtcaggagattgagaccatcgtggccaacatggtgaaaccccgtctctactaaaaatacaaaattagccaggcatggccaggcgcagtggctcacacctgtaatcccagcactctggcaggccgaggtggggggatcacctgaggtcaggagttcgagaccagcctggccaacatggcgaaactctgtctctactaaaaaatacaaaaattagctgggcgtgtccgcaccactgcactccagcctgggcaacagaaggagactcagtctcaaaaaaagaagaaaaagaaaagaaagtctacttacagcttaatatgattaactatagaaatctaccgatgtgaaagagtatctaacaatttctaagacccagaaaagctgacatcctagataccttaccaattttgatcgccacttctcatgacagaagatgctaaacatagcttctctcggatggaccatggctctgtggggccagtgcttagcagcttgtgttctgggaaagggagaaaaaaaaaaaagccttggaaacaaccactgagactgtagtgctaagctccaaaatccccaaaaagaggactaaaagcctaatacaaaacatcccaacttgttaggacaaagtgagctactataaccaaatcttgattttcacctctccaagtgaaatatcaccagtgaccggggtacctattcgttgcatgtgaattattaacattttatttcttaaaacgccatggcttgaagctccgctttattaagaaacagggaatgtcagattaggcagttctccctaaaagcccagttttaagaatactggactttattccagtttgaacttattcagggcttatttcccaggaacccgagcggccagcccctcctactaccccgcctccctcttagcataaacttgtttacttctctcagatcctctactccaaatgtcgggggtaaaagagcttttcagtccaaaaaaagaaaaatggctgaaatccccgagatgcaatttcctgagtggcaagaaaagctcatggttaaaagaccccacttccactgcctcacaaacgtcagacaaaaaaatgaatggctctttgaggtgccggttactccgtctggctcataacatcttttcgtctgcacgcccaagtttctagagtgcttttacggttaacccgcagagttcctaacacactaggattcactaagctgcttctctcacacctccgctctctccctgagaaacaagaccccagatttctgggcccccaaacgttggtcttcacgatgctgtagagcgcaggtctctgaaaaccctgggctctcaagcaacccacttctcccactccctaagcgtgtaacaaaaatatggtgcctagcctcggatctacaaaggcctttcacgcaaaacctgctcagatactcactgcccgttcccgtcgccatcttggccccgaagtctccaaccctgaggagagacggtctggaagggccgaaaccctggaattctgggaaatagtgtaccggcgttggttcgcggtgcctcctgggaaatgtcgtttttccccttaagacaaagcaagcaccctaaaccagttaccctgtgcactcctgttaagattgttgctaaggaaggacaggagttggctgctgaagcctcaagatttcctttaggctcttaggtaagaaatgtctaaggttcaaggaaaaaggttaagttggaagaatcccaggcaaaataagtgcgaatccacgaca

SEQ ID NO: 751 - DNA, 2241 bp, Homo sapiens
agtagtgtaatcacagctcactgcagcctcaacctcctgagctcaagcaatcctcccacataaggctttcaagtagctgggagcacaggcacatgccaccaagccggggtaatttttaaatttttttgtggagacagtctccctatgttgccagggtggtctcaaactcctgagctcaagcgatcttcctgcctcagcctcccaaagtgctggaatcaaaggcatgagccaccacatctggcctatatatacattttcttagattatgctttacatcggtggttttcaaactatattccttggagcctaggtttctaaagaggtacccaggctgggcatggtgactcacgcctgtaatcccagcactttgggaggccaaggtggacagatcacctgaggtcagaagtttcagaccagcctggccaacatggcaaaaccctgtctctactaaaaatacaaaaattagccgggcatagtggcgcacatctgtagtcccagctactcaggaagctgaggcaggagaatcgcttgaacctgggaggcagaggttgcaatgagctgagatcgtgccactgcactccagcttgggtaatagagcaaaacaacatcttaaaaaaaaaggaaaaaaagaggtatgattctgtctcaaaaaaaaaaaacaggtacctcaagggttaaaaaggtagcattctgaccaggagtggtggatcacgcctgtaatcccaccactttgggaggctaaggcgggcggatcacctgaggtcaggagttcgagaccagtctgaccaataggaagaaactcggtctctactaaaaatacaaaattagctgggcatggtggcacatgcctgtaatcccagctcctcaggaggctaaggcaggagaatcgcttgaacccaggaggcggaggttgcggtgagccaagatcgcgccattgcactccagcctgggcaacaaaagcaaaactccgtctccaaaaaaaaaaaaaaggtagcgctctaagtttccctctcacacaagaatcaaagcagttctattctcattggtcttaaaaagtggaagtgaaagatttcagctgaagaaagtataagagccatctgtcttatatcaactggtgaataaacaaaatgtggcatatccaaacatggaatactactcagcaataaaaggaactactgatacatgctacaatatggatgaacctcaaaagcatgctaatggatgggaggctgaggtgggaggatcacttaaggtcaggagttcgagaccagcatgggcaacatagtgagaccctgtctctaaaaataaaaagtatccaggtgtggtgatatatgcctgtagtcccagctactccagaggctgaggcaggagaaagcttgagcccaggaattcacgccactgcactccagcctggtgacagagagagaccgtgtctcaaaaaaaagctaactgaaagaagccagacaataagactaaatattgcaagaatctatttatatgaaattcctggaacaggcaaaactataaagaagcaaagcagtggttgctgggggatgggaatgggactgactgcaaatacacacgagggaactttttggggtgatggagtattctaaactggattatggtaatggttacaactgcataaatttacaaaaactcattgaaatgtagacttaacattttatggtatgcaaattatacctcaataaaactatgtgtttttttggtgtcttttttttttttttttttttgagacagagtttcgctcttgtcgcccaggctggagtgcaatggtacgaccttggctcactgcaccctccgcctcccggattctagcgattctcctgcctcagtctcctgagtagctgggattacaggtatccgccaccatgcccggctaattttcatatttttagtagtgacagggtttcaccatgttggccaggctggtctcgaactcctgagctcaggtgatccacccgcccaggctggtcttgaactcctgggctcaagtaatcctcctgcctcagcctcccaaagtgctgagcccctgcactggcctaagctatattttttttaaaaagaatgaagagctacaccaagactaagaaggattttcatgaaatactgttgaatgagaaaaccaaaatgcagagtatgtatataatatcctatttttgtaaagcaagcagcccattaaaccttgcatatgtatatatacatattccttttaatgtg

SEQ ID NO: 752 - DNA, 1996 bp, Homo sapiens
ccaacatgagccaccgcacccggccctctccatcttccttgaacgaccccattcacctactgctcctatttctaagactgtgaccaacagagcactggagcatgcagcagcacacagaccccccgcccagatgcctcgtcgtctgggtccccatgcttgccccaggtcccttgggccacgtactaatccccctctggagaccttgagggaggtaagattgggaattagcaatacctgaaatgtgttaattctctaggtcatgtttgactctactccagtcctcgtcgccctcttcctccaccccagacttggtgcaagctattccctctgcctacaacactcttcttctccatgtttacccacctcataaccactgatcctttaggcctcagcttttctcaacccccatgcagccattcaacagaatctggcctgtggcaggctctcttctaggtaacgaagctgcattccttgcagcatttagggacccagggtatcaagggctccgcaattaactttgacacatggcttccaagatcgccctgaccctgaatatcccaaggccagacaggagaagagcgaaattggagggctgtgtgagaggcattttggattgggactggaggtagggaacatccctttagccttcattccactgcctggatagctttcacatggccatgcctaatggccagggaggcttatgaccatggtcagaaagtcagctgtgtttccagggtgacaaaggaacaggtttgtgaatcatcatggtctgaagttcctggtacacgggatccatttcactcatcttgcctcatagagaaccctcattctcacctcccacaagggagaaaatgcaaagtttcatgcagtcactgcacagagtcttccagtgatgtgcatttctggacatcaagcctgaaagcggtacatcatagtttgtcaatgtaaaaactaaaataaaaccgtaacaattccccaccacacaccaaaaaatacctaacatcaggttaatgttacctccctccctgagtacagaaacaggatacgcacaaggaaaactgccattagaaagggaaggcttggaggcccatggcagttcctggtccacagcaattataaaactcttctgggcaggtactgtgaagtcctcatactcctgctggttcaaaccaaggacccaaggttgttttaaggcatgaacagttaaaggagtttggggtcctagcatgagctggttggtttcttgggcaatgcaagtttctcagaaatgtaataggttctgatgtacttgtttctagttatttccatgtatccatagccatgtccagagtttcttgttgtacataattccctaacttgatgaattatgctttctagttcatagacttctctctctctaatgatagagtttatgcaaaaccatcagacacaggtgggaagattacacctattattattacaccaattatttcatcttttctacagggctcagtcttaactggccacttaaaggatttttcatacttattttctattattgagctttaggtacaatcagctttttcaaccctgtgaaataccaaatttctgggtgatctgttctctatatcatttatatcatttataaactagcccttccttccctgagcctatttatctcctctaataagctttttaaaagcacaactaacaggccaggcacagtggctcacgcctataatcccagcactttgggaggccaaggcaggtgaatcacttgaggccaggagttcaagaccagtctggacaacatggtgaaaccccatctctagtaaaaatacaaaaattagctgggcgtggtggtgcacacctgtaatcctagctacttgggaggctgaggcacaagcattacctgaacctgggaggcagaggttgcagtgagccgagattgcaccactgcattccagcccgggagacagagcaagaccctgtctctgaaggaaaaaaaaaaaaa

SEQ ID NO: 753 - DNA, 1997 bp, Homo sapiens
ccaacatgagccaccgcacccggccctctccatcttccttgaacgaccccattcacctactgctcctatttctaagactgtgaccaacagagcactggagcatgcagcagcacacagaccccccgcccagatgcctcgtcgtctgggtccccatgcttgccccaggtcccttgggccacgtactaatccccctctggagaccttgagggaggtaagattgggaattagcaatacctgaaatgtgttaattctctaggtcatgtttgactctactccagtcctcgtcgccctcttcctccaccccagacttggtgcaagctattccctctgcctacaacactcttcttctccatgtttacccacctcataaccactgatcctttaggcctcagcttttctcaacccccatgcagccattcaacagaatctggcctgtggcaggctctcttctaggtaacgaagctgcattccttgcagcatttagggacccagggtatcaagggctccgcaattaactttgacacatggcttccaagatcgccctgaccctgaatatcccaaggccagacaggagaagagcgaaattggagggctgtgtgagaggcattttggattgggactggaggtagggaacatccctttagccttcattccactgcctggatagctttcacatggccatgcctaatggccagggaggcttatgaccatggtcagaaagtcagctgtgtttccagggtgacaaaggaacaggtttgtgaatcatcatggtctgaagttcctggtacacgggatccatttcactcatcttgcctcatagagaaccctcattctcacctcccacaagggagaaaatgcaaagtttcatgcagtcactgcacagagtcttccagtgatgtgcatttctggacatcaagcctgaaagcggtgacatcatagtctgtcagtgtggaaactcaaataagaccgtaacaattccccaccacacaccaaaaaatacctaacatcaggttaatgttacctccctccctgagtacagaaacaggatacgcacaaggaaaactgccattagaaagggaaggcttggaggcccatggcagttcctggtccacagcaattataaaactcttctgggcaggtactgtgaagtcctcatactcctgctggttcaaaccaaggacccaaggttgttttaaggcatgaacagttaaaggagtttggggtcctagcatgagctggttggtttcttgggcaatgcaagtttctcagaaatgtaataggttctgatgtacttgtttctagttatttccatgtatccatagccatgtccagagtttcttgttgtacataattccctaacttgatgaattatgctttctagttcatagacttctctctctctaatgatagagtttatgcaaaaccatcagacacaggtgggaagattacacctattattattacaccaattatttcatcttttctacagggctcagtcttaactggccacttaaaggatttttcatacttattttctattattgagctttaggtacaatcagctttttcaaccctgtgaaataccaaatttctgggtgatctgttctctatatcatttatatcatttataaactagcccttccttccctgagcctatttatctcctctaataagctttttaaaagcacaactaacaggccaggcacagtggctcacgcctataatcccagcactttgggaggccaaggcaggtgaatcacttgaggccaggagttcaagaccagtctggacaacatggtgaaaccccatctctagtaaaaatacaaaaattagctgggcgtggtggtgcacacctgtaatcctagctacttgggaggctgaggcacaagcattacctgaacctgggaggcagaggttgcagtgagccgagattgcaccactgcattccagcccgggagacagagcaagaccctgtctctgaaggaaaaaaaaaaaaa

SEQ ID NO: 754 - DNA, 3764 bp, Homo sapiens
tcagtgtgtgcggaacgcaagcagcagagagcggagaggcggcgctgtagttaactcctccgtgcccgccgcgccgaccctccccaggaacccccagggagccagcataaagcgagctcacccagagtacagctcctctgacagcgagctggacgagaccatcgaggtggagaaggagagtgcgcacgagaatgggtgagctggcggcggcggagcggagccgagccagagcgggaggcgagcgcacgcctgccgcggtgacagcgggctatgacccttggcgcgccggtgccctgcgctgacctccgcgcgtcgcaggctggcggcagcctgcggccagggaacccctaggtgccttccagcccaagtggcaaaaaaagtctgagtgcggggagggtgtgggggcgacctctcagatcacctctcctcgtttaacggcgatttcagtttttgtgttgttctttttctcttttcagaaacttgagttcggctctaggttccatgtccccaactacatcttcccagattttggccagaaaaagacggagaggagtgagtctctttacactctccttttatttttgttattgattaacggaaataaccacctttttttttgtctttgaaatttacagtcgtaatggtaatgccttcctttgttttgcttgccttctgcagataattgagaagcgccgacgagaccggatcaataacagtttgtctgagctgagaaggctggtacccagtgcttttgagaagcaggtaatggagcaagtaggtaaagctctcagcatagctatctgcaccttctgaatcttcccctcattaatctcatccgccttggaaaatagctgtgttgcttgtgcctagatgaattcgtacacagataccagcgtattttgtgaagacaactgattttgctttagtccatgctttacgatttacaaagcatgtatctttgtatatatgtttgcatattttaaattgttccccaaaggaacttgtgccaaatcaatcttttgccattctcatctttagggatctgctaagctagaaaaagccgagatcctgcagatgaccgtggatcacctgaaaatgctgcatacggcaggagggaaaggtacatctcctagacctagtgggggctctgaatggttggcaaagagtgagcagcggctgaaggccaggattggtgcagtagctgcctgatttttctttgggggtggggagagaacggtgtgtggtgtgtgcagttccctgtcagtacattttcgaatgcacatagaatcttctccagtgaattcaccaccccagctctctgcggattgagctagtgcatcttttggaaaaatacctattatttgtgaggtcttcaaaagttgtgacagccctgattcagatcaggtagctttcacatttgtccattgctattttgagaaaaagcatttaaaaacaatatgtggtcttatttttggtatacgggattttaaaaaaaaggtgctgccacatgcctcttgaggaaagaaatgtattctggttaagtaaaggaaacctaacgggagaccaaggtctgtgtgtatgtctctccagcaggaaaatgctttactgaggtccaagtgcctaaaagctccgcgatgataacttacatctgtgtgtctaatgaatttcactgctctgtggtttctctgcccttgatgtattttttgttgttgttgagggaaaacattaaaggaatgaacatagtttcatctgctggtagggtataattccaatttctgctctgcagcttctaattgggctttgaacttgcattagcaaacacattctgcttatgttgattaatgcaaagatttttgttgattccaaagactttcggaagaacccctgactgttgtgttttaagggatgcaggtatctgccaggaagggctgtctctgggacttaagaaatgagggaaacgggcaaagccctgagatttttcttttgttcttttgcttaggttactttgacgcgcacgcccttgctatggactatcggagtttgggatttcgggaatgcctggcagaagttgcgcgttatctgagcatcattgaaggactagatgcctctgacccgcttcgagttcgactggtttcgcatctcaacaactacgcttcccagcgggaagccgcgagcggcgcccacgcgggcctcggacacattccctgggggaccgtcttcggacatcacccgcacatcgcgcacccgctgttgctgccccagaacggccacgggaacgcgggcaccacggcctcacccacggaaccgcaccaccagggcaggctgggctcggcacatccggaggcgcctgctttgcgagcgccccctagcggcagcctcggaccggtgctccctgtggtcacctccgcctccaaactgtcgccgcctctgctctcctcagtggcctccctgtcggccttccccttctctttcggctccttccacttactgtctcccaatgcactgagcccttcagcacccacgcaggctgcaaaccttggcaagccctatagaccttgggggacggagatcggagctttttaaagaactgatgtagaatgagggaggggaaagtttaaaatcccagctgggctggactgttgccaacatcaccttaaagtcgtcagtaaaagtaaaaaggaaaaaggtacactttcagataattttttttttaaagactaaaggtttgttggtttacttttatcttttttaatgtttttttcatcatgtcatgtattagcagtttttaaaaactagttgttaaattttgttcaagacattaaattgaaatagtgagtataagccaacactttgtgataggtttgtactgtgcctaatttactttgtaaaccagaatgattccgtttttgcctcaaaatttggggaatcttaacatttagtatttttggtctgtttttctccttgtatagttatggtctgtttttagaattaattttccaaaccactatgcttaatgttaacatgattctgtttgttaatattttgacagattaaggtgttgtataaataatattcttttggggggaggggaactatattgaattttatatttctgagcaaagcgttgacaaatcagatgatcagctttatccaagaaagaagactagtaaattgtctgcctcctatagcagaaaggtgaatgtacaaactgttggtggccctgaatccatctgaccagctgctggtatctgccaggactggcagttctgatttagttaggagagagccgctgataggttaggtctcatttggagtgttggtggaaaggaaactgaaggtaattgaatagaatacgcctgcatttaccagccccagcaacacaaagaatttttaatcacacggatctcaaattcacaaatgttaacatggataagtgatcatggtgtgcgagtggtcaattgagtagtacagtggaaactgttaaatgcataacctaattttcctgggactgccatattttcttttaactggaaatttttatgtgagttttccttttggtgcatggaactgtggttgccaaggtatttaaaagggctttcctgcctccttctctttgatttatttaatttgatttgggctataaaatatcatttttcaggtttattcttttagcaggtgtagttaaacgacctccactgaactgggtttgacctctgttgtactgatgtgttgtgactaaataaaaaagaaagaacaaagtattc

SEQ ID NO: 755 - DNA, 3764 bp, Homo sapiens
tcagtgtgtgcggaacgcaagcagccgagagcggagaggcgccgctgtagttaactcctccctgcccgccgcgccgaccctccccaggaacccccagggagccagcatgaagcgagctcaccccgagtacagctcctcggacagcgagctggacgagaccatcgaggtggagaaggagagtgcggacgagaatgggtgagctggcggcggcggagcggagccgagccagagcgggaggcgagcgcaggcctgccgcggtgacagcgggctaggacccttggcgcgccggtgccctgcgctgacctccgcgcgtcgcaggctggcggcagcctgcggccagggaacccctaggtgccttccagcccaagtggcaaaaaaagtctgagtgcggggagggtgtgggggcgacctctcagatcacctctcctcgtttaacggcgatttcagtttttgtttgttctttttctcttttcagaaacttgagttcggctctaggttccatgtccccaactacatcttcccagattttggccagaaaaagacggagaggagtgagtctctttacactctccttttatttttgttattgattaacggaaataaccacctttttttttgtctttgaaatttacagtcgtaatggtaatgccttcctttgttttgcttgccttctgcagataattgagaagcgccgacgagaccggatcaataacagtttgtctgagctgagaaggctggtacccagtgcttttgagaagcaggtaatggagcaagtaggtaaagctctcagcatagctatctgcaccttctgaatcttcccctcattaatctcatccgccttggaaaatagctgtgttgcttgtgcctagatgaattcgtacacagataccagcgtattttgtgaagacaactgattttgctttagtccatgctttacgatttacaaagcatgtatctttgtatatatgtttgcatattttaaattgttccccaaaggaacttgtgccaaatcaatcttttgccattctcatctttagggatctgctaagctagaaaaagccgagatcctgcagatgaccgtggatcacctgaaaatgctgcatacggcaggagggaaaggtacatctcctagacctagttggggctctgaatggttggcaaagagtgagcagcggctgaaggccaggattggtgcagtagctgcctgatttttctttgggggtggggagagaacggtgtgtggtgtgtgcagttccctgtcagtacattttcgaatgcacatagaatcttctccagtgaattcaccaccccagctctctgcggattgagctagtgcatcttttggaaaaatacctattatttgtgaggtcttcaaaagttgtgacagccctgattcagatcaggtagctttcacatttgtccattgctattttgagaaaaagcatttaaaaacaatatgtggtcttatttttggtatacgggattttaaaaaaaaggtgctgccacatgcctcttgaggaaagaaatgtattctggttaagtaaaggaaacctaacgggagaccaaggtctgtgtgtatgtctctccagcaggaaaatgctttactgaggtccaagtgcctaaaagctccgcgatgataacttacatctgtgtgtctaatgaatttcactgctctgtggtttctctgcccttgatgtatttttttgttgttgttgagggaaaacattaaaggaatgaacatagtttcatctgctggtagggtataattccaatttctgctctgcagcttctaattgggctttgaacttgcattagcaaacacattctgcttatgttgattaatgcaaagatttttgttgattccaaagactttcggaagaacccctgactgttgtgttttaagggatgcaggtatctgccaggaagggctgtctctgggacttaagaaatgagggaaacgggcaaagccctgagatttttcttttgttcttttgcttaggttactttgacgcgcacgcccttgctatggactatcggagtttgggatttcgggaatgcctggcagaagttgcgcgttatctgagcatcattgaaggactagatgcctctgacccgcttcgagttcgactggtttcgcatctcaacaactacgcttcccagcgggaagccgcgagcggcgcccacgcgggcctcggacacattccctgggggaccgtcttcggacatcacccgcacatcgcgcacccgctgttgctgccccagaacggccacgggaacgcgggcaccacggcctcacccacggaaccgcaccaccagggcaggctgggctcggcacatccggaggcgcctgctttgcgagcgccccctagcggcagcctcggaccggtgctccctgtggtcacctccgcctccaaactgtcgccgcctctgctctcctcagtggcctccctgtcggccttccccttctctttcggctccttccacttactgtctcccaatgcactgagcccttcagcacccacgcaggctgcaaaccttggcaagccctatagaccttgggggacggagatcggagctttttaaagaactgatgtagaatgagggaggggaaagtttaaaatcccagctgggctggactgttgccaacatcaccttaaagtcgtcagtaaaagtaaaaaggaaaaaggtacactttcagataattttttttttaaagactaaaggtttgttggtttacttttttcttttttaatgtttttttcatcatgtcatgtattagcagtttttaaaaactagttgttaaattttgttcaagacattaaattgaaatagtgagtataagccaacactttgtgataggtttgtactgtgcctaatttactttgtaaaccagaatgattccgtttttgcctcaaaatttggggaatcttaacatttagtatttttggtctgtttttctccttgtatagttatggtctgtttttagaattaattttccaaaccactatgcttaatgttaacatgattctgtttgttaatattttgacagattaaggtgttgtataaataatattcttttggggggaggggaactatattgaattttatatttctgagcaaagcgttgacaaatcagatgatcagctttatccaagaaagaagactagtaaattgtctgcctcctatagcagaaaggtgaatgtacaaactgttggtggccctgaatccatctgaccagctgctggtatctgccaggactggcagttctgatttagttaggagagagccgctgataggttaggtctcatttggagtgttggtggaaaggaaactgaaggtaattgaatagaatacgcctgcatttaccagccccagcaacacaaagaatttttaatcacacggatctcaaattcacaaatgttaacatggataagtgatcatggtgtgcgagtggtcaattgagtagtacagtggaacctgttaaatgcataacctaattttcctgggactgccatattttcttttaactggaaatttttatgtgagttttccttttggtgcatggaactgtggttgccaaggtatttaaaagggctttcctgcctccttctctttgatttatttaatttgatttgggctataaaatatcatttttcaggtttattcttttagcaggtgtagttaaacgacctccactgaactgggtttgacctctgttgtactgatgtgttgtgactaaataaaaaagaaagaacaaagtattc

SEQ ID NO: 756 - DNA, 423 bp, Homo sapiens
attttagcaaccgcgatttccaatgacattacagcattactgaacagcattgtacttcgactatctcttactgttacataggtttagatggctgctaatgtggtaagaagtgaagcctctcatttgctggctctgctgaaagagctgtggaactgtaaaacatgtagcatgttccacttgtctcatcagtgatcgctatatctggttagcgggaggcgtggcagttcatttccagattacatacttttccatggaaatattctggtttcttttcaagccctttcaaggtgaaaagtatctgaggatggtgcaggtggagtgtgagcttcctaggaagcaggatggagtatgactatgtaccaatagtgtatagaaaaattaattcaggaaaactcccatttctattctgttgatgcaattagg

SEQ ID NO: 757 - DNA, 423 bp, Homo sapiens; identical to SEQ ID NO: 756

SEQ ID NO: 758 - DNA, 206 bp, Homo sapiens
cctggccaacatggtgaaacctcgtctctactaaaaataccaaaaacaattagctgagcatggtggcgcgcgtctgtaatcccagcttctggggaggccgaggcaggagaattgcttcaacccgggaggcggaggttgcagtgagccgagatcgcgccactgcactccagcctgggcgacagagtgagacaccatctcaaaaaaaa

SEQ ID NO: 759 - DNA, 737 bp, Homo sapiens
aaattctgttttgtgcctataatcccacctgactgacaaaaaaaagagcaatcctttatgcctctgtcctcccccagttattctaggttctggtcccttacacctggccaagctgtcaggtattattatggcatcttgttcagctaattaagcagtacaactgagacaattgccaccccatttgtcatgtgtggtgccttccaagatagcccccagtgattctcacctcctgatattcacacccttgtgttgtgtcctcccatgtcataccaaggttggtctttgtgataaaattcagggaagtgatggtgtgtgacttgtgacactagatccgaaaagacacggtgatgtctgacttgttctcttggatgtctctccctgagtgaagccagctacttttcatgaggatactcaagcattcctatggagagatccacatggtgagaaactgaagcctcctaccaagagccagcaccaacttgccagctatgtgaatgagccatcttagaagtgggttctctagccctagtcaggccttcatatgactgcagccagggctgatattttgactacaacctcatgagagactgagccacaacaacctagctaagaagctcctgaattccctaccaacagaaactatgtgagataatgtttgttgttttaactaagttttcaagtggtaatttgttatacagaatatgtaactaataaagcatggctcctttaggtctaaa

SEQ ID NO: 760 - DNA, 1403 bp, Homo sapiens
gatatagcttagtataaaaataaaattcaacgttttggccaaaatgtttgtttttcactggattctgaatataataaattcaaagtaccctttttttagagtttctaataaagtagtatgtaaaaagaaactgcattttaagtcagacagtaaatgttttttttaatttacagcaaatgaagcagttttattagcatgttacaaatattgccaaaccaagacttctctaccatactttaacagctttccttcagaaaactctgaagttatatttgcaataataatgaaaccagcatttagtaccagcatatggttcatatgcaaataatactttccccaaaatctttctgggctaggctattttcttgctatgcttcctgcacccaaccagcagaattcttccagggtggaggaactaatcagcttgttctccaacagttctgaagccaacccacaaatctttgaggaaaaggggtcactttgtttactattctcttggagatggaagtgattctgctcttccatttgggtatattatttcaagggtatttcttcttaaaaatcttggaaagcctaagagagttaaaggcatcctggttttgtttcattttgctctgttttaaatccatatgcaaataaaactgcttctctcttacactgcttgaactagaaaatcagctttttaatgtaggttaccacttataagcacaaaagaaacatgtataagaaaccagatttaagtgttttaaataaaatgtaaacagtttttatttggtagagatgactcatggaaaaattgtgttggcttggtctgcatgtttaatgatgtgcttgtatatcgattagctgtgtcacttttaaataagaagtccacacaagcaagccaaatttttagatgacgaagtccataaataactagagaatttttgttatctgttgttaagttgaaatgtataatcatttatcactaaattgcacattgcctttatttatttgtgctctgtttttggtttacagtgtaataatacctcatttaaaaaataaaaaccactactgttacattttattaatttaaaaagctagaaaattcatgtagttactttttttacatatataatctgttaatgaattattgatttttgtatctgccacagtaaattaaagcattacacagtatttatcagtattttttaaacatcctgtccttttttaaaatctttgcttagtcagtcatatttttgtctgtatgattagaagtttttacgtccttccttttttgtacaaatctgtattgtattaatttctggatgcaatttttcaaatattaaaattatacagtcagtcaggcttcagtttattttttgaacacttgggcaattaattaaagccatatgtttaaaata

SEQ ID NO: 761 - DNA, 101 bp, Homo sapiens
cagagcttgcagtgagccgagatcgcgccactgcactccagcctgggcgatagagcgagactctgtctcaaaaaaaaaaaaaaaaaaaaaaaaaaaagagt

SEQ ID NO: 762 - DNA, 1419 bp, Homo sapiens
gaacatttcaagtagcctccctctatgttcctttcctttttaaatatattgataatcctactgcagggaatttgggagccatacttggtcttcgcatgcaacgtaattagatataactatactatgtgaatatgactaaagaaatgaaaatgaaaacagtatcttgtgctctgtaacgattgttattaaatatatcatagaaatgagaagagtaggctcaggagctgaactgcctagttcaaaaggccaaatttactactttttgttccgtgaatttgttgtgctcctgtttccttagttgtaaaacagagataacaataggacgtgcccataagcttttcatgaggattaaatgagttaatgtgtttggtggggaccaggtggacatggtactggtagggccctatttgacattggctttaagtatcactggctttaagtgcatcagtagatatatgatgacaataattgtattatcatggtgatatggatttcttataaatacttgtattatgttagtcacttctagaaaagaatacatctatacagtagaatataattcaaaaaataatgtcatatttttgtaaagaaattttttgtaaaacttttcagtcttcaaagagtttcatagactttattccatttatattgagagcctactttgtgttaagcattttgctgaacattgtcctcactcttatgttacttaccatctattgggaagagaaagaagtaaacaaataattacatgtagagtagtagtgtcaatggtagaggcatgaacacaacacagatttaacactagagaaagagtgatcacaaaagaaatgatgtttcagttgagttttaaatggcagctggagttcatctgaatgattaggtgtctaggacaggtttaaaggttagggagtaaggaagataatattcaaaataaaaagaacctgaggatattcacagaggacatttgcagaggcctgaaatagcattggtacattcctagaaccataaatagtttgatggtaatgtaaattacagtatgttttgaaaaatcatggaagatttataccacgataagaaacttcaactttattctaaagttgatgagcatttgacagattttaagcaagaaacaaatattaaatttatattttagaaagaattctagatacataaaaagcacttattataatccagtatccattcatgataactctcagctaactggaaataaaagggaacttccttggtctaaggaagaacatctacataaattctacaaccagccacatacttaatggtgaaataatgaatgtttttctcctaagatcaggaaaaagaaaaagatgtctcctcttacttctattcaggatggtactggtagttcaggccagtacagctatgcaagaaaaagaaataaaa

SEQ ID NO: 763 - DNA, 1419 bp, Homo sapiens
gaacatttcaagtagcctccctctatgttcctttcctttttaaatatattgataatcctactgcagggaatttgggagccatacttggtcttcgcatgcaacgtaattagatataactatactatgtgaatatgactaaagaaatgaaaatgaaaacagtatcttgtgctctgtaacgattgttattaaatatatcatagaaatgagaagagtaggctcaggagctgaactgcctagttcaaaaggccaaatttactactttttgttccgtgaatttgttgtgctcctgtttccttagttgtaaaacagagataacaataggacgtgcccataagcttttcatgaggattaaatgagttaatgtgtttggtggggaccaggtggacatggtactggtagggccctatttgacattggctttaagtatcactggttttaagtgcatcagtagatatatgatgacaataattgtattatcatggtgatatggatttcttataaatacttgtattatgttagtcacttctagaaaagaatacatctatacagtagaatataattcaaaaaataatgtcatatttttgtaaagaaattttttgtaaaacttttcagtcttcaaagagtttcatagactttattccatttatattgagagcctactttgtgttaagcattttgctgaacattgtcctcactcttatgttacttaccatctattgggaagagaaagaagtaaacaaataattacatgtagagtagtagtgtcaatggtagaggcatgaacacaacacagatttaacactagagaaagagtgatcacaaaagaaatgatgtttcagttgagttttaaatggcagctggagttcatctgaatgattaggtgtctaggacaggtttaaaggttagggagtaaggaagataatattcaaaataaaaagaacctgaggatattcacagaggacatttgcagaggcctgaaatagcattggtacattcctagaaccataaatagtttgatggtaatgtaaattacagtatgttttgaaaaatcatggaagatttataccacgataagaaacttcaactttattctaaagttgatgagcatttgacagattttaagcaagaaacaaatattaaatttatattttagaaagaattctagatacataaaaagcacttattataatccagtatccattcatgataactctcagctaactggaaataaaagggaacttccttggtctaaggaagaacatctacataaattctacaaccagccacatacttaatggtgaaataatgaatgtttttctcctaagatcaggaaaaagaaaaagatgtctcctcttacttctattcaggatggtactggtagttcaggccagtacagctatgcaagaaaaagaaataaaa

SEQ ID NO: 764 - DNA, 560 bp, Homo sapiens
aagtagtctggcaggataattgtgttaaaattgatagcaaattagaatagatggaagcagttacatttagctgggacaaacatatacagtgtttagcaaaggcatatcaacctgaaaatacagacctacaatgaaaatgcatcaactctaattgctatagagttgttatggtagcactataattatagtatatgtgcaagtggtctggataaaaaaaattaggacaatcaaaatatttatactgttccgtagaggaacgggtatgacattgcagtaggcaactttgaattgcctattattgttgcctttacttttggttttgtttatatcagcaagggaaaattactaattctaaatttagtttagaaggaaaaagtatcaaatatttcatgattttgagtaaagaaacataactttcttaaaatggctgtattttaatttttattatatactttattcttttgtctaattgtagataaccaagacacaagttcattagctgatgctgtagagaaagttgcaaagcaacaacaatcacaagcatcagagatagaaaaaaa

SEQ ID NO: 765 - DNA, 560 bp, Homo sapiens; identical to SEQ ID NO: 764

SEQ ID NO: 766 - DNA, 17570 bp, Homo sapiens
gcgcggcgcagagcggcagcaagatggcggcgcaacagcgggactgcgggggtgctgcgcagctggcggggccggcggcggaggctgaccccctaggacgcttcacgtgtcccgtgtgcttagaggtgtacgagaagccggtacaggtgccctgcggacacgtgtaagcggcgagcccgggcctggtcggggggcgcttaactgggaagggaatggagccgaggagcgagatgggtctcagggcgggagccagaggacccacccagaggggcctcccgggggtgtcccccggggctcctaagggccgtgaaagctgccggggcgctcttctgtcccgccccgctcactcctaagtatcccgttcctccgcccgtcttagcggggcagctgctgtctgttgagcgcctgcgatgttccaggcggcctgtcagtctccttcccacacgtgatagtggactcgtgccctgcggggactttaggctccgaagtccgcccttggagagccgacgtttcctttctagtccacgtcgctcttaaagcataggacatttggcgtcgtgtctagctgtggcgagttattctactgtgcactaaagtcgggagaaacgctgaactagactaaaacaacaaaagggaagtctttatggggatctggccagtttgcccttagctgtgaaaggggggtgggagttggcagatgggattgttagcattctacttcctgtgtaggaggtttgtttctttcagttttcaattaagccttcatgacctgaatattgtgaatagagtggttataatgattaaagcagatatgtgtataaatgtccagtccaggtcctgggctgtggccggggctttcgaggttggtcaggttggtcgatttgaatctaagccttgttccatcagacgcacaaacacatctgagttgaaagaattgtagacaacgtggccacctgcttcttgcctcagaattggcttttcctctggcccctctcagtgcttatcgtgggatcaccttggcattggtcttggcagcgggcacagtagccattgcactccatgggcattattctatagccaccctgcagcgggggagggttggcagccattttacaggtgaatacactgagggtccgaggctctcttagggaagggtcaccgtggcctagctcttcccagatgtactgcaggtgaccatttcagtagtccagagaacagtgcttggcacctagctggctgctttttgcttcatcatgttgctttaggctattcatctttgcaattcggttagcctggaactcttccccccacccctcccttttcaggcttcaagtcccaggttaagttacctcaccaaataccatccccatctaaattacttcccccacttcctttctgggacttaacttccttctccttgcttgcacagagcaaaacttaacagctcatgacggagtggccatatctttattgcccctgaactgactggaatggcctctgtgtgccagattttggggtagactctgccttcagagtttacagtccagtgaattgattataaataagtaccaatgactggtcaaactattgtaaaaattcattctgcaagtgggagggtatttcagggatcacacctctgtgcgtggggtgagtgatcaggtaatggttgaatgaactaataagtcgtgtaagcaagcttcacgagagttgaagtggtctttagctttttcattgaatccacttatccttggatcagatttacctgattttggattaattcagtggatttcatttactattaacatttgtaaaaaggctagacccagcacagtttgctaaatgaagagcagcaaaatttgagattttcttgagcttggtgaacctttcctaggtcagagggcaaggaacagtactggttttcaaaccttggctcttctctatcctcgctgtcctagccccacgtgatcagcagttcagtgcaaattgaagacagatggaagcacctctgtgagggcagcccaaatccccgctagctccaaccgactgctttctcctgtgcctagttgatttttaccttttgtgcttggaaagttgagcatcactgcaactctggctggggcattggatttttataaaactttatttcaagccctgaatgactgtgttctccaatctggtagaatacagctggagaaaggcagctggctgggtgcccaagagaagggaatttcttcctagcactgtgacggagtggagcatcggaaggctgaactagaaaagggcgcataagtaggaaatagaaactgaaaagccatcccaggatatttgagttgttcaaaagcaggctggtagtttgggcatgtctcaggcacaaagtgactcgtgaacatttgatagatgagctgtacctgtgtgtgtgcttgagaagagacttcgagctgcttttatctgcatgctgggtttggttccattatactcactggaccctctgtgctctcttgggttcctcttgtcatctgcctttgtgaacaggcaacacaagtgatggccacaggccctgcctgtctctactgcctcatcacttgcccttctcaccatggtctaccgcatcatggcccccaaggtctgcctgccttcctttccagtcctcatttgtgtgtggcgtgatcttggtgtggagctctgcacccagatctgtgtggctgtcctcgtaatcaggtcccacccagctcaaatgccaactcctcagaagcagctttctatgatcaccccagctggtctgtttgccatatttccttcatatttttaatcactatctgaaattaacatttgtgtttcccttcactctagaatgtaagcatcatgagaacagggctttgtcaagtttccattgccctcagtggtgaatgaatagactccctcaccttctctgtacctggtctggaattttgcctaacagcattaacatctaacttaatgacaaggaggaaggagattcttagaggcagtagaaaatggtcaagtgttcagaagatggcctttcattatatatctttagttctttctggcagatttggttatactgtcttaatctatcaggttgggtaagtagcccagggtgtcttctccattctttctgtatgccttatctcagcattaccatcttcctaggcttcaggataggaactcggtcatctttgacttcttttcttcaaagtcagtaagttatcaagtcctcctgattctacctttctgtgaatggtttcctgaattcatcccctgctgcttcagtcagaccctcacaatcctctgcctttagccatctgtttggtttctactttgtctcttctcaccttctcacctaaaaaaaaaaaaaactatagggctgggctcagtggctcacacctgtaatcccagcactttgggaggccaagacgggtggatcaccagaggtcaggagttcgagaccagcctggctaacgtggtgaaaccccgtctctactaaaaatataaaattagctgggtgtggtcatgcgcgcctgtaaccccagccacttgggagtctgaagcaggagaatcgcttggaccggggaggcagattttgcagtgagccgagattgcaccattgcacttcagcctgggcaacagagcacgactctgtctcaaaaaaaaaaaaaaaaaaaaaagtaacaaaactttgttttccatgatagcacagagatatttttctgaaacctggatttggccttgttttgttaataccttccttttaaactcctggctccctactgtttatgaggaaaagtctgttagatttttatttcctcagatacatatcaattttaagcctaaattaggcctagaatagtcttcccttcctctgctagctgacctctttttttaaaatgccagaggggtaatgggccaacatctgtaacaaggttcgagggtggcacatctcacacatgcacatgaacacccagtcctcaggttcatgaactacaaaaggatccatctgaacccttttttttttttttttgagacggagtctcgctctgtctcccaggctggatggagtgcagtggcgcgatcttggctcactgcaagctctgcgtcctgggttcatgccattctcctgcctaagcctcccgagtagctgggactacaggcacccgccaccactcccagctaatttttgtatttttagtagagacggggtttcactgtgttagccaggatggtctcgatctcctgaccttgtgatctgcccgcctcggcctcccaaagtgctgggattacaggcatgagccaccgcgcctggctgagctgaacccttttaaggctgatcagagatgccgtctctgcagtcttcccctccaccccccccttgagacagagtcgcactctgttgcccaggctggagtgtgcagccacctctgcctcccaggttcaagcaattctcctgcctcagcctcccgagtagctgggattacaggcatctgccaccatgcctggctaattttggtatttttagtagagacgggtttcaccatgttggtaaggctggtctcaaactcctgacctcgtgatctgcctgccttggcctcccaaagtgctgggattacgggcgtgagccaccgctcccagccttcactgcagtcttaccagccctttccttctcaggtcactagttgattttccctttatgttcctgtagcgctttgccttcacctgtaatgatagcagctcccgtttgtggtgcgttttgtaagggctggacactctgccaggggtctgctatacaaactgtatcctcccagcagtcctagaggtaggtactactctctccatttcacaaaggaaaaaatggagattcaagaaaccccactgagatccttcagtggcagggcctaaggcttgaagcctcaaccttaacaccttcactgtgtctatcacaggagtttgcatttgtttctgtagttgtgtgttctttgtagtccactcctatccctcattttttctggcttggaaggacttagtatttgaactgggaggagagagcaagttgttttttactccattatccattgatgtctttttaaaagttgatccatatttgtcgtcttgtctccatgatgcgtgacagaggttctctgtatgtcttgttctagcttttgctctgcatgcctgcaggaatgtctgaagccgaagaagcctgtctgtggggtgtgtcgcagcgctctggcacctggcgtccgagccgtggagctcgagcggcagatcgagagcacagagacttcttgccatggctgccgtaagaatgtatgtggaagtgatgtggaagagtccatgtctttccatgataagttggggtaaaacgtacagctgccatgttgttgctgaagttagagcatgactaggtcactaacagcacgcgtgcatgccaattacctgtggtgatggctgggctggtttgttttcataaccttactggtttttgtttctttttttaagagttggttaagtatatattttaggtttgaaagccatagaaatcagttatcccagttttttcctataaaagatcaattatggccaggcgcggtggctcattcctgtaaccccagctctttgggagtccgaggcaagagcttgaggctaggagttaagagaccagcctggacaacatagtgagacctcatctttacaaaaaaataaaattagccgggtgtggtggtatgtacctgtaggcccagctactcaggaggcagaggccagaggatcacttgagcccaggagtttgggattacagtgatctatgatcatgccactgcactccagcctggctgacagcaagaccctgtctcttaaaaaaaagtcaatatgaaatcattggattgtaataacaatagctaacatttgaaatgcatccatgctcttgtataatcagagtcaagtatatttattttcatacctgttataactgctactggaaaggagaaatactgttgtcttattttccaagagatatacacagccttgttgattttagaatcattaaaatttttaaaattgcagaccatacaaaagtacacaataatgtaggcttgttcctcattccagagattacttcaaaattcgttcaacttaaggcctggcaaggtggttcatgcctgtaatcccaacactttgggaggccaaggtgggtggattgcttgagtccaggagttctagaccagcctggacaacatggtgaaacctcggctctactgaaaatacaaaaaactagcagggcatggtggtgtgtgcccgtagtctcaactgttcgggaggctgaggtgagaggatggcttgagcccaggaggcagaggttgcagtgagctgagttcgtgccactgcactccatcctgggtgatagagccggaccctgtctcaaggaaaaaaaaagtgatttaatttcgaaagctgcataacattttctgccctttgacaaacactgtagaatttttaccaaccaagttgtaggatttttgcaaaatgagattatactataatatatatatttcttcaacttttttcacttttttaaatgtacactcattcccaactttttttttccacttttcaggttttttttctcttacatattggacagccttgcatgtcagtttcattatttttaacacttcggtatggatgcccatagtaagaatataccttaccatctccttttcagcgtgatttagtattagggatgcatagtagggccatttcaatgctgaatagggctattttctgtgtcttaattgggggcttcactcttgaggctgggcatggtggctcatgcctatatcctatcatttggagaggccaaggcaagaggatcactgaccccaggagttcgaaatcagcctgggcaacatagtgggactctgtatataccaaaacaaaccaacaaacaaaaccagctgtgtgtagtggtgtatgcatgtagtcccagctccttgggaggctgaggtgggaagattgcttgagcccagaagtttgagagcagcctggggaatatagtggacccagtttctacaaaaaaaggaaaaaaaaattgaggattcctcagtttgtagcttaaagtcaagttcttgagctggaggtgagacaatcatcatggtaagctggagctcaaatattggagcatttttttccccctttgaagtttacttttagaaactcaaaatattgaaatacaattccctactgtcttctttttttttttttttttttttttttgagacggagtctcactctgttgcccaggctggagtacagtggcgtgatctcagctcactgcaggctccgcctgttgggttcacgccattctcctgcctcagcctcctgagtagctgggactacaggtgcccatcaccacgcccagctatatatatatacacacacacacacacacacacacatacatacacacagagatatatatatatatatatatatatatttgtatttttagtagagacagggtttcactgtgttagccaggatggtctcgatctcctgacctcgtgacccgcccgcctcagcctcccaaaatgctgggattataggcatgagccattgcacccggtctcttcatctttatttatgcatgcataatgtggtttttggttttgttttgttttttttctgagacagggtctggctttgttgcccgggctggagtgcaattgcgtggtctcagctcactgaaacctctgcctcccaggctcaaaccatcctcccacctcagcctctcaagtagctgggactacaggcatgtgtcaccacgcctgcctaatttttttgtattttcagtagagacgagttttgcatgttgcccatgctgatctcgaactcgggagcgtgaagtgatggcccacctcagcctccctcaggattacaggtgtgagccaccgtactccgcccatgatgggctttttgtttgttttactgtatgcttttgcttttctccattttcaagattagtgattgtactgttggcatgcctcagaaaatgtttttctttcctttatcttccctcttttcttcaattcttaaaactttctttctttttagaaaacctgtaatgaagcactattctctgggttttcttctctttctgttttactgttgcacagcctagattttatatgaaaggctgggccgggcgtggtagctcacgcctgtaaacccagcactttggcaggctgaggcaggcagatcacttgaggtcaggagttcgagaccagcctggctaacgtggtgaaactccatctctactaaaaatatgaaaattagctgggcctgatggcacacacctgtaatcccagctactcaggaggctgaggtgggagaatcacttgaacccgggaggcggaggttgcagtgagccgagatggtgccactgcacttcagtctgggcgacagagtgagtgagactctgtctcaaaaaaaaaaaaaaagagaatttagattttaaagattatttctcagaggctggtgatagatactttaaccagggttagtggcttttatatgttttacctaaaggatcacttttctctgctgcacataacagaatgtggtttttggcttgctgtaaggagactagtttaaatgctagtatagaaaacttttaaaaacatcctagatttggagcttgtctgtgagcagacagcctatcatgaataggagcaaacctctaggagagttattttagagtggaagtggatatcctgatttagtcgaataaaatagcagccttggtattaatgggaaatctgcaataatcagggtttcagccccatcagcgtagtcaggagtttggtgagattatttgccagggtggtgtaggtctagttttctttgtgcccttgtttgggactatattttgcctgttgcaaggtcctcactaacttatgggctctgattcttcctatttgagttcttcctgtccaagatccggtcccacgtggctacttgttccaaataccagaattacatcatggaaggtgtgaaggccaccattaaggatgcatctcttcagccaaggtaaatgactcagtctccccttaggtggaggtcatctcttgctattaatacaaagaggttgcatgcccaggggtttagttgtatgaattgttatgctggctaaagctgatacaagtattttgggaggagtatgcaagggaggactctggtgttcacttcagatgttagctgagctatattctttttttcttttttgagacagagtctcgctctgttgcccaggctggtgtgcagtggtgcaatctcagctcactgcaacctctgcctcccgggttcaagcgattctcctgcctcaacctcccaagtagctgggattacaggcacctgccaccatgcctggctaaattttgtattttttagtagagacagggtttgtcatgttggtcaggctggtcttgaactcctgatctcaggtgatccgcctgctttggcctcccaaagtgctgcgattacaggcgtaaaccaccacgcccggccagctgagctgttattttcacaacacttgacctgagtctgaagtgatcatcagcatccttatcattacacatttggtgagctttgctcctttttggagtgtactgtggttgaagtttaatggaaaggtactcacagaaaagttttcttttttcctgtgtttcaccttccaggaatgttccaaaccgttacacctttccttgtccttactgtcctgagaagaactttgatcaggaaggacttgtggaacactgcaaattattccatagcacggataccaaatctgtggtgagtaacctttttttttttttttaaacttcattaagggaaaggatcaagcttggagaaaaatgacgggattagtagaatgaactcctgtgtgcccttcacctagattgacagattgttaacattttaccatatttgcttaaccatgctctatagtacacattttttgctgaccacttgggaataagctacagataccatgaccatttttgcaccctgaatacttcgcaccctgatacaggagtgtgtatgtcttaagaacaagaatgttttcttggaaaattatatttttgtgtgtataattaatcatattcaagaaatttaacattgattcaatctaatgtctaatgtgaaattcatgttttaattttaacaattgtaatgtctttcatagcaatttccccctccccccaaggcagaggcagggatggtacacgagttctctgtcctctgggtgctacattaagtcatgtgatgtctgttgttggtaacattaacttggttcccttggtgtccaccaaatttctccatgaagctgccattttatttttggaagtagcttcttcatagttgtggggaaagaggatttaggtgaaattattaggaaaaggcttatcaatccttggacattttactcagatattacctactggcatgtgtagtctcctttaaaaaaaaaaaaatgtaggctgggcacggtggctcacacctgtaatcccagcactttgggaggccaaggcgggtggatcagttgaggtcaggagttcaagatcagcctggctaacatggtgaaaccccatctctactaaaaatacaaaaattagccaggcatggtggcgggcgcctttaatcccagctacttgggaggctgaggcatgagaattgcttgaacctgggaggcagaagttgcagtgaactgagatcctgccactgcactctagtctgggcagcagaacaaaactgcccccccccccccccccccccccaaaaaagtatttgttccatcttagcaatgtgttacctttctctctcaatgtgattgacagaccaggtctttttttatagttaggtgtatacttcctctatagttttaatttttccatttatctcatactgcttctcttgaactacatactctgttgtatgggcagccttcagctccattgctgtaaacagtggtgcagaaattttagaattttaatgagcttttgtgagagtactagggcagctatcaatgctcatcttaagatggaactggccattttgagaaacatatctttgcctgtatctatgtatgtttataagctaaagtcttagatacagattgacttggttaaatgttacttgcactcataattttgttggatactgttattgctgaacttttctggtatggcagcctaattttctgtctttttcccctcctttggcttctgaaatccctctgattatgttgtctatgttgaggccttctcttcagcctttggccctctgttctgtcttcctctccctctgcaagttttttttttttttttttttttttttttttttttttttttgaggcggagtttcgctctgtcgcccaggctggagtgcagtggcgcgatctcgactcactgcaagctccgcctcccgggttcacgccattctcctgcctcagcctcccgtgtagctgggactacaggtgcgcgccaccatgcccggctaatttttgtatttatggtagagacggggtttcaccgtgttagccaggatggtctcgatctcctgacctcgtgatccgcccgtctcggcctcccaaagtgctgggattacaggcgtgagccaccgcgcccggccctctgcaagttcttaactctgcgtttctcccttccctttagaagccatctccttttcagtctctagtcccaccctatgttctagctccccagctacagctgcctgcccaccttttccactcagtcttctaccattccagatttctctcttgtcaatcccctttatcactgtatcttccttgctgtggggtagggttccacctttaagtgggggcacttaggtcttctctctccctggcatgagttttctgcactcactggtctggttgtttacatgtgttgacagtaactgccgccttctggccttttctccgtgctgctgcctctcttctggagcacaatttttttttttttttttttaagacagagtctcactctgtcacccaggctggaggctggagtgcagtggcacaatcttggctcactgcaacctccacttccagggttcaagcgattctcatgcctcagcctctcaggtagctgggactacaggcgtgtgccaccatgcaaggctaatttttgtatttttagtagagaagatgtttcactatgttggccaggctggtctcaaactcctgacctcaggtgatctaccgctttggcctcccaaagtgctgggattacaagtgtgagccactgtgcccggcctggagcactctttcatgtcctctttgcctttccaaatacttcccaatcttcaaaaaccaaatcaaccttttgtgtgagggcttttcagcctgatccccctcttctgagcatttcctttgttaagatgcatgtaaggctgtgttttacttccctgggacattgctcatcggcttattttcttagttttcctcatgcttttggattgtcttgtgtgctggattggaaggccagtctaggccccccaccaggctgactcacttctctgcttacagtagggaatgagaaagggtggtatcatgatttgaactttacccagtcccacgtgtcatttgacttgagctggaaatttgcagtgtttttttgggctgctgatgtgcacaggaaggagttactggccctggacagtatgtcaggaaagctgtcctggaagaaaggaggccagacacaggccacagagggctggtgcaagcttggaaattgggtgcctaagaccttgcttttgtgttgaaaggtttgtccgatatgtgcctcgatgccctggggagaccccaactaccgcagcgccaacttcagagagcacatccagcgccggcaccggttttcttatgacacttttgtggtaagtctggagcctgggctctgatccctcccctgggggagtggcacggctacttcactcttctcaaaaggggaaatggggatccccagtgttgaactttgtcgctgttgtgatgggcttccagtctgtatactggatacagtgataaaggggattgacaagagagaaaagaagactgagtggaagaggcgggcaggcagctgtagctggggagctagatgggcttccagtctgtatactgtagctactatacagtttctattcatgggccaggcaggtggccagagtgacatttatttacttacatgagatggagtcttgctctgtcgcccaggctggaatgcagtggcgtgatctcagctcactgcagcctccacctcccgggttcaagtgattctcctgcctcagcctcctgagtagctgggactacaggcgcatgccaccatgccccattactttttgtactttcagtagagacaggctttcactatgttggccaggctggtctcgaactcctgacctcgtgatctgcccaccttggcctcccaaagtgttgggattacaggcgtgagccaccacgcccggcccagagtgacatttaagaagatgatctgggctgggcgcagtggctcacacctgtaatcccagcactttgggaggccgaggtgggcggatcctgaggtcgggggttcgagaccagcctagccaacatagtgaaatcccgtctttactaaaaatacaaaaaaattagccaggtgtggtggtgggcacctgtaatcctagctacttgggaggctgaggcaggagaatcgcttgaacctgggaggcaaggttgcagtgagccaatatcgtgccactgcactccagcctgggcaacagagcaagactgtctcaaaacaaacaagaagatgatctggtcagtctttgagacagagacagtgatacttgctctttccatctcctagccctgccaccaaatttttgtctacttttcttgtggtttatataatttctgcctgttatagaacttggtttggggacaggtgcggtgcagtggttcatacctacaatcctagcatttttgggaggctgaggcaggtggatcgcttgagctcaggagttcgagaccagcctgggcaacatgggaaaaccttgtctctgcaaaaaatacaaaaagtaaccaggtgtggtggctcctacctgtagtcctagctactttgagggagctgggacaggaggatctcttgagcccaagagacggaggttgcagcaagctgagatcatgccactgcactccagcctgggcaacagaatgagaccctgtctcaaaaaaaaaaaaaaaaaacaaaacacacacacacaacaacaatttggacttgggaggctcaatctcgcatgtccatggggaccataattgaaatgatcctcctgaggatttccaagccaggtggtgcctgactcgttatgctgccatcaccttgttttcctatggaaatgcaggcgcagcattgcctagcttctccaccccccatgcccaagcaggacaggaaaatttcacaggaggtttcacaggttttaattatcttcaaaaatacttcaggtcaaatagcatatatccactagccaaatacggctgtcaggtttatattctttccctagagctggatggtttcaaaggggcacactgttgtcttgccattatagtagtaggtaactttggccaactatatcaagtaaacctcttacttacatatatagatgtcaagttaggattttagagtggtattcggtcttgatggctgaatttcagtatctaagaaagaaagctctctgctaaattgtcataaagaatattttttctcagtctgacagtgtctgaaactcagacttcagaataactgccctttttgttaatgtgacacagatgaattacattcatctgtgtcacattaacaaaaatgactcattaaaaatgagtcctaaaaatgactcattaaagagggctagttgcgctatagtttctgctgtattgtatggctctaaaaatctgattctgtactgtgcactgattccacctctcagaaacaactcttcagctcagtgcatctgcgtgctctgttccgacagacttacaaatgttctgagcacttggtctgtgccagcctccattcgtgtgctgtctgggtttctcaatctccatttaagggaggcatccttaacttcatttaagaatcaggcagcagactgggtgcagtggctcatgcctgtaatctcagcactttgggaggccaaggcgggtggatcacgaggtcaagagattgagaccatcctggccaacatggtgaaaccctgtctctactaaaaacataaaaattagctgggcatggtggcgcacgcctgttagtcccagctactcgggaggctgaggcaggagaatcacttgaacctgggaggcagaggttgcagtgagccaagactgtgccactgcactccagcctggcaacagagcgagactccatcaaataaaaaaaaagagaaggcagcagagacagattaattttcccaaagttacatacctagcatcacaaacagttgcactggggatccggtccctggcaacctgctccggatccagttgctaggctgtcctgcttctactgaaagccagtctttgcatctagaaacagttgctgaggctgcatgtctctttttgcccttaggattatgatgttgatgaagaggacatgatgaatcaggtgttgcagcgctccatcatcgaccagtgagcagagtccgtgcttgctatctgtctcatgttacagagcttccattacatattaaacgtgaaatctatgactcctgtaccttacctgttcaacagacctgaaaatgagccatggcattgggacagggtcacttctgacaggggaagtgggtccccaggtcagcccttctcttccctttgggctcttgccaaagctgtcttcccctactgttaaccttgtttgtcacacggtcgagttcgtattggttctcggctacttcctggagcttctgccgcctcctgtggaagataatctagcttctccacctcttgtttcacactcattcctcccatccagtgtttgtctctcgggtccttcaagccagccaggaccttttctgggtcatgaatagcacaatgaagcaagtgtctcctttccttgtccccaaggtgtgcagactttggcagccgtgcacctgaccagagctgaagctcccgctgggctgtggggttgccagaagctggggttgccatcccggggtacatgtcaccagtcctcttggggttttgtaccatctgatgctggaagttttgattagtgatattttctactactacatatttagagttcactggttcagtcttaaatgcctgcatggtgcctttttaggataaggtataaccatacatttttggtggaagtgtttctgggttagggaagttaaagtctgtttatccgtaagtggggaggagggtcagctaagagaagtgggagggccagagctttttggttctgatttacaaattaatgaagtagtttcaaacaacgcggtcatgtttacctctccatttgggagcctgcctacattcttgttctagaagcacaaaaaatcctcagatgaattagaagaaagaggtttggggactcagcggatactagttcttttaccttctgcttggtaacttagattaaactgagcattgtttttctgtcacaaatgttttccttatgacactggtttcgacatgtaaaatgtgtttgaaaacctgctttgtagatgcagagagaagctataggaaacccagtaccacccctggtctgttctgacgagacatcgttcataaggcacagcacatcgcaagatgaacagttgttaataaaagctgttgctggaaacttgctttaggaacagctcaagaaccttggagttcatatttcacaaatattaataaatataagtccaagagctgtcagcctaatctgtaggagcagaacctctgattgaccaaaaggcatatgggtttaggttggttttttgatgtcatatgtctctgatggggctgcaagtgctacctcgcgcttgtacactgctgctgtggggctccgcgcctgccggtgaagagctgcagatgccgagaagccagcaaacacagggcccactggaaaaaaatagttttttcattagtatttctcgggaggacccaaaagttaaggtcagcttgttcactgtaatttctggaagaagttcactcagaccttcctgaattcagatcatctcagaagtctggagggaaatctggcgaaaccttcgtttgagggactgatgtgagtgtatgtccacctcactggtggcaccgagaaacttacttccttgtattaagtgcacttcttgtatttctaataagatgactttccagaaagtgagatttgttatgttctggcttttaaaaggtaaaatataaataaatttcataacttaatctaagtggtaagctatggttcttgttttcattcaacacatttgccatagcatgggcttggggagtctccagaagatgg

SEQ ID NO: 767 - DNA, 182 bp, Homo sapiens
gcgctgtcgcccagactggagtgcagtggcaagatcttggctcactgcaagctccgcctcccaggttcaagccattctcctgcctcagcctcccgagtagctgggactacaggcgcccgccaccacgcccggctaattttttgtatttttagtagagacagggtttcaccgtgttagccagg

SEQ ID NO: 768 - DNA, 113 bp, Homo sapiens
ggagttcaagaccagcctgaccaacatggagaaaccccatctctactaaaaatacaaaattagccaggcgtggtggtgcatgcctgtaatcccagcgactctggaggctgagg

SEQ ID NO: 769 - DNA, 7057 bp, Homo sapiens
gtcaaatgatttcagttcgtgaagccaaagccattccaaggcctgatggtattgaatggagaaataaatacatctgtgtagaaggtagttttctgtttaccatctacgtatcatcatggtactaagagaattacttgagtaatttcagctgtgtttcagttaaaagtaatacatttatgtctgaagtgatttgtaagtcttttagtttaaaatttttaattttaaaaagtcatttaaaattttttaggtatgagaaataataaacataaactttaggcattcaccctttctagttggtaagattcgagctgtctttatccctcttacttgtggttgatggataatttcatgacttacagatggaagaaaatagaatctttatatgtgattcttatattgacataaaatgagttatattcttttatacttaaaatattagtgcaagttggacttttattaatagaaattgatgttgctttaaaaattaaatgatctgaagaaattttcttctctaaaattaatttacatgtagttgaatatatccttgagacactttgagtgagtagaaaactgacttcaagggacaaaattattctcatagatgctaaattgaaggcctttgtaaatctggaggttaaaaagtataaatagttgagaatcagcatttgtagaaaacatcagattttggatgttttaatcttgaattatatgcagtattttaagagtttgtgaatatgaaattaaatctcctgctttggtgtgctaataaatggcactgggtgggcattattttagttacttgtgttcagttgaatactaaaccctgttctaaagtgctatgatgatgcaattcagtataatttggcatatgaccttattctgttaaggaaaagaaccccacgatactgtgatggtaaactgctttttaacatagcctttctaagcactaaaaaataagcaagaggagtatttaaaattatgggcctgtgtagattatatgacaaatctaaaagttttgacctttccatcagactccctattcttccgtactttttctaggtctttcccctcggttacctttcctcttaccaacaacttcattctttctgcctccagtctttcgctttcagctttaagacatacataggtcttctcattcttgaaaaatactctttatttggtcctactggttcttctgtgcatttttcctcctttttccatgctaaaattcttaatttctagtaatgtttacctactgctggcattatttaagacatttcatctcattcctgatgcctttagttatccttgtcttctcattattatcttcagtttcctcgtactcttctggtttcttcctgtctctctatatggattcttcacttttgtgggtgaaaggtgagtgggatggtggtgtgaacatggaaagtatatatattggagacacacatacataaaaactgttcctttgtttttttcctgtcttctgtttgcttttctctttttctgttttctttttctgccaaatttctcatgcaagttacttcttttttcttttctttgattttttttttttttttttttttttttttgagatggagtctctctctttcgccaggctggagtgcagtggcgtgatctcggctcactgcaacctctacctcccaggttcaagtgattcccctgcctcagcctcccgagtagctgggactacaggcgcgcaccaccatgcccagctaatttttgtatttttagtagaggtggggtttcaccatgttggccaggatggtctcgatctcttgaccttgtgatccacccacctcaggctcccaaagtgctgggattacaggcgtgagccactgtgtctggccagacttcactgtatctttttctaaaccatccacttgggccataactccctgcattgtcttccattttctccagtattgaacctctaccttcaaaggacaaatcagcttttaagttaaaattaaagttacctttctgtgatatttaacattaactgcctctcttcgatataatgctttcttctttttgatgactttttattattttcctaagggtaggtctttgaccctctgtaatttttcagaaaccttatccacatttatgatttagacttaacacacctatgctgatgactttcatttttgatcaccctctcccttgaattctatctaccttattaggcagttcatagtatatcaagcttttctgtatacataaatctaataaagatattaggctgacccatctgaaattgcaatttttgtaggttaaaaactgttaacatattgacagtatcaaacctaaaaaagaaactgtagctctcattttaataatttttcctttacatttgcatttaacattgcagaaccttttgatggaacaaatacagccagagcagtgcacgaaaagcagaaatttgatatgatcaaggatcaatttttaaaggtaaacaatgcattagatcaaccctagaaacattagtagactagtatgctttaaacaggaaaaaatacgtgtgtagtaggacagaatggtttctcttctgtgaatccattaatatagcatgatagagaacttattatttgaatttagttaaacttttccttcaaagagatctggctctgtttttattcacattgctttcactttcatagaaataagcattttctcttttctttttgagacggagtttcactcttgttgcccaggctggagtgtagtggcacagtctcagctcactgcatccttcacctcccaggttcaagggattctcctgcctcagcctcccagatagcttggattacagacgagtgccaccacacccagctaatttttttttttttttttttgtagagacagggtttcaccatgttggtcaggctggtctcaaactcctgacttcaggtgattcacccccgtcttcctcccaaagtgctggtattacaggcatgagccaccatgccctaccgaaataagcattttcgtagtgagcttattaaatttccaaaataagtgaataaaacctaatggactcttttccttccttagtgtattggggaatttattgtggccttagaaggaagctgatgtctgatccatgctttttctaatgtataccccactgtcacaggaattagagtgctgttttatctttgtttatatttaggaaagttaaaatttatgtatatgtctgtgtttatagtatgaatttattcatcagtgatgttgctagatgtggtcttaatcttcagggacttcacaacacattgtagaaatgccttgatatatgtattgagacatggaggggagggaaagctttgtagaagaaaaagatgagagaaccgcaaagatcattttagaggcatactttttcattatctagacattcaagtggactttattttaatgataatttaaaatgcaagtattgaggcatgagtatcactggaaccaggagttcgaggctgcagtgggctattatcaagttgctgcacttcaagcctagacaacagagtgagagactccacctctaaaaaaaaaatgaataaaaataatggccaggtgcaatggttcacacctgtaatccaaacactttgtgaggccaaggcaggaggattgcttgaggccaggagtttaagaccagcctgggcaacgcatagcaagacatagttcacacacacacatgcacgcacatgctcacacacacacacacacacacacacacaccccacctcacctcaccccacccctgggtgtagtggtatgcacctgtgtcttagctactggggaggctgagtggagagaaaagccttgagcccaggaggttgagggtgcagtgagctgtgattgtgccaccgcactccagcctgagcatgagtaatagagtgataccttgtttcaaataaataaataaatagataaaatataagtattctattacaagctgtcgttcaaatgagactttcttaatttggcaaccagaatagaaaatttgtcttatagaaattctttaattttggccgggcgcggtggctcacgcctgtaatcccagcactttgggaggccgaggcgggcggatcacgaggtcaggagatcgagaccatcccggctaaaacggtgaaaccccgtttctactaaaaaaaaaatacaaaaaattagccgggtgtagtggcgggcgcctgtagtcccagctacttgggaggctgagggaggcaggagaatggcgtgaacccgggaggcggagcttgcagtgagccgagatcccgccactgcactccagcctgggcgacagagcgagactccgtctcaaaaaaaaaaaaaaaaaaaaaaaaaaaaagaaattctttaattttaaaacaaatattcaagagagaatatttttgtttatcagattaaattgagaactcaaaattagcaatgctacattggtgttcttattgatgagtgagctttcatttaggattgtttagttgtaaaaccaatacttttagacaatcgaataactgacatgagactagaatacaaagatctgcagtcaccaagtagtgagacagatttttagcttgtgaacaagtttcttttcttctccttatcaattcaaatcaccatttgaattttccagaggcatacataaagtgccttattgtaaatttactctctccttcataaatactatatatttttttgagacagggtcttgctctgttacccagactcaggcagcctcaatctcctgcgctcaatgatcctcccacctcagcctcctgagtgctgggactataggcgtgtgccaccatacccagccaatttttgtattttttgtacagacagggtttcaccatgttgcccaggctggccttcagctcctgagctcaagtgatctgcccacctcagcctcccagaattctggaattataggcatgagacactatacccagtctcataattattgtttttaatgcaaaaagctagtaaagatgtaagacagtcaatcaaataattgaaataatcctctcttctcaaatccaaaggttttgtcttaattaccttgctacttttagattgaattaatccgtgaataaatattaatattgtcagttgtatctttcagtaccacctatgtgcccatttctttattaatgaattggaaccataaaaatatggagtttttaaataacattttcttttctgatgacagaaacaatacttacactgtgttaaaaacttggaaaataaaaacttagccagcctgggcaatacaatgagaccttgtctctacaaaaaaatttaaaaatagctgagcgtgatggcatacgcctgtagtcccagctactcaggaggcagaggtgggaggatctcttgagcctggaaagcggaggttgtagtgagccgagattgcaccactgcactccagcttgggtggcagagtgagaccttatctcaaaaaaagaaaaaatttgaaggaaaaaattattcaaaatttatcacctagagagaaccaactattaacattcttttaaactctcagtcttttgttctgcataaattttaggttttaagaatgatttttctttctctcccagtcatggcacagattgaaaaacaagagagatttgaacagtatactacctgtaagagctgctgtcctgaaaagataactggcctctatttcttaataaattcttccaagaaataaagaacaatagtttcatcataatacattatgtttacctccatcatagttgcttttttcatagttcttgttttcatgttttatttttaaaaagacatataaagattgcatattttattatgacatttcctaataaacccctttgatttaaaaatgtatttttaaaaatgtttacattgatgatgagtaatattgcatgtgttttcaggtgatcagataaaatatattttgggaaattaactgaacaaataaaaagtttttgatataacttcaattaattgtaccacatgctaatcctgaagagatgtgtagaattttggaaagggtctaattcatacatgcttaaagtataacctacgttagatagtttgttgtcaaagtctgttctagtaaagtgaagattcaagtcagttgttcagttacttgaagcaaaacgaaatctttcatttcagtcaaatcactgcagtcatgaaatactgaacaattgccttaagtctttgcttgactcactgggatagactgaggctttgggtgtgtctgtattagcatttcattagtacttcacatgcttttgatgtactcttgagattgctttaaattttgtattgaaacaacaatacattttgcactgtagtaatgggagcactaactcttacaacagttagtgaatcgttttaaagaatcagttcagtgtagacattttgaaaagattgtttcctgtgctttacgatagcttagtgcaatgtgcacttctgttttacttgccattttcctgctctgttttctctgtgacatgaagcaacagaaactgagatcaaagttaagattatatcctgtttgtagtatcagatatttttctgtgtacaattataggattgtaatctaaactggaatttttaggcagtaagtcaccacaaaatgttttagataagacacaataaaattattataaataaaagcttaatgtttgtaaaaaatctcttttttagtatttcttttttcacatgaaagaagtggtggctgctaaaaaaaaagctacagtgtttattaagggtctttttgatttatgtaaatatttgtaaattggtcagtgcctgtaaatttaaatataaaaagtaaccttgaaaacagttttaactttttcaaaagaactatgtccaacattttttagacctgctgtagtacagttttgtacctctaacgtattttttttttgcagaccaaatgctaaaacttttgcttttctttgacttgtaaaaggtgcacattttcattttcttccttaagttcaaatttttgtatgatgtcaaatgcaataaaatttatatatggaca

SEQ ID NO: 770 - DNA, 4682 bp, Homo sapiens
catttaacattgcagaaccttttgatggaacaaatacagccagagcagtgcacgaaaagcagaaatttgatatgatcaaggatcaatttttaaaggtaaacaatgcattagatcaaccctagaaacattagtagactagtatgctttaaacaggaaaaaatacgtgtgtagtaggacagaatggtttctcttctgtgaatccattaatatagcatgatagagaacttattatttgaatttagttaaacttttccttcaaagagatctggctctgtttttattcacattgctttcactttcatagaaataagcattttctcttttctttttgagacggagtttcactcttgttgcccaggctggagtgtagtggcacagtctcagctcactgcatccttcacctcccaggttcaagggattctcctgcctcagcctcccagatagcttggattacagacgagtgccaccacacccagctaatttttttttttttttttttgtagagacagggtttcaccatgttggtcaggctggtctcaaactcctgacttcaggtgattcacccccgtcttcctcccaaagtgctggtattacaggcatgagccaccatgccctaccgaaataagcattttcgtagtgagcttattaaatttccaaaataagtgaataaaacctaatggactcttttccttccttagtgtattggggaatttattgtggccttagaaggaagctgatgtctgatccatgctttttctaatgtataccccactgtcacaggaattagagtgctgttttatctttgtttatatttaggaaagttaaaatttatgtatatgtctgtgtttatagtatgaatttattcatcagtgatgttgctagatgtggtcttaatcttcagggacttcacaacacattgtagaaatgccttgatatatgtattgagacatggaggggagggaaagctttgtagaagaaaaagatgagagaaccgcaaagatcattttagaggcatactttttcattatctagacattcaagtggactttattttaatgataatttaaaatgcaagtattgaggcatgagtatcactggaaccaggagttcgaggctgcagtgggctattatcaagttgctgcacttcaagcctagacaacagagtgagagactccacctctaaaaaaaaaatgaataaaaataatggccaggtgcaatggttcacacctgtaatccaaacactttgtgaggccaaggcaggaggattgcttgaggccaggagtttaagaccagcctgggctacgcatagcaagacatagttcacacacacacatgcacgcacatgctcacacacacacacacacacacacacacaccccacctcacctcaccccacccctgggtgtagtggtatgcacctgtgtcttagctactggggaggctgagtggagagaaaagccttgagcccaggaggttgagggtgcagtgagctgtgattgtgccaccgcactccagcctgagcatgagtaatagagtgataccttgtttcaaataaataaataaatagataaaatataagtattctattacaagctgtcgttcaaatgagactttcttaatttggcaaccagaatagaaaatttgtcttatagaaattctttaattttggccgggcgcggtggctcacgcctgtaatcccagcactttgggaggccgaggcgggcggatcacgaggtcaggagatcgagaccatcccggctaaaacggtgaaaccccgtttctactaaaaaaaaaatacaaaaaattagccgggtgtagtggcgggcgcctgtagtcccagctacttgggaggctgagggaggcaggagaatggcgtgaacccgggaggcggagcttgcagtgagccgagatcccgccactgcactccagcctgggcgacagagcgagactccgtctcaaaaaaaaaaaaaaaaaaaaaaaaaaaaagaaattctttaattttaaaacaaatattcaagagagaatatttttgtttatcagattaaattgagaactcaaaattagcaatgctacattggtgttcttattgatgagtgagctttcatttaggattgtttagttgtaaaaccaatacttttagacaatcgaataactgacatgagactagaatacaaagatctgcagtcaccaagtagtgagacagatttttagcttgtgaacaagtttcttttcttctccttatcaattcaaatcaccatttgaattttccagaggcatacataaagtgccttattgtaaatttactctctccttcataaatactatatatttttttgagacagggtcttgctctgttacccagactcaggcagcctcaatctcctgcgctcaatgatcctcccacctcagcctcctgagtgctgggactataggcgtgtgccaccatacccagccaatttttgtattttttgtacagacagggtttcaccatgttgcccaggctggccttcagctcctgagctcaagtgatctgcccacctcagcctcccagaattctggaattataggcatgagacactatacccagtctcataattattgtttttaatgcaaaaagctagtaaagatgtaagacagtcaatcaaataattgaaataatcctctcttctcaaatccaaaggttttgtcttaattaccttgctacttttagattgaattaatccgtgaataaatattaatattgtcagttgtatctttcagtaccacctatgtgcccatttctttattaatgaattggaaccataaaaatatggagtttttaaataacattttcttttctgatgacagaaacaatacttacactgtgttaaaaacttggaaaataaaaacttagccagcctgggcaatacaatgagaccttgtctctacaaaaaaatttaaaaatagctgagcgtgatggcatacgcctgtagtcccagctactcaggaggcagaggtgggaggatctcttgagcctggaaagcggaggttgtagtgagccgagattgcaccactgcactccagcttgggtggcagagtgagaccttatctcaaaaaaagaaaaaatttgaaggaaaaaattattcaaaatttatcacctagagagaaccaactattaacattcttttaaactctcagtcttttgttctgcataaattttaggttttaagaatgatttttctttctctcccagtcatggcacagattgaaaaacaagagagatttgaacagtatactacctgtaagagctgctgtcctgaaaagataactggcctctatttcttaataaattcttccaagaaataaagaacaatagtttcatcataatacattatgtttacctccatcatagttgcttttttcatagttcttgttttcatgttttatttttaaaaagacatataaagattgcatattttattatgacatttcctaataaacccctttgatttaaaaatgtatttttaaaaatgtttacattgatgatgagtaatattgcatgtgttttcaggtgatcagataaaatatattttgggaaattaactgaacaaataaaaagtttttgatataacttcaattaattgtaccacatgctaatcctgaagagatgtgtagaattttggaaagggtctaattcatacatgcttaaagtataacctacgttagatagtttgttgtcaaagtctgttctagtaaagtgaagattcaagtcagttgttcagttacttgaagcaaaacgaaatctttcatttcagtcaaatcactgcagtcatgaaatactgaacaattgccttaagtctttgcttgactcactgggatagactgaggctttgggtgtgtctgtattagcatttcattagtacttcacatgcttttgatgtactcttgagattgctttaaattttgtattgaaacaacaatacattttgcactgtagtaatgggagcactaactcttacaacagttagtgaatcgttttaaagaatcagttcagtgtagacattttgaaaagattgtttcctgtgctttacgatagcttagtgcaatgtgcacttctgttttacttgccattttcctgctctgttttctctgtgacatgaagcaacagaaactgagatcaaagttaagattatatcctgtttgtagtatcagatatttttctgtgtacaattataggattgtaatctaaactggaatttttaggcagtaagtcaccacaaaatgttttagataagacacaataaaattattataaataaaagcttaatgtttgtaaaaaatctcttttttagtatttcttttttcacatgaaagaagtggtggctgctaaaaaaaaagctacagtgtttattaagggtctttttgatttatgtaaatatttgtaaattggtcagtgcctgtaaatttaaatataaaaagtaaccttgaaaacagttttaactttttcaaaagaactatgtccaacattttttagacctgctgtagtacagttttgtacctctaacgtattttttttttgcagaccaaatgctaaaacttttgcttttctttgacttgtaaaaggtgcacattttcattttcttccttaagttcaaatttttgtatgatgtcaaatgcaataaaatttatatatggacattgtt

SEQ ID NO: 771 - DNA, 651 bp, Homo sapiens
gaaattatgcacacataactggccaaatatcagataagtgaactgttaatatatgagagaattttctggacttttaagttattaatctcaattatttgtgtggtgagtactaaattattttctgtttgtgttgatctgtccatttctgtatatagttgtccctcagtatattgagggattgattccaggtcaaccccgtcctcttcagataccaaaatccacagatactcaagtcccttatataaaatggtgtagtgtttgcatatatcctacacacattctcttgatactttaaatcatctctaaattacctgatacgtaatacaatgtaaatgctatgtaaatagttgttatactgtattgtttagggaataataatgacaagacaaaaagtctatacctgttcggtacagatgcaaccattctgcctcctccctaccccctcccaaatatttttcatcctggttgaattcacaaatcctacatggttacggagggttgactgtatttgcatatgttgttaaagtggtgtttaaaatgtgcaatctgtactacaattctaaattttggattgatttgaactaggatctttgcaaataaatctcatagacattaatgtttgtaagaaatttttaattaaatgatggaagg

SEQ ID NO: 772 - DNA, 807 bp, Homo sapiens
gaaattatgcacacataactggccaaatatcagataagtgaactgttaatatatgagagaattttctggacttttaagttattaatctcaattatttgtgtggtgagtactaaattattttctgtttgtgttgatctgtccatttctgtatatagttgtccctcagtatattgagggattgattccaggtcaaccccgtcctcttcagataccaaaatccacagatactcaagtcccttatataaaatggtgtagtgtttgcatatatcctacacacattctcttgatactttaaatcatctctaaattacctgatacgtaatacaatgtaaatgctatgtaaatagttgttatactgtattgtttagggaataataatgacaagacaaaaagtctatacctgttcggtacagatgcaaccattctgcctcctccctaccccctcccaaatatttttcatcctggttgaattcacaaatcctacatggttacggagggttgactgtatttgcatatgttgttaaagtggtgtttaaaatgtgcaatctgtactacaattctaaattttggattgatttgaactaggatctttgcaaataaatctcatagacattaatgtttgtaagaaatttttaattaaatgatggaaggaacatagaatggctacctgtgattttgattagtgtttaacagattgccacagctgtgattgaattccttttgtactggatgagcatggtcatttgggattactgatggtgaagtctagctggtgttaagagaataaatattgctgatgctaaacct

SEQ ID NO: 773 - DNA, 4478 bp, Homo sapiens
gcttcctgcctcaccagttggtacattttgtttttgaaagaggtgggatccaaaagagctgtttctagccacactccaagcacctgagactttgggcacaaggacacttttttttttttttttttttttttttggaatctcaccacacgggtgctctgacctgcttggaagaggccaacggggcagctctggaagggttgggggctcccctgacaaggcgctggggctgcagctctgtttagaatcaccttcgtggaccctgatgttagaatcccacccccagataattacctttcaagtcttaggtgagcagaattgcatatttattgagaaaagcaaagtggaccctttcttcctctccccttagtaatttatttttctgaaaatggattcttttgtgtttgtacagattgctagtctgtgtctgtctgatcagaaggatgtatccccatacctaacattccatatcactacactgatgtgggctggggccagtaggggcaggacaggtgccaggctggctgttcctctgcatgcctggtgcaccctgtggccgctagcccttggccaggccatcctgttgcagatcccagtgctgccacagggacaccaccaggcacctccctaggcaacgccaagcaggaggacctcacccacacccatggcaaagcaaaacaaaagaggcaccccgaccccattctacagaagccccagtccatggtcacctgtattctacctcacactccagcgtgggctttttccaggatgtgccctgagcctgttctgaacagctgtaaccccaactcccccacacaatgtgtctgcctgggaggtaagtaagtccagactgggtgtccaggagctggaacccagagagcgtcctgtccctaaccagccactgcagccctccagctctggccctcagctgcttgacaggacggactgctgggagatggcagccggttggcagggcccttgccctcacaccccgctgcccaggagccaggtctgaacttctgtgcacaggcctggcccctcagactcactcctgccaagaggggccacttcttcagggtgagccccggctatcaggcagccgtgagctccagggcgggctgcagctcccatccccttgcgccatgtttggagtaaagggatcagtggaagtggaggagccacttgggttctcctaagaccagcccttccggaggggccggtcctggaagaaacccataatccctggagtgtgaaaaagggcaaaaagaaaaagctggcctggtttccttcctccctgattgattgattgataggcacttcctcttgctcagtgcaatacctaccagtgctgctaaaccagggactcgcccagacctcagcaggcccccagggcctctccgtgcaacactccgtagccatgacagcagctctctgctgcccgcccctgcccagagctggcagaagccctctgttgcctttcctccctcagagcagagaggccccaggggagccagggccgagtggatcctaggatggccacggagagccactcgctcccagaacaggcaccccttcccaaaccagcttttctgcagccaattgcctgttgcagctgtggccactgcctcccggcactgtggcagactccccccaaggagggatggggggggcaccagtgaggatgccccatcctgcctcaggtccagaactctgaaaggtagggtgcccaccccgtgcttacttccggcccctagaggttgggggtggtcgttatctctcaagtggcctccaataccccatccagccacaccacctctgccttccatctgaccaatccccaggcctctggtcagggccaggacacctgagactcacccttagcacagcacaacctccagtgcccaaggcctctcccacaccccagccatccacacatctggccccacctgctcagtactactcaacatttgaattcgtgtaaatatttatttttgtgtgtgaacaatactacaaagtaatcagtaagatcttttgcaaaaatgttaccccaggcaattatttgtgaaaatcttaatgttaaaacctggcagagacaatcgccaccctagaattcctggtatcagttacttaacgtgtcacttctcctcccagaggcagtacccaagctagacatgaaccgtttgcatttcttggcagacaggagtgagaaagactggggaaggggctccctccccctacccacacaaggattagatctaaagatcagcataagctacagtttgaagtcatgtttttctgagttcaagctgttggaactgaccaccctccagcctgccttagtactgcggcaagagcgtaggttcaatgtgttttcaagagaaaggaaagaatatgttgttaaagtccattgggcctcccaggcccctccaggacaatggatttcatcatgtcgaccccacctcttgggtgggctcctcctttccagtgaaactacacctgaagccctagagatggcagaatcaggagcaagtttctgcatggaaacaggattccatttagctggctcagtcagggaacttgttttgcttttgttttaaaagatgcagcttcaaccccttccccctactcccgacttggagggcaccaaagagctggttctgatgaactaagctcactgctgtctcaccctcaccagagggactgccttctcccaaaaggagctcccaaagcccttgtcccacagccatttaaaaatcttctgaagggcctcagggcacaaagtgatcatttgggatcctaagttaaaaaggaaatgcaagagtaggatactccaattccagagtctttgcaggaggctaatcccacaagaagggtagcatcagagaagtgggcattggtcttagtggtggatcatcaggtagacaagtgatagtgtgtgtaacccatctgaaattcattttaccgtcaccactcttacaaaggacagtttattcccaaggacagtgctgacggggagggggacaggcagggagttaggagggttttcgaggatttcaaacaggtggaacccatccatccctattcccaagggccacttacaactctaagggtggttacaggattaactaccagttcattttcaaaatgctgctttgaactcagagggttgatacttttaatttgtaattttttgtaaaactttttacaaaatagtaaagtatttcaccagaataccagtttcaatccgtccatggtctgatttttatataatttagtggtgctttagaaactttgtttttgttgtttctgagctaaacagctcaatcctttttcgcctgtatctacctaagaccaatgtgaacctttgtatttttgctcctaattttggactcagtgaaagtgtactgtttacatgtacagatgcccccagtccctgtgtgttctgcaagacttgctcttgaggaggaagatgcacctcactaagctcatctgcttagcaaagccacaaacaaaaacctctcactttttacctacgtttccacctaaaaatacaacaaaaaacctataccacgtagaactcagattggctgaaaaacactttccacctggtagatggcccatatgcctcaattatgtggtccatttaggagcaggagtcagaagagagacctcttattggctgctggtgggtaactgcatggacagaggaaaagggaaggcaggactttgctgcagagctgtgggatgaatgtagttcttccctgggcagcctgggagtgggaaggtcagaatgactcatgttgccttcaggatcaagccatccaggatttagggacaacccaagaggtctttagtcctctggcataatttagacatgttttggaagagcatgagttccatatctgagatgagatttaagactttcagtgcagatagtacaagccatttcttcagggttcctctgggggcagctccttcatgaggtcccacctccggggaggggcacagggctccagatagtaagcacttaaggcaaacagtggatggcaccaacttttaaaggtgactctattaatggcttcacctctaaattatatttttacagatatgcacctatgcaacttaacgtggctcttctaagcaggtgaggacttcctcctcaatgctctctataaaaattatttgtgttctatatagtgagttttaccagtaaatgtggcttaatattttaattcttagaatgtgtcttctctacgtgatgtgactaaattctgttttgtttgtggaatgactagcacaggccgactccctctctccctcacttaacaaaagaccaatgagctgttaatcgagctgttatctccatggtattacttgctaaatgcactgatttcataagtatgtggaatccttttccttttgaatctgtatatcatatataagactgaatctacttaataaacactgaacaacaaaccgaa

SEQ ID NO: 774 - DNA, 5681 bp, Homo sapiens
gcccatctccaagcagcccaaggagaagatccaggccatcatcgagtcctgcagccggcagttccctgagttccaggagcgggcccgcaagcgcatccgcacgtacctcaagtcctgccgtcgcatgaagaagaacggcatggagatggtgagtcccccctgcctggcccacactttccctcggtgccactactgacctcctgccacactcccaggatgcccgggccccttcacccagggtcttcccaggagccctggaagcaagtaccataatccctggtttgcaaatgagggaactaaggcccagaaagatcacacagctccatagactgaggcgctggagcccaaaccccaccctgtgccacccacccctggggcagggtctctgcacaagcccagggcccccacgggccccatgctagctccatccccgttctgcctgcagaccagacccacgccaccccatctgacctcggccatggcagaaaacatcctggcagctgcctgtgagagcgagacaagaaaggcagccaagcggatgcgtctagagatctaccagtcctcacaggtacctgccaccgcagccactacaggggccgctcctgggcagccagggagggcaggccttatatgggtgtggactgagggagctgtgatgggtacagtcgggagaagggcagagggggaacaggagggcaaagacaaggagaggaggtgggtggaggtcaggtgtgttgttctcagagctcctcagacctcatacggaagcctggacttcatctggagaccagagggccctgatcaaatacgctgacagggagatgagcagagttggggaaagcccccggggggaaggtggctgggggaggggacagacagaatcccacaggtcaaaccgcagcattgggtcccaggagtcctggggccgcagcatttatccaccttgtgtccagggatggtagttggggccagctgccccttggtttccccagcgcccccctctcccctctgcaggatgagcccatagccctggacaagcagcactcgcgggactccgcagccatcacccactccacctactcactgccagcctcctcctactcccaggaccctgtgtacgccaacggcggcctcaactacagttaccgcgggtacggggccttgagcagcaacctgcagccccctgcctccctccaaacaggaaaccacagtaatggtgagtcgggggaggcctgggctctggcttcccgaccagcacccagctgggtctgcagagcagccctgggcagcggaatggggagagggaagcagaggccagtgatggaaaggggctgcctcacagcatagggagcaggaggggcggctctggcacccttccacttcatcgtcttagctggtccttagattggaaggtgaaggagactcagttggttaaagcaaaaacctaccgcccccttctcaccgccagtgacgcttgctccaacacttcccaccttcactaccggcgcctctcactggttccactcccccagggtccctgtgggtgccgagtcccagccaagggcctgttcttggcctgagttgaatctccgcagccccgtctgtctcacccatagcgactgaggctcagtgagacagctgctggcctggcccagctgtggccccgctggcctgcagggcggctccctccccaggcctcagctcagggcctgccttgtgaggtgaaagctttcctcacctgggtgctgggcctccgttcttgcccctgcattcatggagcctacatctgagacacctggggtgatggtgcacacctgctccctcgctccgctcctgtagctgggtgattcagtaggtgcttttccggtaactccccaggctactctgcgcagatggggcacagaccattagaggagacagcccccgaagagacagaggcttcctcatggagtcaggtgctgccgtgagcacgaactggaatggggaacctcagacccctttactgtgaggccaagggaagcaggggaggagtggggtcagcctggtgggtcacaggacctcttgggccaggcactcgggttgtgttctgtgtgcaggaggagcccctgctaggttttaagcacagaagggccgtgaattgtgtggtctgtgtcattctgtctgcccctgtaagaaggtttgaatgggcagagcaagaggcagaagccatgtgctttgggggtcgttcagaagccagggaatgaagggaagaattgaggaacctgagtaggttggagaaaggtgccacctgtaagctggggaaccctggtgcaaggtcttggctaaacatgcctgaggattccctaagcccccatccttggctgcaggagacccctcactgttcctgggcagcaagggagggagctagtccccacccatggcaggaagcccaggctgcctccactcgccttgacccccgccaccccccagaaccaggaagtgtatgcaggtccctggaagattcctgcctgggcttaactcctcatcccttcctaatgcctcttaacctaaaataagaggccgcctggccctaatccctgaagctaaggccggagtggccagcacggtgagaggtggagtggctgtcctaggcgggctcctttcattccaggaagaaaagccctgccccccctacacatgggggtctggggctcagcaggtgaggtgagggtggtctggggcctgctccctcctagcagcaggcgatggtgacaagcctctacctggtgtccacccagcatgacctatttcagggctgcggctgccaagtccccctgaccctcctaagggcctctcatattagggctgagcctgcttcatgcctgcccgttcacacctgcccaagaggcacaaacagcagccagagaatgattcttccagggaggcagctggctctgcccttgtgcatcctggggtctcagtctcccatctgtgaataccctggttccttcatggtgggtggggaggccactgacgcagaaatctggtcatttacctccttgcctggggcagcccctgtccttgagcactagtacctcatttgaagaacattgtttaaatcctccagcagttgaaggaagacaacaggcagccacgtggttgcagggccacccagccccactggcctccccagcctcagcctttcaagtattgttcaatcagtttggtacctcagccgggcagccgtattaatggctcagagctcctcactttgctcattatgttgtcatctggagatgcaaatcagcttagatagaatcaggctcggcctgtcttgcctggggtgctgggtaactcatgctcactcctatccctctacccaccatacggcagtccctcggcaacctgagcatctggctgtaaccagagtctacacgggggtgtctccagatcagatcagctgcaggaaacagggaccttctcctttccaagcctcagctacagcccaggagagaagggaggaagctctgagcacaggcatgaacaggatagcacttggggagaggagaaaagaaaggaaccgggaccactgctcatgttgactatgccaggaggctctggccactcccaagcatgacgcagaggggaccagaaccaccctagagagaaccagaccctcttcccccgcatccctctgggtccatcccctgcaatatccagaagttagcagaggcactcctgttccaagcttctcagtcccgcattgtgacaacaccctgggagtcagtcacctgtttggctgctgtttccagacacagccccaaccccttccccctgtgtttgattttaacagactcaactgtttccttaactctcaattccaaggacgctatttagaaaatagttcctaggacctcctccttggtgtccacattctctggccggagaggaaataaccccatgtgacaaactgtcccatcttagactccagcttccttccccatttgggggctgcaccagcttccttttagcagcagtcaggtttccatagtttatcccaagatgttacttccagtctggatacctcccgtgacaagagcttgtccatctctcttcatagcagcataaaaactgccatggagatgcaatcatgagagaatgtgaccatcagaactttcagggtagctgggggagcctcacacccccgtggaagataaagctgtggggaagggactccagggggagggcagacaacagagaagctgacctggctgcatcagagaaggcttcccagggaagcggcagctctgcctgcacctgcccagattctctcttctttggctgtttcttgccgaacaccttgtagaatgcttttcaaattccaggagcttccaggtctcctgggagcccattcagaaagccctgaaacctctttggaagcccttccctattgggccagtctaggcagtcaggcctcctgtgggctgagaaggagcctcagcctgtgctgagtgtttcacagccggcatctcagcttctgctcgcaggagccgcctagttttggcagatgagggctctgaggcccagagaagttaaagaatttgccaatgaagtagcagagcaggacttgaatccacacttgcctgactccaaagccaggagcttcttgggaaaggccaagagaggacagggcctggcggtcccctccccaacacgcacacccctagtgtgttttgaaagatggcaggctccctctttgccatcatccgaggacaaagggcgggcagtttctccagaagcgagtctgagtcttgtcctgatggttccggcccacactccctcgtatcctagcagcatgaaccctccacctcactcaggcacaggactcctcccaggaggggggattcgaggtgcttgaggcttagcagaaagaggcttcacacacccagccccttcctccatccactggctgccatggtccctcctgggggtgcagttatggcctggccagtctggcctgtacctctccccccagacaaccagggcagctggcctctctccagctggacagaagcccctttcttgtctgggcacacagatgtttcttctcctggccttttgtggctcgactctcagctcctcctgggctttccccacacgcatctctcaggtgtgttgggcccctgcctacctgcagagtctcctgcacaccatctccccttccagcctcggtgtctgggctggggaagagcacacagatgggtgctgctcctttaggcacactggcagaggctttcttttagcacttgtcccacagttcctcaatggaagtagtatttcccattcccaagctctgctcaccacactgaggagaggcagatcttaggagttcctttgccccaaggccgcctcttcctcacctaaaaccggatccttgcaagatcaccctgaggattctctgagaaccctgtcgcccgcaggcccattctaagcactagggatagagccatcagggagatggaccagagccacggacttcagtgcccaactcacagtgggcactaggccataggttatgacagtgccaaggaaggtacacctcccagatgccaggcagggtggctgctcccttctcaccctacttccctctccacagggcccacggacctcagcatgaaaggcggggcctctaccacctccac

SEQ ID NO: 775 - DNA, 583 bp, Homo sapiens
atagacgagttgaagattttgtttttcatatacaattcagccagtcctagctaaaacgcaatcactggaaatttaaccttaaattcatttaaaactgaaaaaggtcttttgaaatcaaactaatgcagaaactgctttacccaaaattctgatccatggccctcattagacgacccatcaggacaaataaagtttagcttgtgaacaagtcccagttttgtcaaaaatataatttggattgaagtgtcttttagaaactgacacatttgtgttattatctcatgaccaaaattctaaaatgaaagctacagtgtctttatttgtgtgcgtatgtggttaagtgtgtttatgcatatgtatgtgtattatgttgtatgttgttatctacatggtaaaatctggcatcatcaacaaaaaatctattaagggattctatttagattggcttagataaataagcattcataaaaaatatgtactaattaacccaaatgccttttagttcatgtgacttaggtatatctttaataaacaaatcagttttaaaattgttggtaaaataaaaatacaaatgttctcagaa

SEQ ID NO: 776 - DNA, 3200 bp, Homo sapiens
gttgtttttcagcatattctgtctttctcctcagtcaaggaccaacctaccttttcttttctagtgctgaggaatgtaaacaagtttgctgggccttgcgagacttcaccaggttgtttcgatagctcacactcctgcactgtgcctgtcacccaggtgaggatacatagttcccagcttttgtccggactgtcggactgttggggatgcctgggaatggggataggttttaatgcctatcatgggaccagtcttatagctagagtcagggaaggactcagcagtttaactgtggtgaacagctggaatatacagggcccggattttcttgggcctgggcagccagtaattgtcagtgtctttggggtaccattttcacctccataagaaagtaactgttacacagtgcattgaaacattttcttcccccttccccttacagacacttctaagatggtaagtgtacatggcaacaaacaaataagtatttttaacctggccactttggcgaaaacaacctcaagttgactgttatatgtggtgccagtctcctaaaactgaccctccagatgtaatgagcaaagagcttattcttatcacttttatgacctgaatgctgaagtgccaggttttgaccagggcaggaggtatgaattgaatatcccttatccgaaatgcttgggatttcggaggaaaaaacactttcagaagtgtttttcaattttggattttttgggattttggaatatttgcagaatgcacaccagttgagcattcctaatccaaaaatccaaaatccaaaatgctccaatgctcattcgcttgagggtcatatcagcgttcaaaaagtttcagctgttagggatgcttggcccttacaggagaggaggagcatctttggctcccgatgagcacttttctccacgtgctttccgtctcctggttctgaagcaaagcaagaagcttagctgaaaggagtgggtagtagaatttgggtgccagtttcttgatggagagaagaaaggtagctctcctctaagcccaccctttgatgtctcaaggtgagtttcttctcccaggaggcaattcttgatgaatctgtagcactcactggtagtttctgtgttaaatgcattcataggtaaaagtgatgttcagcagtgccttgccacacccaaaatcatttctcaactttgattgttttaatgagtaataatatcatttgggatgtcctggttttgcatggtgtctgggttagctgacattgatacacctcataaggttgctcatggacagctgtaggtgttcatggttaacttttattgtgcccttactgtgtgtcagggcactgttttaagtgttttagatgtattaactaagataatcctcatctgcttttctggatttgttactatttttcccattttacaaatgaggaaattgaggttcaacaatgtttaacaatttgcctgacagttattcgtggagccagaattcacatgtagatattctggtaccagagtcctcactttgaaccactccgcttaatacagtatcctttcgatagcatctaaattggtgttttgttttgttttgttttcaactgttattagtaggcaaagccttctttcaaaataaaatcgacatgaagcctgtgggatttagcagactgaggcaaagcttccctggttgctttggaatgggaggcctggacctgctggctctttgccctcctgacacatcatcccttgtttccacagcacactcagcattggaagcacactgcagacggtgtctcattaaagcagtagctcccttgaacccacaagttaaaacgccagacttttatttatttgtttattttttctgagttcttattggcagacttcagaatgaggtacctgaggaaatatagaaacctctgccttaaggttgattttactaaatgctctattttctggtgcagttattgactgtcttatctcttttgtcaggaatgtcttttttaattagaagacaggaagaaaacaaaaaccagactgtgtcccacaatcagaaacctccgttgtggcagaggggccttcaccgccaccagggtgtcccgccagacagggagagactccagccttctgaggccatcctgaggagttcctgtttgggggtgtgagggaaaatcagcgcggattttaaaaagatggctgtggcctgcccggcgtggtgggaggggagctggtttcctggtgaactttctaaaaggaaaaataattttaagtaaagaaaaaagaaaaaaaaggaagactaaacagaaaccagaactgaaacattcacctggtagcaaatgacacatgcacgcacacacacatacacgcacaagcgccagtgcgcacgtgtacacagaaaaacaaaaggacaagctttctgtgaaacaaaatatttacttagggataatgtggggattcacatgaattaaatagctgcaattggaagaagagggtcagggtcatttgttcaggttttctattgttttgtcctctctttcctctcctacccttccttctctttctctctcccctccttttaaatgcaaatgagtagaaatttcttctaccttccccagctgtttcttcccacctttagagttgtttagacaaggaggagtaagcaaggaacttgttctgctttctatcgtggtcacattggtgatgctcgggacctgccagggtcagaatttatggatatctgaaccctgaccccgttcattctctcagtccacttccaatccacatcagtttgttgtctgccttggagagaagagccaaaactggggtgggcgggtgggtggggagtgcaggatataaatgtgtaagtttttgttttttaaggtttttttcttagtgaattattcacccacagacatgagagaaaaaaagagggagggtgtgtggagaaaaaatgtttacagggctaacaagggatgatgtgtcatttagtatgttactaaaaagtgtggaaatgacttgattttaaggggagggtgaggccgaagagggaagcccaaagcagatcttaatgtttcaaaggagtgcagcccttcacagccatcagatatgagggcactgttctgtctggtgttgtagccatctcaagaacaaatcaacagcaacaaaagagaaagaataaatttttaaaatttaaccagt

SEQ ID NO: 777 - DNA, 3200 bp, Homo sapiens; identical to SEQ ID NO: 776

SEQ ID NO: 778 - DNA, 337 bp, Homo sapiens
tttatttccaaaagtttccttgaacccctaggtaatacctgtttcctccctcttcccatccatccccatttccacataaccactggtttgttttctatcactgtagattagtttgcattttcctgagtttttaataaatggaatcataacagtctgttatggcaattgggctttgagctaatacctgcagagctgtattctaatgtgatagatctggcagtgttgttgatatactgacacttctctgccttttctttgcctgtcactttaactttttcactcctgggcataaatcctcaagctacagaacaataggaattggtgaaacaaatcttcc

SEQ ID NO: 779 - DNA, 337 bp, Homo sapiens; identical to SEQ ID NO: 778

SEQ ID NO: 780 - DNA, 3055 bp, Homo sapiens
ggagtcacctttcctcactaggagctgtttgcttcagcaaagcaggatttgaggagttggggtctgattggggaaaagcttgctgaggtggaggtggcgataagcctggacttgccctcacctcaccccacaggccaggattcgtctttgggtttcagggtgcatgtctgtcttagcactgactgcgtgccaagccctggatgttgatcaggcagacacgggctcagcccttgaggctcacagtgcggtgggttgcacaggcagcggcagctgatccctcttaccgggtctccttctcgggactcccttcagtccacttaccccgtttctgccccccaggccttctctgggcagtgactgtgagggctgacaggaaaggcatgtgcagcgtgcttgtgaggagctcagcacagagggtggggtgagggcatgtgttgctgaagtctgcatcctgaggtgcctgtggcaaaccactcttcccttctgtctcctcagttcagccaggccctggccatccggagctataccaagttcgtgatgggggtaagttgtgccagctgtccttccttcccactgccttgcggacccaagcggggcctaggaggccaaccctggtaatggctggaggcaggtcttggtacagggtgttggcgtggtgtgtccctgctccctgggccggggtgggtcactggcactcaggcctctctgggtttcagattgcagtgagcatgctgacctaccccttcctgctagttggcgacctcatggctgtgaacaactgcgggtaggtgtgcgcccctctacttgccactctacctaccaaggctgtggggtgggggagacccaccgagcccttccagcactctgccccctcccacctgctctgtgtgtaggcttggcctgccaggcaccctggcttccgctgggatttcccagcaccccctggggtaaactgtggtgtcaggggtcagggtgtggatgggtggtagcctgaaggcattccttcttgaagtggctttcccgtggctggctgtcttccactgttctctgcatctacactctccttctccggcaggctgcaagctgggctccccccttactccccagtgttcaaatcctggattcactgctggaagtacctgagtgtgcaggtgagcaagcactggacggcggaggcctttcctgttctttgctacatccttcagctgaaatggttttgtggatgcttcattgcatgcaaagataagtggtttcatggaattcaatattgtgaggagatacttggtatctataaggcatttaagttttcatcttacataatttcagaaaggatttgaggtggctaagtgtgggtttattttaagattatacatcagacaagaccttttcttctttgagtcttaaagactcttaggataaggataagagaactctggcccaggtggcaggtggtaaagcccaagaactgcttctccttcaagtaacatgggctgaaaattcgaggtctgtaaccagttgagctgagttcctgggttgttagggcggctggcattggaaaccgactcctccctcctgcaggacattcctgggcccaggagagcctgtgggtggggctgggccacgtggggaactggcagcagtaccaaccttgggttctcgtgttctgtaccgaagctacctctccgtagctggagctcttgggcccagcagtcaggggtccaggctttggccgagggcagaaccttgccttttcctggccttgatttgcctcgcagtgaaatggggcagtggcccggagggagccagaactctgagtggcctcgaggctgagaagaggacagatgggagggaagcagggaggagagccgcagttcttcccagtggccctggtcagcgtgagtgtgtctcgtcctccctatgagcactgaaagagtcctagaccacttgggctctgaagcaagaggggcaatgagcctcctctctagggctctcctacagagtagccccaaagacacccctgggcaggaaatgaaccgctcccttctgcttcaacacaggcagattctgccctccagggatgtaggccgaggccgtccaccccggagctgggtctttgagctcctggacccttctttgcctgacactggccttcctctcggagggacaaggaagcgtggcctccctttcactcaccttacttttccttctggtccagggccagctcttccgaggctccagcctgcttttccgccgggtgtcatcaggatcatgctttgccctggagtaacctgaatcatctaaaaaacacggtctcaacctggccaccgtgggtgaggcctgaccaccttgggacacctgcaagacgactccaacccaacaacaaccagatgtgctccagcccagccgggcttcagttccatatttgccatgtgtctgtccagatgtggggttgagcgggggtggggctgcacccagtggattgggtcacccggcagacctagggaaggtgaggcgaggtggggagttggcagaatccccatacctcgcagatttgctgagtctgtcttgtgcagagggccagagaatggcttatgggggcccaggttggatggggaaaggctaatggggtcagaccccaccccgtctacccctccagtcagcccagcgcccatcctgcagctcagctgggagcatcattctcctgctttgtacatagggtgtggtcccctggcacgtggccaccatcatgtctaggcctatgctaggaggcaaatggccaggctctgcctgtgtttttctcaacactacttttctgatatgagggcagcacctgcctctgaatgggaaatcatgcaactactcagaatgtgtcctcctcatctaatgctcatctgtttaatggtgatgcctcgcgtacaggatctggttacctgtgcagttgtgaatacccagaggttgggcagatcagtgtctctagtcctacccagttttaaagttcatggtaagatttgacctcatctcccgcaaataaatgtattggtgatttggagttttt

SEQ ID NO: 781 - DNA, 18038 bp, Homo sapiens
gggagcttcggacccggaagtggcgccctgggctcgcggcggtgccgcggggatggcgggagccggagctggagccggagctcgcggcggagcggcggcgggggtcgaggctcgagctcgcgatccaccgcccgcgcaccgcgcacatcctcgccaccctcggcctgcggctcagccctcggcccgcaggatggatggcgggtcagggggcctggggtctggggacaacgccccgaccactgaggctcttttcgtggcactgggcgcgggcgtgacggcgctcagccatcccctgctctacgtgaagctgctcatccaggtgggggaccagaggcgccgtagggagatgggaggctgatgtgaaggtgacaggccaggatttggaggattggggcgggcagtcaatggcgacggatttggggagaggggtggggacggcgggtttggggggccgagtgggtgggatgggagggaagccgtgagggagttgggaacgcaggggtcacgggttttaggatacagaaaggagaccaaggggttagagtaataacagatacgggagagggtggaaggaacaagcgatttgggggagtgccaaggagggagcgatgggctggaaaaacatatttgggagataaaggagtggggacgatggacttgggatagggaagggagcgaatttggggcgagggaagaagcaatagaattgggggaggggcaagaagtttgggtgaagagatggggaggaaggttgggggcccaggcaaagtgtttagagaatgaggagcacataattggggtagaggggaacggaggctctggatttgatagagatggatttaaaacgtcttggggtggggacaaagtgggcgccagggccagaaatttaggagggaaagaaggacaccagactgggggtggacagaggagacggaggtcttgggttgcattgtgatttaatttggtgggagagtgcgaaggcaaagacttttgcaggggaatgctatcggtttaccggagatgggggctctggatttgatggcgacgacggatttggtaggaggaggggacagggtgacgcgtatggggggaggggaacagatagggccagcattgggggaggggagtggcagcgatttgtctagagaggggagctaggaggaggctttaagcggggaagggggatgacgcatttggaggaggaaatggaagtcatagttggggtcagagagaggaatcacagtgcttgtatctgggcagatgaggagaaggggcacgggagtattgaaattgggcagaagggacagtggagacataggtggcaggataggtagggactaccagaaattgagaccgaggtagggatgtctctggaacagagggatgcataggcacttggcagatttggtggtggccagcaatgcggtacagatgaagtgtgctgcttgaggagtgagctggaatgaagggcgtgtggaggtgtgagaattaggtgggtgtggctgggatgggtacagttttgatgggggtcattaggccagaattttccagttaagaagcttggggggaggaaggtaaaaattgaattggagacccatccaagatttgagttgaggcaggtgggtgtcagattttaccatctttataattgaaccgagagaatgcaaaatacaactggaatgagaaggccttgagaatgagagtaattgaaatctgggatccgaggaatggtaatagatttgtgggtgtgaccaggaatatgacaaggaatgaggagattcagtcaggggcatcaaggtgcctgactagaccctaattgtgacagatttgaaaattgttgatggcggaaggtgtagaccagactggcatttggttgtgatttgggaatgagggctgtcttacagggttaagattgtatttacagcagttgaacttgaagtttgggagataaattggtgctttggacctgagaagtgagggttctggaaactgatggaatgagactgagtgagggctaggattttagggcacaggtgggagagtctgtggagtgaaggatactggagcacaagggctcagtgtgagggaaatgaagaagtggcttcatcatttggatgatggcagatctggtttgaaagaacattgaaatgagggtggtttgggaagggaatgggggaatgaaggacaccaaagcgtgagaagaactagatggtgggcaggtaaggatggatgagccctgttgaaggaccagaggtgcctgtctgatttgaacccagctggtgttgagtgtaacatatattagggtaagatcttcaatgggtatagtttgggaatcagagtaataacttgcagaaaggcaaattactgggagtgggggtgtcaggagtggagtgacagatttggggattgtctagattaggtgcgtaagaatgcagtgccttagattagtgcatgtggctgtcaggtttgggagtcggagattttaagatgacagactgtccctgctggtatctgatatagggccacagcatttgccgtagttaggactgggttaacagatttgaggttgaaattgggtttaatgacttgggaacaaataattaaaacttgaaggcaggaggaatgggggtgagatacagccagtgtgcctatgataacccaatagaagttaagaaaatagattcaacagatttgggagccatggggatatgggataacgttacaaatttaagtatgaaattggggtcagtgggactcccaaatagtgttgactaaactggataaggacagcaaaagagcagttgtggcgatttggagtggaggaataaaggaataccacctgtatttaagagaacacagatcaagacaaaacttaattcagaacaaccttggagcttttaacccagaagggaaaaggtctagaagggaagtactcactgcctgggtcagctgactcacccctttcctcctttgctccactgggtcaaaatttttttcttttaaagacagtccccatcatagaggagtttttaaatttacaatcattaatctgttaggcatctcagaatcagatccataggagatagcctgaactttgaaaagcacttgcttgataaaggcaaaaggggacagggttgatcccaaaaagcactggaagcatacctaatccagtttacaaggtagcgctttctaacttgccacttctactgcctcccacagctgcaggccaaatcctctcccacatgtcagaggaatcgctctggtccatgggcccagctggcctgcttagagggcacagggctggtatcctggccccttgccaagggaggaaggagccttctcactccccacctaggtgctggtctccttgacaccttgcctcctccctggcagcaggggctctcacccctcgacagagacttcctgctcctcacatggatatggatggtccttcacccacccgcgggtttaataaatatttcaggctgggcgcagtggctcatgcctgtaatcccagcactttgggaggccgaggcgggtggatcacctgaggtcgggagttcgagaccagcctgaccaacatggagaaaccccgtctctactaaaaatacaaaaaatttgccgggtatggtggcgggtgcttgtattcccagctacttgggaggctggggtaggagaatcacttgaacccgggaggtggaggaggtggaggttgcggtgagctgagagcacgccattgcactccatcctgggcaacaagagtgaaactccatctcaaaaaaaaaaataaataaataaatatttcagatataagaagcatctgtacagcaagaactatcatagccctacagaaatgagggggtcgttttgtcacagggatgtagggtgattgaggtgagaacgcagctaaggatatgtttgaggagtagctggaatttgaggtaacagtttgctaagcctgggaatgggaggaatagacatggaggtgtctgcagtagatttggtaagaaatttgagtttggggtgcactttggaatagatgacttaatggctgacctgtctgaggtttgggtatgatgtattttcttattgccacatttggaattgaggttggaatgaagtttttcatctggagatgagaataactgagatttgttctgagatgggagtagggtttgcagtacatacaaatggaggtttctctactgggaatatttgggatttgaatgtaagaatgttggggtgtgggtgtgacttggattgtggttggacagtgtctgggaccaggcatttctgttgattgggagtttacgtgctgccaatggttagagacactgacgagctttctggtatgctttgatggggaaaacatgaacaagagccacattagaatttgtgggagaagagttaagcaaagggggcaagaggtgtgaggagaggtggtgaggctgaatcaccacgagactctgagcgtccctttgtctttgttaattctgaaggtgggtcatgagccgatgccccccacccttgggaccaatgtgctggggaggaaggtcctctatctgccgagcttcttcacctacggtgagtgtgcctcccaagcaggaaagcccacaccaacagaaaagaggcctcaggtggggagcaggaccagctggccccggggaactcactgcgcagcatggcacgcagtcgagctggcatggaggaggggatctaagcgtgtacagagaggacatggtgtcggggtgcgagcaggtgaaccatacagctttggtccagctcctctgcctgtagctgccagctgccagcccagacagcaggaggggacagacacaggtgcctgagagaggagccaatctaggacactggtccctattatttctgctgccccgggttgtgcctggaacatgcgtgggggtgatttccttttgtcctgtgagcagcctggccctgctactccagcaggaggcccggggggtcctcttgagtttttttcttttatcccacctgggtgtcttgtttcccctgcattcctcaggcagtgagtggtgctcactcactctggtgtctccatctgttggttacagaatggtgtgcagtgaattgcagcttcacttctgtgtgctgcgtgagtttgggtgggccacttacctgctgtggcctggctgcaccccttgtctgcaaagtaaggtcagcttctcctgcccaggccttcctgcaagctccccaactgtcatcaagaagcccaccttgctgcctctgctgcccatcacctggcccacaggtgccgtctggccagggccttttcatgttcaccctcactgtccctctcccagtccctaccctcaccagatgaccatgatgaaggccttctttaaatgtgccctttttctccgtgttcacagctggagttccattgcaggcaaatcccctccagtttcctgcacctctgctcttacctgtttggttgtctagaatattctccagaatctatctttctgttgagtaacttggggcttggcctctgtcttaccttttccatttcacatgctgttggcagaattgggtgtcatatttctcttccagttttgtccctgtgttgttgagtgcagagtctagggccaggtggaatgtgtcatcttgtgaggaaatgtgtttgtgttgttttttacttaaaaattgtcagcgtagtggagaggggaatgacagaagtaggaaggcaccccaccattgtgtagtgaggcagtatacagagaggtaaggcagccggggcagatggctgcggccctgcacggggctttttctggatctggttgcacgtgctgtgttctgagaggcgaggttagagcccagatcatctctattcatgtgacacagccattcccaaaaggacttagagcagagggaacttgacccccatcttaactgtctcttttgaggatgagcagagttctcaggtgtgcccccagcctggtttatataaatgtagctttaatctaggtgtgagcagatgtctgttggggatctctggacaccaggcctactctggagtcagagaggggacccgccatttggctctctggtacagtgtggacagtgtctgctcctctacttgtcatggctgaaagtactgcagctgtcatgacattctctggtgtagaagaaagaacttcccagagggtttcctggcactgcagaaagacccagaatgagggaggccctgggacccacagaggcccctgcaggcatttcagcacgcctccctccgctctcacttgttcctcagttctctcagaaatggagagaaatgacggtccttattccttctttttttacaggtgggcagatggaagagggtcgatgttttgctcaggatcacaaacagaggtcctgaggctccctctcctcactaggatccaccctcccccaaagcaaattttccttttgcctgttcactctgtgaagagggctccttgccaagtcacccagcatcccctcccctcctcctcctctccttccagcccaccctcatctcaggcaatcacatatacaggtaacaggtgttctcagcctcatgaaaaacccatgctagctgtgacattgaattgctgggctggcagacatctgcggaggagcaaaaggcatatttgcttcttcctgcctctgcgcggtgccagagagctaaagtcatggtctaacagggggagcatgctgtctgagagaatgttctgctagcttccagatgcacaggtttataaaaataccaccctgccatttaaaacatgtttaaaatgttgatagaaaacaatgaatcgtatccttagaaagacagaccctagtgaaagaaacactaactcacacaggtagggtctagcttccataacatttaagtttattctatggaattgttcattggtgctcctgttttagttacttctccatagacttgtttttcccttgactaatcaatgccatctggtgccaggtggtatcctgggtgtagcacagtgacagggtggagactgccctggccgtggcatgtgcagggggcgttcttgagcctgtcttctgggagccctttcttttcctttttccctcctttaggttgaagacttcatcattccctgcgggcagtttctctgtttttcctattttcttttcctcaagaaaaatgtaatttttaagtaacagaattgttttctgtgttgcagcatttaagttgctgagttgagaaatcatggctgagtttgccaagtaaagtttttaaagcaaaaaaaaaaaaaaaaaaaaaaaggagggagggagggaaggaaggaagaaaatatatgaacttgtttgtcagaaatacattttgaggcttttactaaaagaaatgggctagaagacatttgggggttagggcctgactgcttccaggtcctggacagatgttaccttctgtgcctgtagtcagcagttacctgaaggacaagccgagcctggtctgggtgtgtgtgacccaggagtgggtgcccctgaactgggtgtgactcctctgccacctctgttttcttacagccaagtacatcgtgcaagtggatggtaagatagggctgttccgaggcctgagtccccggctgatgtccaacgccctctctactgtgactcggggtagcatgaagaaggtgagcccacacaaagccaggaacagtcgcccgaggtttcctcatactcccagccacccctgcagcagccagttaccctggtcttgcctcctccttcccagaccattgggggcttcactccagccccatgggggagctcccaccccacagttctgctttcccacagctgtgacaccagatagtggctttcttttccccccaagctccagacctggaggttacctgaggtgggcccagccaatagacactgcagaggaaatatttggagctggttcctgccgcccaagtccccgaagagttccatggaagaggcgtagctgaacttggttctttcccttctctgtttcaggttttccctccagatgagattgagcaggtttccaacaaggatgatatgaagacttccctgaagaaagttgtgaaggaggtgggtgttgagagttggagagggagaggtgcgtggaggggagcctgatgatttctcacccccaagttgggcgggtcattgacaagtcgaagagttgggtccttgtgtatgcatgggtgggatggtaagggaagaagccctggcctggatgtgccgggaaccccggaaagccttctcagccattgttgggcctagcctgggacccgacagcactcctgggtgggggactggggagtgggcaacaggtggagccatccttggcagaccgaccccatgtgcagtccctgggacaggtttctccctcctgagcacttgtagctcccctcgagggccagttccagagacaggccgagggtggcgagtccccaccccatgctctcttccagacctcctacgagatgatgatgcagtgtgtgtcccgcatgttggcccaccccctgcatggtaagccaccccccttcccccgagactgtatctaagctggcgtcgggggcgtggggtgaggggcgccccctcgtggactgtacatagacagccgtagacctgttgggaagtggtagtggggttgggggtattctactggaacccacctcactgaggagagattggaattctttccaaagggaggtggggctcttcccaggcagtagaaatggcatgctgtggtcatggggtgtaacagggaatccgaaaggccctcttcctctcctgctctctgaataggccacgttgttcagtggccactctgcacctggcacccggtggctggagcattatgaagtgtggcccaccacatcacctgtgtgtgttttcttttttttcctcagtcatctcaatgcgctgcatggtccagtttgtgggacgggaggccaagtacaggtgggtaactcttgggactggcagagtggccctgttaccctttcagagtcggccagggcaggccgtgctgggattggttgctgcaccttttctgccctagtgctgtgtgagttcagcctgctgcctggcttctgaggaatgtggcagtggcttcaatagtctgtccagggtcattttctcttcgtcatctcttatcaagggcagccctagatgagcctagatgcctttgcagaggggtgagtgggattgtagtcagcttggattaggatttctggccccagagctgattctgccacttaggactgagctggggtctccttttggactcccgaagtaatgctctaacgatttttccggccctcataggctgatagctctttttatcccctatgaagaagccatccaccccatgggcttggggctcatcccttccattgtgtaccagaccctcacctagatctgctgcgtgcagccctgggcaggtgccaggggcatatgtgttgacacggaggtgggtcttggaggcatgtgtgaaggacacacctgggttgcccttcctctcttaagattctcatttcctggggtcggtgttttttgcagctgtcctgcggggccaccatcccaggaagctcagctgccatggtgcctcattttggggtcattaatgggaaattggcccattcccctagactgattatgaggttggtagttgggaccagaagggtataatctggccaccactgttctgagtggtggggccgggcctggcagggctgggatgatctgggaccggggctacccagggctttgccttccactggctccctctgttagtaggttgttattgagcttccttggcatttcacacccaagaacccacagcctgtcctctcatccagcttgtcctctcatctctaacagggtgcagtggccagggcatgagtccccggctccctgctgaggagtgccagatgtcttctcctaggctggttccagtgcctcctcctgcagggccctgtattctttctctgccctctgggaaagtacttctctttgcttactaccccctcctactcttactcttgggcgggcctgtgggctcctctgctagagggttgtttaaccagagataagtgtgagggccgggtaagagaagggcctgccgcctctgcagcagtggcccaagttaggagatgcattcctaaactcctatctcccagaaaacaccagtagaggactgctagtgggctgctcccatgggtggttgggcttccccagtctccatgaactgtgtaaactcctcctcaccctgaacaagcgctctttgcctttctacttggttcttcatggtaatagtcctccccatccctgccaggactggctggatttgagcagaactggtgggctcagccccacaccaacgggtgggcttctggtaggtgactgcatgaccctgtatctctgtcttgccttcttcacagtggtgtgctgagctccattgggaagattttcaaagaggaagggctgctgggattcttcgtgtacgtgagtttatacaccccataactggccacgggcatggctctgctaacaggtgtgtcctcaacctctcagaccgcagctgctggcctgggacttcactacatggccctgccctagcctgagtgctgcagccagctctccagagctccatagcgtgtccaagctgcttagcccttttcaggccatggctcatgtaaaagtggaactgtgtgtctagtacatgggggagatgaactgaccagccccactgggcctcatccagttgtggtgggtgtggggctggtcttcatgagctaagtcactgcatagtccttggcctcactgctaaaacatgactgaaaatctgacttggactgagggtggagctctggaagctcacaggctgaccacagccagtggattctgtttgacattgcttttctgacaaattagttgttgccgttaacatttaagatatgttgcacaaaaatccacatgtctggcatctcttgaaaagccagaaaatcttgtcctgctgagcggttctttctgtagagcatccatcggccaggacccaggacctgcttctttggcagggcacatggtctccgagggccgcagacaccctgtacttcgtcacgtcacatccagtgtacttcacctctaaagaaagcacatactgaaaagactaagttcagaaagaataaggtgcagacagaagccaggcttgatgagttgtattttgatttgccgttttaaggtctaggcagtgacatacatgctgataagtatgtcacaaacgtggtagacacatggtatacaacagtatccgctgtactagatacagggctccatattattcataagaagtctttatatcatggttttcccggtttgtgagatgttttttatttatggccccttgtttaaccaattagtgactacttgtaggtgcatgtgtgtgtatatgatatagaaatatatatacggttctcagcaggaggtgattttgctccccggggaacatcggcagtgtccggagacatcttgtggttgtcacaactggcatctagtgggtagaggccagagacgctgctaaacatcctacagtacacaggacagccccgcaacaaagacttattcagtcaggtgtcgttgcttgcatctgtgatcccagttagttgggattagtctcagtggtttctgcagctgtcaggagaccaaggcgggaggattacttgaggccaggagttcaagaccagcctgagcaacatagtgagacttctgtctctacaaaaatgtttttaaaaattagttggccgtggcggcatgcacctgtagtcctagctacccgggaggctgaggtgggaggatggcttgagcccaggagttggagactgcagtgagctatgattgcaccactgcactccagcctgggtgatagagtgagaccctgtctcttggggaaaaaaaaaattattcagcccaaaatgtcaatagtgccaaggttgagaaactctgatttatattcacacacacacatatatgtatgtgtaagtatttatacatacatatatttgcacatgtacctggtaacaaaccaacatttgtgacatacctatcagcatgtatgtcaccgcctagaccttaaaacagcaagtcaaaaaacaactcatcaagcctggcttctgggttctgtctgtgctttattctttctgaacatagtcttttcagtatgtgctttctttagaggtgaagtaagttggatgtgaggtgacaaagtgcagggcatctgtggccctcagggaccatgtgccctgccaaaggggcagccccgggaccccagccaatggctgctctacagaaacagccacccatcttgaaacactgcacatgaccacctctggcatttttcacactgcgtagttctcttctggtgtttgaataggattcccgcacaacagatgcctactctttgggttctttctccccatgtgattttggaacaggtgatactcatacatgttacagtgcatagaaagcaccaaagggtatagcacaaagtcaatctgagcacaggcagggacgacaagattagaaattgcattcacagaggttccttttattaatactcttcatagatgtattacatatattcttttgagtttttcaaatataagatttttttttttaattcaaaaacaaaaattctgcttctcctcccaggagacagccatccttctcctggcgagcctcccagggcactctgtacctaaacaagcaaacacattgtaaaaaacacaagaggcacatgggactcactgacctcaaactggccttttgccctcagcactgcatcttggggaaccttccttagcagtttatagagctgtttatcctaaaggccatcacttaaaaagttagccctccttgtaaatgcttgcatagaatctttttgatagaatattttcaggggcaaagagaacagatgcattgagcagtgtgtcttctgagagttggttaggtaaagaggccaggagaaaattaccaacacgtcggcactcttattatctgcatttggaaattccaaatttggcagtattcacatcttgatccctggcttctgtggtttgaaaactgcttgagactgttagctaatttatggcatccaaagcggcatagaacacctccccatgggaaaaggagcactatcttcccagtgtgcatagctgctggaccctgcaggcctcctttctaaggctgtgccattggatatgctaagattttgagctcggaacatccctgcctgcttcctgggtgtggagcccccaggaactgctcctctccctctcctgctcatctctgcttaccttgttttttagtggattaatccctcacctcctgggcgatgtggttttcttgtggggctgtaacctgctggcccacttcatcaatgcctacctggtggatgacagcgtgagtgacaccccaggggggctgggaaacgaccagaatccaggttcccaggttggttggaacaaggacttgtccttctttccgtgtgctgctgatgcccagggtctgggacaaactcaaggattctgggattctcagcatcaggccgggagggtgagagaggacctctcattatccctggagtcatctttgtctaaggggagaacggcctcaagaggcgagattccagattagtacccagacctgggaggaattaatggaatgcttgtccctgggcgccttagaaacagaccccagcttatctaaggctgctccgaggcagtgacccaactagggctcaggaagtcagaagatagaccagctaatagtgatcacctcttgacctttgtgtcacgtcttttgctttttaaaacccttttgtgaacgttatggcctttgatctgacggcatcctagttgtgaagggaacagggcaggtataatgttcgtttaccaatacagaaatcgagacccagagatcacaaattctggagaggctctgggctctccagagtcactcagctggaactgacagggctggaattagatccctggccaggccaagggtgcattcctctgagttttttcagatctgctaggaagtgtacagtccgatacaccctcctattttgttagctgtggtctacacagcctagtatacatagacctttcagcaggtcgggtcaggcataggaaggcctggtccttctacacagcacttgttgaggaaggccatccaggtacctgaggggttgactggttctgcctgaaccaagataagaggtagggagcagcgatggctgggaattgcagtgtccagacattctcacagtggggatcaccttcaagaaggatggcattccttcttgaagtggctttccctcccaggaggctaggagggcctggggacgtgtctgccagaatcacctgggtgggaagggggtcatgttcagcatgtgtgtgtgtgtggtacatgtctgttctgtgtggtgaggagtgccccatcccagatgggagcctctgcttgcagggagactggccacttgacctgggcaggtgagtcttcactggcctttcgatgtaagcaaattaaagtggctccatagagacccaccccatctgcaatcacagtggtacattcctgcagttctgccccttctcggggggccttgtgggtgggtaagctgctgctgtcacatacagagcaagggtggccaggagtgcaccgctaagtggtttctcatctaggtgggcagctgtctgaccagaggctgccgtgcttacatcagcaacaacagcagtcaacagatttgtctaaagtgtttttcgagtgcttttctgtatgtggcttaaaggccgaggtgaggctgccgggctgtcaaagccactcaagcagacatctgagcaaatctctgaccaagaacccaggccatcgatctggtgggatggccgctccacaggaagctgagggtgggggagtcacctttcctcactaggagctgtttgcttcagcaaagcaggatttgaggagttggggtctgaagggggaaaagcttgctgaggtggaggtggcgataagcctggacttgccctcacctcaccccacaggccaggattcgtctttgggtttcagggtgcatgtctgtcttagcactgactgcgtgccaagccctggatgttgatcaggcagacacgggctcagcccttgaggctcacagtccggtgggttgcacaggcagcggcagctgatccctcttaccgggtctccttctcgggactcccttcagtccacttaccccgtttctgccccccaggccttctctgggcagtgactgtgagggctgacaggaaaggcatgtgcagcgtgcttgtgaggagctcagcacagagggtggggtgagggcatgtgttgctgaagtctgcatcctgaggtgcctgtggcaaaccactcttcccttctgtctcctcagttcagccaggccctggccatccggagctataccaagttcgtgatgggggtaagttgtgccagctgtccttccttcccactgccttgcggacccaagcggggcctaggaggccaaccctggtaatggctggaggcaggtcttggtacagggtgttggcgtggtgtgtccctgctccctgggccggggtgggtcactggcactcaggcctctctgggtttcagattgcagtgagcatgctgacctaccccttcctgctagttggcgacctcatggctgtgaacaactgcgggtaggtgtgcgcccctctacttgccactctacctaccaaggctgtggggtgggggagacccaccgagcccttccagcactctgccccctcccacctgctctgtgtgtaggcttggcctgccaggcaccctggcttccgctgggatttcccagcaccccctggggtaaactgtggtgtcaggggtcagggtgtggatgggtggtagcctgaaggcattccttcttgaagtggctttcccgtggctggctgtcttccactgttctctgcatctacactctccttctccggcaggctgcaagctgggctccccccttactccccagtgttcaaatcctggattcactgctggaagtacctgagtgtgcaggtgagcaagcactggacggcggaggcctttcctgttctttgctacatccttcagctgaaatggttttgtggatgcttcattgcatgcaaagataagtggtttcatggaattcaatattgtgaggagatacttggtatctataaggcatttaagttttcatcttacataatttcagaaaggatttgaggtggctaagtgtgggtttattttaagattatacatcagacaagaccttttcttctttgagtcttaaagactcttaggataaggataagagaactctggcccaggtggcaggtggtaaagcccaagaactgcttctccttcaagtaacatgggctgaaaattcgaggtctgtaaccagttgagctgagttcctgggttgttagggcggctggcattggaaaccgactcctccctcctgcaggacattcctgggcccaggagagcctgtgggtggggctgggccacgtggggaactggcagcagtaccaaccttgggttctcgtgttctgtaccgaagctacctctccgtagctggagctcttgggcccagcagtcaggggtccaggctttggccgagggcagaaccttgccttttcctggccttgatttgcctcgcagtgaaatggggcagtggcccggagggagccagaactctgagtggcctcgaggctgagaagaggacagatgggagggaagcagggaggagagccgcagttcttcccagtggccctggtcagcgtgagtgtgtctcgtcctccctatgagcactgaaagagtcctagaccacttgggctctgaagcaagaggggcaatgagcctcctctctagggctctcctacagagtagccccaaagacacccctgggcaggaaatgaaccgctcccttctgcttcaacacaggcagattctgccctccagggatgtaggccgaggccgtccaccccggagctgggtctttgagctcctggacccttctttgcctgacactggccttcctctcggagggacaaggaagcgtggcctccctttcactcaccttacttttccttctggtccagggccagctcttccgaggctccagcctgcttttccgccgggtgtcatcaggatcatgctttgccctggagtaacctgaatcatctaaaaaacacggtctcaacctggccaccgtgggtgaggcctgaccaccttgggacacctgcgagacgactccaacccaacaacaaccagatgtgctccagcccagccgggcttcagttccatatttgccatgtgtctgtccagatgtggggttgagcgggggtggggctgcacccagtggattgggtcacccggcagacctagggaaggtgaggcgaggtggggagttggcagaatccccatacctcgcagatttgctgagtctgtcttgtgcagagggccagagaatggcttatgggggcccaggttggatggggaaaggctaatggggtcagaccccaccccgtctacccctccagtcagcccagcgcccatcctgcagctcagctgggagcatcattctcctgctttgtacatagggtgtggtcccctggcacgtggccaccatcatgtctaggcctatgctaggaggcaaatggccaggctctgcctgtgtttttctcaacactacttttctgatatgagggcagcacctgcctctgaatgggaaatcatgcaactactcagaatgtgtcctcctcatctaatgctcatctgtttaatggtgatgcctcgcgtacaggatctggttacctgtgcagttgtgaatacccagaggttgggcagatcagtgtctctagtcctacccagttttaaagttcatggtaagatttgacctcatctcccgcaaataaatgtattggtgatttggagttttt

SEQ ID NO: 782 - DNA, 13540 bp, Homo sapiens
aggtgggtcatgagccgatgccccccacccttgggaccaatgtgctggggaggaaggtcctctatctgccgagcttcttcacctacggtgagtgtgcctcccaagcaggaaagcccacaccaacagaaaagaggcctcaggtggggagcaggaccagctggccccggggaactcactgcgcagcatggcacgcagtcgagctggcatggaggaggggatctaagcgtgtacagagaggacatggtgtcggggtgcgagcaggtgaaccatacagctttggtccagctcctctgcctgtagctgccagctgccagcccagacagcaggaggggacagacacaggtgcctgagagaggagccaatctaggacactggtccctattatttctgctgccccgggttgtgcctggaacatgcgtgggggtgatttccttttgtcctgtgagcagcctggccctgctactccagcaggaggcccggggggtcctcttgagtttttttcttttatcccacctgggtgtcttgtttcccctgcattcctcaggcagtgagtggtgctcactcactctggtgtctccatctgttggttacagaatggtgtgcagtgaattgcagcttcacttctgtgtgctgcgtgagtttgggtgggccacttacctgctgtggcctggctgcaccccttgtctgcaaagtaaggtcagcttctcctgcccaggccttcctgcaagctccccaactgtcatcaagaagcccaccttgctgcctctgctgcccatcacctggcccacaggtgccgtctggccagggccttttcatgttcaccctcactgtccctctcccagtccctaccctcaccagatgaccatgatgaaggccttctttaaatgtgccctttttctccgtgttcacagctggagttccattgcaggcaaatcccctccagtttcctgcacctctgctcttacctgtttggttgtctagaatattctccagaatctatctttctgttgagtaacttggggcttggcctctgtcttaccttttccatttcacatgctgttggcagaattgggtgtcatatttctcttccagttttgtccctgtgttgttgagtgcagagtctagggccaggtggaatgtgtcatcttgtgaggaaatgtgtttgtgttgttttttacttaaaaattgtcagcgtagtggagaggggaatgacagaagtaggaaggcaccccaccattgtgtagtgaggcagtatacagagaggtaaggcagccggggcagatggctgcggccctgcacggggctttttctggatctggttgcacgtgctgtgttctgagaggcgaggttagagcccagatcatctctattcatgtgacacagccattcccaaaaggacttagagcagagggaacttgacccccatcttaactgtctcttttgaggatgagcagagttctcaggtgtgcccccagcctggtttatataaatgtagctttaatctaggtgtgagcagatgtctgttggggatctctggacaccaggcctactctggagtcagagaggggacccgccatttggctctctggtacagtgtggacagtgtctgctcctctacttgtcatggctgaaagtactgcagctgtcatgacattctctggtgtagaagaaagaacttcccagagggtttcctggcactgcagaaagacccagaatgagggaggccctgggacccacagaggcccctgcaggcatttcagcacgcctccctccgctctcacttgttcctcagttctctcagaaatggagagaaatgacggtccttattccttctttttttacaggtgggcagatggaagagggtcgatgttttgctcaggatcacaaacagaggtcctgaggctccctctcctcactaggatccaccctcccccaaagcaaattttccttttgcctgttcactctgtgaagagggctccttgccaagtcacccagcatcccctcccctcctcctcctctccttccagcccaccctcatctcaggcaatcacatatacaggtaacaggtgttctcagcctcatgaaaaacccatgctagctgtgacattgaattgctgggctggcagacatctgcggaggagcaaaaggcatatttgcttcttcctgcctctgcgcggtgccagagagctaaagtcatggtctaacagggggagcatgctgtctgagagaatgttctgctagcttccagatgcacaggtttataaaaataccaccctgccatttaaaacatgtttaaaatgttgatagaaaacaatgaatcgtatccttagaaagacagaccctagtgaaagaaacactaactcacacaggtagggtctagcttccataacatttaagtttattctatggaattgttcattggtgctcctgttttagttacttctccatagacttgtttttcccttgactaatcaatgccatctggtgccaggtggtatcctgggtgtagcacagtgacagggtggagactgccctggccgtggcatgtgcagggggcgttcttgagcctgtcttctgggagccctttcttttcctttttccctcctttaggttgaagacttcatcattccctgcgggcagtttctctgtttttcctattttcttttcctcaagaaaaatgtaatttttaagtaacagaattgttttctgtgttgcagcatttaagttgctgagttgagaaatcatggctgagtttgccaagtaaagtttttaaagcaaaaaaaaaaaaaaaaaaaaaaaggagggagggagggaaggaaggaagaaaatatatgaacttgtttgtcagaaatacattttgaggcttttactaaaagaaatgggctagaagacatttgggggttagggcctgactgcttccaggtcctggacagatgttaccttctgtgcctgtagtcagcagttacctgaaggacaagccgagcctggtctgggtgtgtgtgacccaggagtgggtgcccctgaactgggtgtgactcctctgccacctctgttttcttacagccaagtacatcgtgcaagtggatggtaagatagggctgttccgaggcctgagtccccggctgatgtccaacgccctctctactgtgactcggggtagcatgaagaaggtgagcccacacaaagccaggaacagtcgcccgaggtttcctcatactcccagccacccctgcagcagccagttaccctggtcttgcctcctccttcccagaccattgggggcttcactccagccccatgggggagctcccaccccacagttctgctttcccacagctgtgacaccagatagtggctttcttttccccccaagctccagacctggaggttacctgaggtgggcccagccaatagacactgcagaggaaatatttggagctggttcctgccgcccaagtccccgaagagttccatggaagaggcgtagctgaacttggttctttcccttctctgtttcaggttttccctccagatgagattgagcaggtttccaacaaggatgatatgaagacttccctgaagaaagttgtgaaggaggtgggtgttgagagttggagagggagaggtgcgtggaggggagcctgatgatttctcacccccaagttgggcgggtcattgacaagtcgaagagttgggtccttgtgtatgcatgggtgggatggtaagggaagaagccctggcctggatgtgccgggaaccccggaaagccttctcagccattgttgggcctagcctgggacccgacagcactcctgggtgggggactggggagtgggcaacaggtggagccatccttggcagaccgaccccatgtgcagtccctgggacaggtttctccctcctgagcacttgtagctcccctcgagggccagttccagagacaggccgagggtggcgagtccccaccccatgctctcttccagacctcctacgagatgatgatgcagtgtgtgtcccgcatgttggcccaccccctgcatggtaagccaccccccttcccccgagactgtatctaagctggcgtcgggggcgtggggtgaggggcgccccctcgtggactgtacatagacagccgtagacctgttgggaagtggtagtggggttgggggtattctactggaacccacctcactgaggagagattggaattctttccaaagggaggtggggctcttcccaggcagtagaaatggcatgctgtggtcatggggtgtaacagggaatccgaaaggccctcttcctctcctgctctctgaataggccacgttgttcagtggccactctgcacctggcacccggtggctggagcattatgaagtgtggcccaccacatcacctgtgtgtgttttcttttttttcctcagtcatctcaatgcgctgcatggtccagtttgtgggacgggaggccaagtacaggtgggtaactcttgggactggcagagtggccctgttaccctttcagagtcggccagggcaggccgtgctgggattggttgctgcaccttttctgccctagtgctgtgtgagttcagcctgctgcctggcttctgaggaatgtggcagtggcttcaatagtctgtccagggtcattttctcttcgtcatctcttatcaagggcagccctagatgagcctagatgcctttgcagaggggtgagtgggattgtagtcagcttggattaggatttctggccccagagctgattctgccacttaggactgagctggggtctccttttggactcccgaagtaatgctctaacgatttttccggccctcataggctgatagctctttttatcccctatgaagaagccatccaccccatgggcttggggctcatcccttccattgtgtaccagaccctcacctagatctgctgcgtgcagccctgggtaggtgccaggggcatatgtgttgacacggaggtgggtcttggaggcatgtgtgaaggacacacctgggttgcccttcctctcttaagattctcatttcctggggtcggtgttttttgcagctgtcctgcggggccaccatcccaggaagctcagctgccatggtgcctcattttggggtcattaatgggaaattggcccattcccctagactgattatgaggttggtagttgggaccagaagggtataatctggccaccactgttctgagtggtggggccgggcctggcagggctgggatgatctgggaccggggctacccagggctttgccttccactggctccctctgttagtaggttgttattgagcttccttggcatttcacacccaagaacccacagcctgtcctctcatccagcttgtcctctcatctctaacagggtgcagtggccagggcatgagtccccggctccctgctgaggagtgccagatgtcttctcctaggctggttccagtgcctcctcctgcagggccctgtattctttctctgccctctgggaaagtacttctctttgcttactaccccctcctactcttactcttgggcgggcctgtgggctcctctgctagagggttgtttaaccagagataagtgtgagggccgggtaagagaagggcctgccgcctctgcagcagtggcccaagttaggagatgcattcctaaactcctatctcccagaaaacaccagtagaggactgctagtgggctgctcccatgggtggttgggcttccccagtctccatgaactgtgtaaactcctcctcaccctgaacaagcgctctttgcctttctacttggttcttcatggtaatagtcctccccatccctgccaggactggctggatttgagcagaactggtgggctcagccccacaccaacgggtgggcttctggtaggtgactgcatgaccctgtatctctgtcttgccttcttcacagtggtgtgctgagctccattgggaagattttcaaagaggaagggctgctgggattcttcgtgtacgtgagtttatacaccccataactggccacgggcatggctctgctaacaggtgtgtcctcaacctctcagaccgcagctgctggcctgggacttcactacatggccctgccctagcctgagtgctgcagccagctctccagagctccatagcgtgtccaagctgcttagcccttttcaggccatggctcatgtaaaagtggaactgtgtgtctagtacatgggggagatgaactgaccagccccactgggcctcatccagttgtggtgggtgtggggctggtcttcatgagctaagtcactgcatagtccttggcctcactgctaaaacatgactgaaaatctgacttggactgagggtggagctctggaagctcacaggctgaccacagccagtggattctgtttgacattgcttttctgacaaattagttgttgccgttaacatttaagatatgttgcacaaaaatccacatgtctggcatctcttgaaaagccagaaaatcttgtcctgctgagcggttctttctgtagagcatccatcggccaggacccaggacctgcttctttggcagggcacatggtctccgagggccgcagacaccctgtacttcgtcacgtcacatccagtgtacttcacctctaaagaaagcacatactgaaaagactaagttcagaaagaataaggtgcagacagaagccaggcttgatgagttgtattttgatttgccgttttaaggtctaggcagtgacatacatgctgataagtatgtcacaaacgtggtagacacatggtatacaacagtatccgctgtactagatacagggctccatattattcataagaagtctttatatcatggttttccggtttgtgagatgttttttatttatggccccttgtttaaccaattagtgactacttgtaggtgcatgtgtgtgtatatgatatagaaatatatatacggttctcagcaggaggtgattttgctccccggggaacatcggcagtgtccggagacatcttgtggttgtcacaactggcatctagtgggtagaggccagagacgctgctaaacatcctacagtacacaggacagccccgcaacaaagacttattcagtcaggtgtcgttgcttgcatctgtgatcccagttagttgggattagtctcagtggtttctgcagctgtcaggagaccaaggcgggaggattacttgaggccaggagttcaagaccagcctgagcaacatagtgagacttctgtctctacaaaaatgtttttaaaaattagttggccgtggcggcatgcacctgtagtcctagctacccgggaggctgaggtgggaggatggcttgagcccaggagttggagactgcagtgagctatgattgcaccactgcactccagcctgggtgatagagtgagaccctgtctcttggggaaaaaaaaaattattcagcccaaaatgtcaatagtgccaaggttgagaaactctgatttatattcacacacacacatatatgtatgtgtaagtatttatacatacatatatttgcacatgtacctggtaacaaaccaacatttgtgacatacctatcagcatgtatgtcaccgcctagaccttaaaacagcaagtcaaaaaacaactcatcaagcctggcttctgggttctgtctgtgctttattctttctgaacatagtcttttcagtatgtgctttctttagaggtgaagtaagttggatgtgaggtgacaaagtgcagggcatctgtggccctcagggaccatgtgccctgccaaaggggcagccccgggaccccagccaatggctgctctacagaaacagccacccatcttgaaacactgcacatgaccacctctggcatttttcacactgcgtagttctcttctggtgtttgaataggattcccgcacaacagatgcctactctttgggttctttctccccatgtgattttggaacaggtgatactcatacatgttacagtgcatagaaagcaccaaagggtatagcacaaagtcaatctgagcacaggcagggacgacaagattagaaattgcattcacagaggttccttttattaatactcttcatagatgtattacatatattcttttgagtttttcaaatataagatttttttttttaattcaaaaacaaaaattctgcttctcctcccaggagacagccatccttctcctggcgagcctcccagggcactctgtacctaaacaagcaaacacattgtaaaaaacacaagaggcacatgggactcactgacctcaaactggccttttgccctcagcactgcatcttggggaaccttccttagcagtttatagagctgtttatcctaaaggccatcacttaaaaagttagccctccttgtaaatgcttgcatagaatctttttgatagaatattttcaggggcaaagagaacagatgcattgagcagtgtgtcttctgagagttggttaggtaaagaggccaggagaaaattaccaacacgtcggcactcttattatctgcatttggaaattccaaatttggcagtattcacatcttgatccctggcttctgtggtttgaaaactgcttgagactattagctaatttatggcatccaaagcggcatagaacacctccccatgggaaaaggagcactatcttcccagtgtgcatagctgctggaccctgcaggcctcctttctaaggctgtgccattggatatgctaagattttgagctcggaacatccctgcctgcttcctgggtgtggagcccccaggaactgctcctctccctctcctgctcatctctgcttaccttgttttttagtggattaatccctcacctcctgggcgatgtggttttcttgtggggctgtaacctgctggcccacttcatcaatgcctacctggtggatgacagcgtgagtgacaccccaggggggctgggaaacgaccagaatccaggttcccaggttggttggaacaaggacttgtccttctttccgtgtgctgctgatgcccagggtctgggacaaactcaaggattctgggattctcagcatcaggccgggagggtgagagaggacctctcattatccctggagtcatctttgtctaaggggagaacggcctcaagaggcgagattccagattagtacccagacctgggaggaattaatggaatgcttgtccctgggcgccttagaaacagaccccagcttatctaaggctgctccgaggcagtgacccaactagggctcaggaagtcagaagatagaccagctaatagtgatcacctcttgacctttgtgtcacgtcttttgctttttaaaacccttttgtgaacgttatggcctttgatctgacggcatcctagttgtgaagggaacagggcaggtataatgttcgtttaccaatacagaaatcgagacccagagatcacaaattctggagaggctctgggctctccagagtcactcagctggaactgacagggctggaattagatccctggccaggccaagggtgcattcctctgagttttttcagatctgctaggaagtgtacagtccgatacaccctcctattttgttagctgtggtctacacagcctagtatacatagacctttcagcaggtcgggtcaggcataggaaggcctggtccttctacacagcacttgttgaggaaggccatccaggtacctgaggggttgactggttctgcctgaaccaagataagaggtagggagcagcgatggctgggaattgcagtgtccagacattctcacagtggggatcaccttcaagaaggatggcattccttcttgaagtggctttccctcccaggaggctaggagggcctggggacgtgtctgccagaatcacctgggtgggaagggggtcatgttcagcatgtgtgtgtgtgtggtacatgtctgttctgtgtggtgaggagtgccccatcccagatgggagcctctgcttgcagggagactggccacttgacctgggcaggtgagtcttcactggcctttcgatgtaagcaaattaaagtggctccatagagacccaccccatctgcaatcacagtggtacattcctgcagttctgccccttctcggggggccttgtgggtgggtaagctgctgctgtcacatacagagcaagggtggccaggagtgcaccgctaagtggtttctcatctaggtgggcagctgtctgaccagaggctgccgtgcttacatcagcaacaacagcagtcaacagatttgtctaaagtgtttttcgagtgcttttctgtatgtggcttaaaggccgaggtgaggctgccgggctgtcaaagccactcaagcagacatctgagcaaatctctgaccaagaacccaggccatcgatctggtgggatggccgctccacaggaagctgagggtgggggagtcacctttcctcactaggagctgtttgcttcagcaaagcaggatttgaggagttggggtctgaagggggaaaagcttgctgaggtggaggtggcgataagcctggacttgccctcacctcaccccacaggccaggattcgtctttgggtttcagggtgcatgtctgtcttagcactgactgcgtgccaagccctggatgttgatcaggcagacacgggctcagcccttgaggctcacagtccggtgggttgcacaggcagcggcagctgatccctcttaccgggtctccttctcgggactcccttcagtccacttaccccgtttctgccccccaggccttctctgggcagtgactgtgagggctgacaggaaaggcatgtgcagcgtgcttgtgaggagctcagcacagagggtggggtgagggcatgtgttgctgaagtctgcatcctgaggtgcctgtggcaaaccactcttcccttctgtctcctcagttcagccaggccctggccatccggagctataccaagttcgtgatgggggtaagttgtgccagctgtccttccttcccactgccttgcggacccaagcggggcctaggaggccaaccctggtaatggctggaggcaggtcttggtacagggtgttggcgtggtgtgtccctgctccctgggccggggtgggtcactggcactcaggcctctctgggtttcagattgcagtgagcatgctgacctaccccttcctgctagttggcgacctcatggctgtgaacaactgcgggtaggtgtgcgcccctctacttgccactctacctaccaaggctgtggggtgggggagacccaccgagcccttccagcactctgccccctcccacctgctctgtgtgtaggcttggcctgccaggcaccctggcttccgctgggatttcccagcaccccctggggtaaactgtggtgtcaggggtcagggtgtggatgggtggtagcctgaaggcattccttcttgaagtggctttcccgtggctggctgtcttccactgttctctgcatctacactctccttctccggcaggctgcaagctgggctccccccttactccccagtgttcaaatcctggattcactgctggaagtacctgagtgtgcaggtgagcaagcactggacggcggaggcctttcctgttctttgctacatccttcagctgaaatggttttgtggatgcttcattgcatgcaaagataagtggtttcatggaattcaatattgtgaggagatacttggtatctataaggcatttaagttttcatcttacataatttcagaaaggatttgaggtggctaagtgtgggtttattttaagattatacatcagacaagaccttttcttctttgagtcttaaagactcttaggataaggataagagaactctggcccaggtggcaggtggtaaagcccaagaactgcttctccttcaagtaacatgggctgaaaattcgaggtctgtaaccagttgagctgagttcctgggttgttagggcggctggcattggaaaccgactcctccctcctgcaggacattcctgggcccaggagagcctgtgggtggggctgggccacgtggggaactggcagcagtaccaaccttgggttctcgtgttctgtaccgaagctacctctccgtagctggagctcttgggcccagcagtcaggggtccaggctttggccgagggcagaaccttgccttttcctggccttgatttgcctcgcagtgaaatggggcagtggcccggagggagccagaactctgagtggcctcgaggctgagaagaggacagatgggagggaagcagggaggagagccgcagttcttcccagtggccctggtcagcgtgagtgtgtctcgtcctccctatgagcactgaaagagtcctagaccacttgggctctgaagcaagaggggcaatgagcctcctctctagggctctcctacagagtagccccaaagacacccctgggcaggaaatgaaccgctcccttctgcttcaacacaggcagattctgccctccagggatgtaggccgaggccgtccaccccggagctgggtctttgagctcctggacccttctttgcctgacactggccttcctctcggagggacaaggaagcgtggcctccctttcactcaccttacttttccttctggtccagggccagctcttccgaggctccagcctgcttttccgccgggtgtcatcaggatcatgctttgccctggagtaacctgaatcatctaaaaaacacggtctcaacctggccaccgtgggtgaggcctgaccaccttgggacacctgcaagacgactccaacccaacaacaaccagatgtgctccagcccagccgggcttcagttccatatttgccatgtgtctgtccagatgtggggttgagcgggggtggggctgcacccagtggattgggtcacccggcagacctagggaaggtgaggcgaggtggggagttggcagaatccccatacctcgcagatttgctgagtctgtcttgtgcagagggccagagaatggcttatgggggcccaggttggatggggaaaggctaatggggtcagaccccaccccgtctacccctccagtcagcccagcgcccatcctgcagctcagctgggagcatcattctcctgctttgtacatagggtgtggtcccctggcacgtggccaccatcatgtctaggcctatgctaggaggcaaatggccaggctctgcctgtgtttttctcaacactacttttctgatatgagggcagcacctgcctctgaatgggaaatcatgcaactactcagaatgtgtcctcctcatctaatgctcatctgtttaatggtgatgcctcgcgtacaggatctggttacctgtgcagttgtgaatacccagaggttgggcagatcagtgtctctagtcctacccagttttaaagttcatggtaagatttgacctcatctcccgcaaataaatgtattggtgatttggagttttt

SEQ ID NO: 783 - DNA, 309 bp, Homo sapiens
gagtgtcctcctcctcccgtcctgggaaacctcatccaatgggcaaagctgaaagggcctctgacaggcctttggggacctccttatatatatccttacgtatatacccaagataattggaaacttaacgttcacacaaaaactggtatatgaatgcttagtagtattattcgtagtagctcaggagtggaaacagcctgagtgtccgatgacaaataaaatggaaatgttctatagaatgtaatgaatattccatagaatggaatattacttggcaataaaaatgaatgaagttccgattcatgctac

SEQ ID NO: 784 - DNA, 577 bp, Homo sapiens
tccgttcaaacagaaacttttattgcgaacccccaaaactagcacggttctgttgtaggtgttgttgcagagtgtcgggcacgtttacaaacaggaacagggcacttgctgtcctatcttcctcgcagggttcttgtgacgattacacttaaatcaacacgtataaagcattttaaaaagtgcctgtcacatagtccctgcaatttaaggtctagttgtgattattcacttgtattaactaagaatcaactacaggcgcctagcagtgcctgcatgtgctcacactgaggcactcactaaaaccctcaggatctagtgagggagacagtcaaatactttagagcaaaacaaattttacaaccacggactctgaggaaggcgtgcgaaggctccacagctggggagggtgcccacagtcgccgaggggacatctggatttgctctggttgggagagcattcctggcagaggagatggaaaatgcgatcggacaaagaggctgggaccgcggaggggatcgggctcggggtcggggctcgtcctgcagcaggagattcagctcgcgcagagttccacgc

SEQ ID NO: 785 - DNA, 147 bp, Homo sapiens
ggtcccagctactcgggaggcttaggcaggagaatggcgtgaacccaggaggtggagcttgcagtgagccgagatcgcgccactgcactccagcctgggcgacagagcgagactccatctcaaaaaaaaaaaaaaaaaaaaattgtg

SEQ ID NO: 786 - DNA, 153 bp, Homo sapiens
cccagctactcgggaggctgaggcaggagaatggcgtgaacccgggaggcggagcttgcagtgagccgagatcgcgccactgcactccagcctgggcgacagagcgagactccgtctcaaaaaaaaaaaaaaaaaaaagaaagcagtggggcc

SEQ ID NO: 787 - DNA, 1433 bp, Homo sapiens
aacagatggaccattgacaatccatatatttagaaatgatcaaacctaatgttttccttttttaagatgaaagtaaacataaatagagatggtatttttttctgcaattctctttttatacatcttatatctctttgcagattacagttctatatttgacttcccataacatgtcacaggacatgtgctttaaatcccccacaagttgttctcttgtggatatagtctaggtcttctgggttgtcccaaaatatgatgtgcacagacacaaacatattctgtatattggttttgattaacacagaatgcagtgggatttccttcctattatcattatatttcccttaatgcagtccaagattatgtattagtgtctaaagaagtataccacattcttaggtcttttagaaagtatcatctgcctctttggactctgggctatctttactaattcatctcaagtattatttttgtctcttcttttcatctaagactaaatattctccactctgctgttctactcagattaatgtatggccatatggcagtagacttctttatacttagtgctttctcaattttaagatgtttgaatattacactgatgcagaagttatttcataagcatagctttttcttgtgtggggtggaaagggaagaggattaaatcactgcctcacttgagcacatacatagctggaaaatgtgtggaaagtttcttgatgttgagaaaaaaagacagtgtcttgttaatcaataaattccgtttatttttcttttactatgtcctttactatatcataactgtagccttgctatatcctgaactcctcacaaaggccttctctgagccaactaaattaatgataaagaattgtaattcttggctgggtgctgtagttcacgcctgtaatcccagcactttgggtcactgaggtgggcagatcacctgaggtcaggagttcaagaccagcctggccaacatggcgaaaccccatctctactaaaagtacaaacattagctgggcatggtggcatgcacttgtagtcccagctactcgggaggctaaggcaggagaatgacttgaaccctggaggcggaggttgcagtgagccaagattgcaccactgcactccagcctgggcaacagagcgagactccatctcaagaaaagaaaaaaaaaattgtaattcttatacccttgctctgcttctttatcattgtgtaattttaaaaacaactgacatatattatacaggtacttgtttattgtctatttctaccactaaaatggaagctccaactgctattagattaatttccctcccaggtccaattttgattatgttactctgaccaagctgatcttttctcttcaatctagaccttttaactaccttcaaaaatacaataaatataattattctagact

SEQ ID NO: 788 - DNA, 1434 bp, Homo sapiens
aacagatggaccattgacaatccatatatttagaaatgatcaaacctaatgttttcccttttttaagatgaaagtaaacataaatagagatggtatttttttctgcaattctctttttatacatcttatatctctttgcagattacagttctatatttgacttcccataacatgtcacaggacatgtgctttaaatcccccacaagttgttctcttgtggatatagtctaggtcttctgggttgtcccaaaatatgatgtgcacagacacaaacatattctgtatattggttttgattaacacagaatgcagtgggatttccttcctattatcattatatttcccttaatgcagtccaagattatgtattagtgtctaaagaagtataccacattcttaggtcttttagaaagtatcatctgcctctttggactctgggctatctttactaattcatctcaagtattatttttgtctcttcttttcatctaagactaaatattctccactctgctgttctactcagattaatgtatggccatatggcagtagacttctttatacttagtgctttctcaattttaagatgtttgaatattacactgatgcagaagttatttcataagcatagctttttcttgtgtggggtggaaagggaagaggattaaatcactgcctcacttgagcacatacatagctggaaaatgtgtggaaagtttcttgatgttgagaaaaaaagacagtgtcttgttaatcaataaattccgtttatttttcttttactatgtcctttactatatcataactgtagccttgctatatcctgaactcctcacaaaggccttctctgagccaactaaattaatgataaagaattgtaattcttggctgggtgctgtagttcacgcctgtaatcccagcactttgggtcactgaggtgggcagatcacctgaggtcaggagttcaagaccagcctggccaacatggcgaaaccccatctctactaaaagtacaaacattagctgggcatggtggcatgcacttgtagtcccagctactcgggaggctaaggcaggagaatgacttgaaccctggaggcggaggttgcagtgagccaagattgcaccactgcactccagcctgggcaacagagcgagactccatctcaagaaaagaaaaaaaaaattgtaattcttatacccttgctctgcttctttatcattgtgtaattttaaaaacaactgacatatattatacaggtacttgtttattgtctatttctaccactaaaatggaagctccaactgctattagattaatttccctcccaggtccaattttgattatgttactctgaccaagctgatcttttctcttcaatctagaccttttaactaccttcaaaaatacaataaatataattattctagact

SEQ ID NO: 789 - DNA, 577 bp, Homo sapiens
ctgaggtgatatattttgactatttttgacatatacaacctgcttatgtggtattttttactattaataaatgctaaatatcaaaccttctgtttagctcttagttgacatgaatttatagaccaaggtaaaggttaacacactacattgttataacctatattaacaaagaattaatactcttctatgtaatatttttagcagaattattttgttgaaaagtgccaagtgtttgtttcctctttgttcttcccctttttgttgtaaaattgtttcactttgtagcaaatgatgaaaacattattattttctaagtgttatgcaaatctttataatatcagtatacattaaatatctacctatttagtattctttctctagtaagagcttaccttctgtgcattctgaaatgtacaactttttatgtacaaaaatgtctgttttagcattatgaggaaatgaatgcctatacagtggtctccccttatctatgttcttgtgttccacagtttagttacctgcagtctgaaaatattaagtggaaaattccaaaaataaactacttataggttttaaa

SEQ ID NO: 790 - DNA, 196 bp, Homo sapiens
aaccccgtttctactaaaaatacaaaaaattagccgggcgtggtggtgggcgcctgtagtcccagctactcgggaggctgaggcaggagaatggcgtgaacctgggaggcggagcttgcagtgagccgagatcgtgccactgcactccagcctgggtgacaaatggggactccgtctcaaaaaaaaaaaaaaaaaa

SEQ ID NO: 791 - DNA, 577 bp, Homo sapiens; identical to SEQ ID NO: 789

SEQ ID NO: 792 - DNA, 196 bp, Homo sapiens; identical to SEQ ID NO: 790

SEQ ID NO: 793 - DNA, 4454 bp, Homo sapiens
atgattaatcactaaacaggtattgcataaaatagcaattttcagctctggattttggggaagggagtagaggctggaaatgtaggtggagagtcaggctggggagagatgccacattcgcaacattgggttttttacaatagtactgcatctatctctgtgcaggagtctaaaagtggttggaagctacatttaggattatttaaaataacatactgccttatttttatctctgtagcaacaactttttgtaagaaaaatagctagttccatgatcttttgccttttgaaaaggagagatctattttaaactctttgcaggctcctcgaagttccttttcttgctgttgagtagcaggtagaatctctagttcatggaggtctgacggatccatggtcccgtgctggtccatgtgctgccctctgcttccgtccctcatccttgccactctcaacagtcttccccgacaacccttaggaagacaagggcttggaggagggggaggactgagtgtccctggcatgttctgattaatcctattcattgtcaagtacagctttttaatgaactgattcattactgagagtaggtctcatgcaaatccctagtttgtatcctgtggatttaatttctaacaatttcctcatttcaacacaactccattgtaccatgggctttgtgattttgttctaatatagagcttgacctcacattttaagactataagatgaatactaaaaaaacgaaatccttaaaataaaaaataaactagaagaacatgtaggtggatattcaactcctctctaaaggaagaagggttgtccacacataaaagttttggaagagactgggtttagtggctcacgcctgtaatcttagcactttgggaggctgaggtaggaggatcacttgagcccaagagttcgagaccagcctgggcaacataatgataccctgtctctacaaaaattaaaattagccaggcatggtaatgcacacctgttgtcacctgtggttgggaggctgagtgggaggatcgcttgagcccagaaggttgaggcttcagggagccatgattgcaccactgcactccagtgtaggtgacagagcaagaccctgtctccaaaaaaaaaaaaaaaaaaaaagaaattctggaagaaatgacagaggaaatcactgataaatttcgaaacataagtttgtgcaatatcagagacaaatttaacaaatatgtaaaatttgcctccattatgagttaatataaaactatgaagagttcaggagattataaaaagagacaaagacaaccaggagaaaacagataacttaatactttttaaaaaaacaccaggctaacaaaaaagaaatatatagttgactaaataaatatagcacaatatatttaaccctacaaatttcaactaatgcaatgaaaacataatagcagcttttcaactgttattattaccagaaagaaaaatattttaaaatgctattgtggttttggtgagggaacatttttcatgccctgttgtttgagagtagaattcagtgcaccctttctggaaagcagtttggtaacctgtaatacttcttttaaaaaaaaattcatcctcttgtctaaaaatttctcctctagaaacttaaagataatagtcaagtgaaaacacatttatgggcagtgtttaaagttttgtgagtgaaactgttgataagaacctattacaatggttaagccacctggaacattctattgatatattatgcagccttggaaaatagtacttttaaggaatgttaataagatgggcaatacaaaactgaatgaaaatccaatacagaattctgcctacataacatgatccaaattttgcctaaagtttgcctaaaacgtgcatagcaaaagaatttcgggaactacaccagaatgttagcatgggtccatcatttctgagctgtggtgttactggcatgactcttgtttttcttgtttattcttttatgttatattaaggtgaccacctgttcccgttggcctggtactgccctggttttagcactggaagtcctactctggacaattaatgattcgtgtgtgtgtgtgtgtgtgtgtgtgtgtgtgtgtacacattaaggtgaggttgtgcccatttgaaaggaagggccaaagataaagtgacaagctcatggggcctgtgtggtagtcaggcagtagatttttttttttttttttgagatggagtctcgctctgtcacccaggctggagtgcagtggcatgaacctggctcactgcagcctctgcctcccaggctcaagcgattctcccacctcacctgcccaagtagctgggactacaggcatgcacccccacacccagctaattttattttgcattttttgtagagacggggttttacatgttgcctaggctggtctcaaactcctgagctcaagtgatccactaccttggcctcccaaagtgctgggattacaggcatgagccactgtgcttggcccagggagtagattttctgatgataaaattaacgtgacttgttctagaaaatacagggaaagagtaaatgtgcaaagacttaaatagcatttacatgtagcccacagtgctctaaatgcttttggtggttcacagtttaatcatcataaccctatgaactagatactgttgttgcatccccatttacagaggcatagagacatggagtaattcacccatagccacacagcccttgacagaatctggatttgaactcaggcagttcggatccagagtctgggccattgaccacctcctgcatctctgtagatccccgactccagcctctcctcttgctgcctctctcaacagtaacgatgctgttactccccacgccaaacctctgggctggccaggctcactccagtcccacagtcattgccaggactgcctttgaccttacacagaggaaacatcttccacctgtcgggagggagccggggcggggatttccatggcagagttactgttctctggtgatagagttctttcagttttgctacatggtcttgtggcaaaggactgggtgcaggtgcagccttggttatttctggaaacacttctccttttcttttattttgccaggtctggctcatcagtcaccttcctctcagaaaggtgattttggctcctctgcccagaccatcaaacatttctggaggtgtcacaagcttccgtgagggttctggtctctgcgaattgcaggaagaatccaaacataggaaaggggtgatgtgtatcagggtgtccatcctcagctttgctccacaaagaccctcacacttgcacattgttttgttaacagtattatctctgagtagtgggtttattgtttttgcttacctgttttaaacacttcttcaacaaacttgctttactttccattttttaaaagtgtatttcaattttttattaataatgccattttactcctgcaaaatttctcactccttcaaagtctgtgtatggcaaagatcttcctaaccatcattcaagttagagcaactccatttctgtatcaaaaagaaatacctttagttattgtctgaacttgtcagaatttctgagaacgatgccagaaattctataattgttttgtcacattaattgaacaatgagagggcaccagcattcctcactcatgaggtagaagcaccacatctacatttctttttagctatgggtgatgtttttgcttttaaatcttagaaatctgttaataaacaaataacacaacaaagtttggggtacttccttgtggggactgggatgcttaagctaaaacaaagtttaaatttggactgtgtgtgttatgtttcgcagaatctatatgtttctcaaaagtgggtgtcaccctccttcctcccccaacacacccttcaggggtaagaggagaagtaatgtagaaaaattaactgtttctccactgtaaaagtagggtgtctttagaatgtttcatgttcaaaggaaagattgtgcttctcccaaggcaaggtgttcccttaaaaaaaaaaaaaaaaaaggttgagcatgtctttgtattgctgtctctggaagaggaaatgaggcatctcttggggtgagaacaagggagaattgaactctcgggcctggccagatggattcctcacactggcacagagctgtgaagggaagggcctttcatcctccagaggaaagagggctggggtctcagaggccagagcatagggacaggcaggagtcctgcagccctgatgcctgcccctcccagtacagaatctctgtcctgacccccacctgttgaacctttcaaatcccagtgactcgccagctttctctgtggatattggctgaattggtggcttgtgtggctgcctgggagagcaatttacccctgagccaaggagggggtgggc

SEQ ID NO: 794 - DNA, 1569 bp, Homo sapiens
cccacgccaaacctctgggctggccaggctcactccagccccacagtcattgccaggactgcctttgaccttacacagaggaaacatcttccacctgtcgggagggagccggggcggggatttccatggcagagttactgttctctggtgatagagttctttcagttttgctacatggtcttgtggcaaaggactgggtgcaggtgcagccttggttatttctggaaacacttctccttttcttttattttgccaggtctggctcatcagtcaccttcctctcagaaaggtgattttggctcctctgcccagaccatcaaacatttctggaggtgtcacaagcttccgtgagggttctggtctctgcgaattgcaggaagaatccaaacataggaaaggggtgatgtgtatcagggtgtccatcctcagctttgctccacaaagaccctcacacttgcacattgttttgttaacagtattatctctgagtagtgggtttattgtttttgcttacctgttttaaacacttcttcaacaaacttgctttactttccattttttaaaagtgtatttcaattttttattaataatgccattttactcctgcaaaatttctcactccttcaaagtctgtgtatggcaaagatcttcctaaccatcattcaagttagagcaactccatttctgtatcaaaaagaaatacctttagttattgtctgaacttgtcagaatttctgagaacgatgccagaaattctataattgttttgtcacattaattgaacaatgagagggcaccagcattcctcactcatgaggtagaagcaccacatctacatttctttttagctatgggtgatgtttttgcttttaaatcttagaaatctgttaataaacaaataacacaacaaagtttggggtacttccttgtggggactgggatgcttaagctaaaacaaagtttaaatttggactgtgtgtgttatgtttcgcagaatctatatgtttctcaaaagtgggtgtcaccctccttcctcccccaacacacccttcaggggtaagaggagaagtaatgtagaaaaattaactgtttctccactgtaaaagtagggtgtctttagaatgtttcatgttcaaaggaaagattgtgcttctcccaaggcaaggtgttcccttaaaaaaaaaaaaaaaaaaggttgagcatgtctttgtattgctgtctctggaagaggaaatgaggcatctcttggggtgagaacaagggagaattgaactctcgggcctggccagatggattcctcacactggcacagagctgtgaagggaagggcctttcatcctccagaggaaagagggctggggtctcagaggccagagcatagggacaggcaggagtcctgcagccctgatgcctgcccctcccagtacagaatctctgtcctgacccccacctgttgaacctttcaaatcccagtgactcgccagctttctctgtggatattggctgaattggtggcttgtgtggctgcctgggagagcaatttacccctgagccaaggagggggtgggc

SEQ ID NO: 795 - DNA, 787 bp, Homo sapiens
ctcatccagagatgcactgggcacagggaaagctttttttttcaagtagcagctgctattcattgaaatgttacaattttcctgccttagtatttcacacgtccttatactcctcataacattttttgcttgtgtagttttagccccatttcagaaatgaggaacccaggttcagaaggtttagaagcttgctcaagaccccccagctattaggtgccagagctgcaactggaatgcagctttgactccattgtgggtttctgttccattatcaagagtagcctgacagttggcaataacaatgactgaatgaatgaataaatgaattctccaaagaaaatagttcatgtttccctagtatgagggaatacttgagatagttgttttgagaagggggccacagaccaggagacaccaataagtctttctcatttctggtaaatcgctttataatgaccgttattataaagtgtaaaaacaacaacaacaaaaaataataggcgcagtggttcacacctataatcctagcactttgggaggcagaggcgggcggatcatttgaggtcaggagttcgagaccagcctggccaacatgatgaaaccctgtctctactaaaaacacaaaaattagccgggcggtagtggcacgtgcctgtgtagtcacagctactcgggaggctgaggcaggagaatcacttgaacccgggaggtgaaggttgcagtgagccgagattgtgccactgcactccagcctgggagacagagccagactccatctcaaaaaaaa

SEQ ID NO: 796 - DNA, 622 bp, Homo sapiens
gtatgcacacaaatacctaacctttccaatgtaggccctagttacttccaaaataatttagaagtgtttacagatatgttttgacgattttgctatgatttttcatttattggtatcagaattgaatatatttagctgttgctctctgctaagtaaactgagacctaggtgtgcttaccattgttttctgtgaaaaccagctgatccgtgttacaaatgactgttttagctatggaaacaagacacctctgtgaatatgattccttgtgtggtgggcatcactagagagcaatgactgtattccctaaagagaaagtgcgagagcggcagtacagaccaaggcagaggtggctgaggagattgttccggtcagcaatgtagaattcctgcccctgtgttctgtgaccccaacagagggagccagcacccactgtgcacctcccacacagcccacactgcacaaggcatttagacagtgccttaaattcactccatcaatactgtgagagccccactggcttcccctttggggttttagacatttagggtattcactgaatactttacgttgaagtgtttttctataacattagaaccaggttcaacttaaaaaaaaaaaaaa

SEQ ID NO: 797 - DNA, 1044 bp, Homo sapiens
gaagagtcagccttcttcttttcctggcctaggtagtagagctcatatagaaaaagtgagacaatattggtaccaaactacattatttattgcttccactgaactggtcaagaggcagcaggtgaggcatgaagatgggcagttctcagaagttttcctgaacctacaggtttatgttaatttttttatgtataatttgtcttccttgtttatgatctcattctagtctgccatgtaaccccttctcaaactttaaaaggacctcccttgagctggagctaacgagaccatttcttgtctgcttacaattttaaaaaaaaagctatttgcaagtaatttttctcattatgatgctgttatcataaagtgagattccagtagccagggtgtcaagggatggtatatggacagtgcaactttgacttactttactctacttagtcaaattttaactattttctggttcctttcatttgaatataatagttaaaataatgcagaccattcacagttcatatgttctccctttgtttttctctgactccacatgcactgacatgtatagtttctgctgaatttattaatttggtccagtttattcctgctgttaactttgatttcttttcctcctcttatctaatatttttcactatgatcagtatgttccatgaaatatatatattccttatttttctctcctaaagtataaacaaattgtcattgggaaaggagaacacttttctctgactcacataatgtagtagtaatcattcatattttacttatttgtggctgcataattgtaataggaagagtgtgtggccaggtgagcgaagccagaaaatatgttgcttggtagtttttccacattgctctcaaattttcatatattttgcttatttactggcccgtgtgtgacagtagtcacacaaatagtacctattattgtctaacttggggatgccatggggaaggtgtagattttcttggcactggattctgcaacacttgattaatcttaattctatggcaaaaaaaaaaaaa

SEQ ID NO: 798 - DNA, 1047 bp, Homo sapiens
gaagagtcagccttcttcttttcccggcctaggtagtagagctcatatagaaaaagtgagacaatattggtacaaaactacattatttattgcttccactgaactgtcaagaggcagcaggtgaggcatgaagatgggcagttctcagaagttttcctgaacctacaggtttatgttaatttttttatgtataatttgtcttccttgtttatgatctcatttctagtctgccatgtaaccccttctcaaactttaaaaggacctcccttgagctggagctaacgagaccatttcttgtctgcttacaattttaaaaaaaaagctatttgcaagtaatttttctcattatgatgctgttatcataaagtgagattccagtagccagggtgtcaagggatggtatatggacagtgcaactttgacttactttactctacttagtcaaattttaactattttctggttcctttcatttgaatataatagttaaaataatgcagaccattcacagttcatatgttctccctttgtttttctctgactccacatgcactgacatgtatagtttctgctgaatttattaatttggtccagtttattcctgctgttaactttgatttcttttcctcctcttatctaatatttttcactatgatcagtatgttccatgaaatatatatattccttatttttctctcctaaagtataaacaaattgtcattgggaaaggagaacacttttctctgactcacataatgtagtagtaatcattcatattttacttatttgtggctgcataattgtaataggaagagtgtgtggccagggtgagtgaagccagaaaatatgttgctttggtagtttttccacattgctctcaaattttcatatattttgcttatttactggcccgtgtgtgacagtagtcacacaaatagtacctattattgtctaacttggggatgccatggggaaggtgtagattttcttggcactggattctgcaacacttgattaatcttaattctatggcaaaaaaaaaaaaaa

SEQ ID NO: 799 - DNA, 1047 bp, Homo sapiens; identical to SEQ ID NO: 798

SEQ ID NO: 800 - DNA, 1721 bp, Homo sapiens
gaaggcttaaattaagtatgttgacaataccccaaactactggatgatatttgtaatgaatttcaccctatatcagtacagaagggtgtcacagttcagcaaaacaaaagagaatacgctttgttaaacctctactttctgaattttaggacagtgaggaaatttaacattttcaatttttttttcttttcttgactgaaaagaaagtcaagccagcaatatgtttctgagagagcagtgatgcatttcacaacactgttaactgtctgcttggctttttgaggcttccagagttcagaattgtcttctcttgaataggtcagtgcatttttttccttcagtttttctccttaagcagcaaaacagaccatttaacttccaaatatttacagcttgcaaacagataaacttcccaaatctgtttttttttatgaaaaggaaaacgatcagccacaataatctataatacgatatatttgaatcaaagttattagatgccctagggtcttttcatggcagattttatatatcaccaccattaataaatctgttatcagaattatgtctttctctctgttgatagttatttttagactaacatattcatacctccttctgatgaaaaacattaaaatttgaataaggcatattagaaaaccctaaagctctgtatttacacaaaggagactcataaatattggtttttcagggtgaagcattgtgtgttattccattttgtaccacagggaaagcctagtcacacatggggcctcattaaaagaggatctaaagaaatatttaatggttgaaatataaggtcttattctgaatatctaccttcactttataataatagaaactgaactgaaaagattcagtaagtgatttagaacatccactcattttaaaagtaatgtctaggcctaggaaagtgacatcatgttccaaatgttacaaatccagcgtttttccttgatgtctttataaatacattgtttacagtttttattctcctccatatatgatgccccttttctaagattatttcgtaggtatatcctttaatgagagaacctcataaataaacttcctgaatttgaaaacgagtgagaggagacttcaagtttgtggactgagctaaacatgtgtctactctcccttcaaacatcccatggaaatggcagtaaagacagaacaaagagaatacatttctgaatatactgaggaacatatactccagagagcagaaacaggaagaggggcctctgctaaagctgaaggagtcttcaggagggaacccagctgggctctgtgttctggttggcagatacagagagtagccaaggtcaaaagcagacaaacagaaagtgaggtgattggccacaggtttggaaatggctcaggtttgctctttccaaccccttgcatgtcactgcacatttacctccagaagtaaagcaggagaactctgcaaagggaaccaacaatctgcatgggagggcattgcctccaagtgtgtgggctggcgaccaagtgcagccctctgccctagttatgggagttggagagggacttactggtttgcatgttccatgcaagagctaaagcaaagcacatctcggagaagtgagccaggaaagtggatcaatccatgccaacaacctatattaattaacctgataattaatatgtatataaagtgaaaaaaaagaaagaaaaaa

SEQ ID NO: 801 - DNA, 2743 bp, Homo sapiens
ttgaggcaaattattttgcattcatgttatttggggctaggtattgcttaggttcgtgaatgctgttcttacagacacagatggtacctgagcccctcagacacctgccctttcagggacgttagcatgacttacatctgtcaagtggttccatacttcttgtaaaagtaaagtttgggtattgtttgctgtatcaatatgatggctttccatgcattgtctcattatccctaggatacgtgctaaaggaaaactgtcctgtaattcctgttaatatattgttaatgtcagacgtgatgtgatactgttggactgtccaaatgtacaacaatttaatggtgtttgtagaactgatatgtcttaaatgttgcatgaaatatgttataaaaatagatttgttttctattttcaacacctcagaattgagggttcatgggccaataagtgcaatatttaatgactcactcagtgtatataaactagtatgaaagagtgaattataatgaatgtgtgagatgctttgatagctgtgtgacttattcaaatgattttcttgtagctgtatttgtctagtggtgcaatttatacagtaaatatcttattggtgtcatgtaaaacccctctgtgcctacttcaaaatacttttttcttataaaaccaaacatttagtatctggaaatatgtgtcaattttatctcttagaattgtggattttattgtcaagacagaatggctgttcatttattttataaaagcatctccttctataactcaaaattgtctttaagtgtcatataaaagtgtacattttacttttaagcaactaatttagatacctaagaaaaactatgtgcattaggaaaagtcatgtttttcttctcagaaaggttgatcacatgatatgtctactaagaattttcacctctgtacttgtatgtatattttattgttactcaatcttgtattttatttacaaattcaacactgtcaaccctgggaattctaaaataccaatgtatttttaggttgtagctaatgttgtattcactttcaattctcagttgtccacactggtgatataagaggaacaaatcagaatcattaaatactttgtaatgccatcataaactcatatattcatcctcaaactcccttgtttaatgctaattggtggcctggaacttcactgagatgcaaaatcaagaactgaagcctagttgctagataacaaaaagctataaatgtttatgtatgtgaattttaaattagaataaccgtcttaaactcctacttgccatttctaaggcaaagcattcattttaatattgtactttgccttttcattcagttagtggagtaagtcatgaaacccttaggaagaaaaacaagttatgacttattcactaaaattgatgcaagacagttggttctagatgaccatggccatgtgttcatcatataaaaccttcagttctctctatggtgcttggctggagattgacatgtgaggatgtgccaatcatattaaatggatttggtctatgtgggtgatatgtggcctgaatgtaactgtgatagactgaaatttgttcttagctctcaaaatccactgaagaagtcaagtgaaggtgggtaaaatagggagattagtgacaactttgtgccaaattttttaaaaaatggaagcaggtagccaatattagaatgataatttaagggtgtggttgaattttagttagttgtcacatagttattgaacctcatatgctcagtgctgtgggaatcaaacatggaagaggtatggctcctgcccctaatgagaacaagggggaaaaatccagatataatctaaatgctaggttatgtcagggtataggaacacagagaatgggggacctgtaagaactggaagagtcagagagggctccattgaagaggtcaaacataattccggaaagaattaggtagtgaggagattgtgccaggaaaataagtgggaaaggccacagttatgtttcctttgaatggaagagagacaaagctatcagctatagatcattgttttcttaagacagccaaactggccctttgaaaccattcaaattaccccagtttagctccctaccttttagtctccgtgaggaagacaagctgttgcattatcatattcctctgtgctgagcagctcaagactcagccacaatatgcaaattgctttaatgccatattacggcagttgatttagacatttgccagtgcaccaaaccatgagagattgtccgacctaatgccacctggcagatgtgtacccagagatttttctgtagctccatgtttcccataaagggcattggaaatgcacagatgaagatcttcctttggaaccaggcacatttggccccttctcagtgactgcactgtggaactcttcttaagaaaatattgaaaacagcttaatgctttcatatagtgaccgacatttagttgaaaactactgctgcatagcaaatattgtgactcttcatgtgtccacaggagctcttgtgtgggtttaaagctatgaagtgtattcacattgtgaagttttaattatctttattgaaattaattgtgtaaaaatggtatgtgctctattaggtattcagtttgtatgtgaattctatatagaaagtggtttttgttctttgagtttgttttatttcttgaagattacaataaatatctaagagactatattcctgaa

SEQ ID NO: 802 - DNA, 2743 bp, Homo sapiens
ttgaggcaaattattttgcattcatgttatttggggctaggtattgcttaggttcgtgaatgctgttcttacagacacagatggtacctgagcccctcagacacctgccctttcagggacgttagcatgacttacatctgtcaagtggttccatacttcttgtaaaagtaaagtttgggtattgtttgctgtatcaatatgatggctttccatgcattgtctcattatccctaggatacgtgctaaaggaaaactgtcctgtaattcctgttaatatattgttaatgtcagacgtgatgtgatactgttggactgtccaaatgtacaacaatttaatggtgtttgtagaactgatatgtcttaaatgttgcatgaaatatgttataaaaatagatttgttttctattttcaacacctcagaattgagggttcatgggccaataagtgcaatatttaatgactcactcagtgtatataaactagtatgaaagagtgaattataatgaatgtgtgagatgctttgatagctgtgtgacttattcaaatgattttcttgtagctgtatttgtctagtggtgcaatttatacagtaaatatcttattggtgtcatgtaaaacccctctgtgcctacttcaaaatacttttttcttataaaaccaaacatttagtatctggaaatatgtgtcaattttatctcttagaattgtggattttattgtcaagacagaatggctgttcatttattttataaaagcatctccttctataactcaaaattgtctttaagtgtcatataaaagtgtacattttacttttaagcaactaatttagatacctaagaaaaactatgtgcattaggaaaagtcatgtttttcttctcagaaaggttgatcacatgatatgtctactaagaattttcacctctgtacttgtatgtatattttattgttactcaatcttgtattttatttacaaattcaacactgtcaaccctgggaattctaaaataccaatgtatttttaggttgtagctaatgttgtattcactttcaattctcagttgtccacactggtgatataagaggaacaaatcagaatcattaaatactttgtaatgccatcataaactcatatattcatcctcaaactcccttgtttaatgctaattggtggcctggaacttcactgagatgcaaaatcaagaactgaagcctagttgctagataacaaaaagctataaatgtttatgtatgtgaattttaaattagaataaccgtcttaaactcctacttgccatttctaaggcaaagcattcattttaatattgtactttgccttttcattcagttagtggagtaagtcatgaaacccttaggaagaaaaacaagttatgacttattcactaaaattgatgcaagacagttggttctagatgaccatggccatgtgttcatcatataaaaccttcagttctctctatggtgcttggctggagattgacatgtgaggatgtgccaatcatattaaatggatttggtctatgtgggtgatatgtggcctgaatgtaactgtgatagactgaaatttgttcttagctctcaaaatccactgaagaagtcaagtgaaggtgggtaaaatagggagattagtgacaactttgtgccaaattttttaaaaaatggaagcaggtagccaatattagaatgataatttaagggtgtggttgaattttagttagttgtcacatagttattgaacctcatatgctcagtgctgtgggaatcaaacatggaagaggtatggctcctgcccctaatgagaacaagggggaaaaatccagatataatctaaatgctaggttatgtcagggtataggaacacagagaatgggggacctgtaagaactggaagagtcagagagggctccattgaagaggtcaaacataattccggaaagaattaggtagtgaggagattgtgccaggaaaataagtgggaaaggccacagttatgtttcctttgaatggaagagagacaaagctatcagctatagatcattgttttcttaagacagccaaactggccctttgaaaccattcaaattaccccagtttagctccctaccttttagtctccgtgaggaagacaagctgttgcattatcatattcctctgtgctgagcagctcaagactcagccacaatatgcaaattgctttaatgccatattacggcagttgatttagacatttgccagtgcaccaaaccatgagagattgtccgacgctaatgccacctggcagatgtgtacccagagatttttctgtagctccatgtttcccataaagggcattggaaatgcacagatgaagatcttcctttggaaccaggcacatttggccccttctcagtgactgcactgtggactcttcttaagaaaatattgaaaacagcttaatgctttcatatagtgaccgacatttagttgaaaactactgctgcatagcaaatattgtgactcttcatgtgtccacaggagctcttgtgtgggtttaaagctatgaagtgtattcacattgtgaagttttaattatctttattgaaattaattgtgtaaaaatggtatgtgctctattaggtattcagtttgtatgtgaattctatatagaaagtggtttttgttctttgagtttgttttatttcttgaagattacaataaatatctaagagactatattcctgaa

SEQ ID NO: 803 - DNA, 377 bp, Homo sapiens
gcatgtaattaatttcctccaaacagagagagtggaggggaaataaattttgcaagcattctagataacagaaatgagtcattttaaaacctcactcagagctcgagttaagatcagaccatctagctagtggacaaattgaactttctatttgcagttctcttttactttctgactttcttttaaattactgcagtttttcaaaacactatcctcatggaatgacaggaccaagaatagaaaatgagactcaaatttcaccatttacttcccatcagcaaccattactggtggagtttcaaacagtcattacttgctgaaatgaggtttgaggttacctgtgtatttcattcacctgtgttaatatttccttcatc

SEQ ID NO: 804 - DNA, 377 bp, Homo sapiens; identical to SEQ ID NO: 803

SEQ ID NO: 805 - DNA, 10292 bp, Homo sapiens
  misc_feature (2498)..(2498): n equals a,t,g, or c
  misc_feature (9168)..(9168): n equals a,t,g, or c
tgcagcagaaagatctcagagtaaagaagaacttaaagaaattcagatatgtgaagttgatttccatggaaacctcgtcatcctctgatgacagttgtgacagctttgcttctgataattttgcaaacacggtaagtgctgcctgagaataaacagaattgagtctgcagtgctcaaaatgccccagatgctttgtgcgtgattaaaactgcttgctttttgcctacatttctatacagccgttatgaaaatacagtatgcactataatttcatttcactttttgctgtggttctaggtagtaattgttggaggtagattagctacttattctatccttttgaaatgtcgcctaacctaacatgcatgatgatttgccataacaactcagaaatcatttgtaaacctctgaaccatttttctttgtaacaaaagctgttctcttgtagtgcacttgtaaatgtgatttgctctctgcacggtttatggaaaattggttcttgaaaaagaaaaaaaatgcacaaccgcatttatttatttattttacagaaacctaaattcaggtcagatatcagtgaagaactggcaaatgttttttatgaggactctgataatgaatctttctgcggcttttcagaaagtgaggtgcaagatgtattagaccattgtggatttttacagaaaccaaggccagatgtcactaacgaactggccggtatttttcatgccgactctgacgatgaatcattttgcggtttctcagagagtgagatacaagatggaatggtgagttcgagaatttcaccagtttcaagaagtaagatacatttagaggcatgacatatttttagaaatttttttcttgtgattttgattttagtcatgccagcagactttgttgaccttttaaaaatttttagtgttttcttcatgtcttaaagcagtgtttactaatgtagtcggacttacaaatcatgaacattttgtaggctctgaaaatttggaaactggtaagataaaattggccaatctccagattttcgtttccacaaaaatccagcctaatcaggaagcacactagttctaaatattatctacatttgcatttaagttcaagtgcccagcctagtgcctgtcatagagcagacctttgataaatgttggtctcatagtagatctgtggctgcatcttgaaaacctgtgataacttacgtgcaggagctccattgcagataatgacattgagggcccttcctgctgctacttttgctccttggttggcttttcctatgcacgctaccttcctttaactgccgctgccactgttgtgctgtgcctcggtcccactcttctgagcatactgcttaattctgcacacattttcctgttccaaagactttcttgacaaaggaagcagtgcattcactgataatcaagtgcatgctcttcaactcactggtctgacatggatccactgcctgaggttcatggtttgagtaacattgatagaagtggcagtgcctggccaaggagtgttttggtccaaatcagtgcatactggagtttgttgcagggggtccagtctgcagatctggatgcgacacaaacattgtcaatagcctgaataatttctgggcagtgtttcagttctttgaagatactgtcatgattaataaaatgccaattcattataattgttaggaactcatgaaaggtttttgttgttttgtactctctcaatccatggacactaaaagtacaaaaagctgtttgtgggcatgtaagacttttgagacagggtcttgcactgtcaaccaggctggagtgcactggtgtgatcatggctcactgcagcctccacctcctgggcttaagcgattctccctcagcctacccagtagctgagactacaggcgtgtaccaccatgcctgggaacttttaaaaattttttatagagatgtgggctcactttgttgctcaggctggtctcgaactcctaggcccaagcaatcctcccgtctcggcctccaaaagtgctgggattacagccaagagccaccttgctggccttgataaatattttaatgttaaaactgagtctttatgggtgaaattctgggatttatgggtgatttttttcttctctctctctttttttttaacctgcaaccattaccatagtcaattttggaataactttatgaccccaaaaaatgactctgtacccattaacagtcactccctattctttcccaacacccccagctcctggcaaccatcagtctgctttctgtcgtcatagattagcccgttgtggatatttcataaaaattgaatcatgatatgtggtcttttgtgactggcttctttcacttaggataatgatgtcaaggtttatttatgttgtggcatgtgttagttcttcattttattgcagaatattctgttgtgtgaatcagccacatttgatttacccattcatcagttgatggataagntgggttgtttgcacttttttggctattatgaataatgctactgtgaacattcatgtacaagtttttgtgtagtttttgtgtatactcttaggtatatacataggaatagaattgtgggtcatgtagtaactgtttaaccttttgagaaatagacaaagtggctacaccagtttacattcctaccagcagtgtgtgagggttacagtttctccaaatttttgctaatacttttttttattttccttttgctttttttttttttttttgagacagagtctcactctgtcacccaggctggcgtacagtggcataattttggctcaccacaacctccgcctcctgggttcaagcgattcttgtgtctcagcatctgagtagctgggactacaggcatgtgccaccacacctggctaattttttatatttttagtagagacggggttttgccatcttggccagactggtctcgaactcctgacctcaggtgatctgcccatctcagcctcccaaagagctgggattacagatgtgagccaccatacccagccttcttttgctttttagctctactatgaagtggtgtctcactatgttttgtgtttttttttatttttatttttcggagacggagtcttgctctgtagcccaggctggagtgcagtggtgtggtctcagtgatctctgctcactgcaacctccgcttcctgggttcaagcgattctcttgcctcagcctcccaagtagctgggattacaggcgtgtgccactgtgcctggctaatttttgtatttttagtagaaacgggatttcaccatgttggccagactggtgtcaaactcctgacgtcaggtgatccgcctgccccggccttccaaagtgctgggattataggcatgagctaccgcacccagccttgcattgtgattttgatttacattaccctatggctaatttggataaatttttaatgatgaaaacctatattacttttggaatctggaaatattttcattttgaacttctaaaagtagattagagaagtacctagagaagtcaaatgtatagacagaaaataggatgatggttgccaggggcggagggaaagagggaatgaggaattactgtttaatgggtatggatggagttttagttggagaagatgaaaacattctggagatggatggtggtgatggctgcacaacaatgtgcatgtatttaatgccattgacttgtatacttagaaatggttaaaatgataaatcttatgtatattatattatatattttttaaagtagagaattgagatctgttaatataatttaatattgccataaacattgaagccatatttataggggaacacatttttttccctttttttttttttcaagacagggtctggctctgtaacccagccctggcatacagtggcacgaacacggctcactgagcctctgccccctgggctcaagccatccacccacctcagccttccaagtagctgggaccacaggcatgcgccaccatgcccagctaatttttgtatttttttttgcagagacggggtttcaccatgttgcccaggctggtctcgaactcctaggctcaagtgattcacccgcctcagcctcccaaagtgctgggattacagatgtgagccactgcacccagccaggagaacacatttgttcttgtcagaattcttttaaaatacataaagatctgtttctaaagaaatgaaaagcaggtggtaggaattttaacattttaaaaaaaggctcagaaccacaggcctagggactatgaaaatagcttataacagtgtggtccagatgggctacatggaattaaactgcactctgttgatgtactctttgtggttcctgattttgttacccagaggtatcaatgttcagttaaaattcatttcatacaagtgtctcattgaaaagggactttgtagttatactgatgcagcttgtctgctgatcaagtcctaatgactcaattgttgtgattagaggctgcagtcagttcgggaaggctgtaggacccgcagccagtgcaggcactctggacctctcagggtggcgatgaagtttccagcgcggagtaccaggggagcaaccaacaaaaaagcagagtcccgccagccctcagagaattctgtgactgattccaactccgattcagaagatgaaagtggaatgaattttttggagaaaagggctttaaatataaagcaaaacaaagcaatggtaggtatctgactttgtgttagaattaatttttcctctctaagcgactcattacttaaatctgttccatcacgcaaaagttatttttttctgttacatgaataaaaagttatttttgtttacctgtgaagtcttcaatgtgtgcctcaaaatgtgtttctttccctgaactactttttttaaatctgttaaaggcctggttaagtgtataggggaaatcagaaactctgaatgtgtcagcttactatcaaatataaaaccatgagatgtacttgagtattttccagaagttagttgctcattttcgacagttattctaagccaatgatatcagtttaatttcctccctttttagcttgcaaaactcatgtctgaattagaaagcttccctggctcgttccgtggaagacatcccctcccaggctccgactcagtaagtaccagttcttgtttatatacagtagtgttttgggcacacctaaggtcgatctgtgttgtatttaaaaatctaatttctttatttgtgtggccttctagacaaacgaaggggacctagaggaaaccccctgacagatctctggatgatcctccttgaatcctgggcagtttggtctctccttgctgtgctcctgtggcactaaactccttttgattggttctttctttccttcccagctagactaagcccctcatgggcaggtaatgaagattgaaaacttttttctgttctccagtgtgagcacattcctcctacatggtagatgtgcaatagatgtttttaaaattggagaatgaaaataaaagaagaaaatcacaatttcttatcaagttgtagcttggtatcatacacaattgcattctgaggaattaaggtggtacaacttagggagatttggtgtgtctgctgtgatagaaaagatttctttttcctggctttccctgaggaaaggaaagatggaaagagggaagccatacagatatccctctattttgcagtgtagaaactgaatgtgtttctacagggtcaagagacatcagagaaaatttttttttttagaacagaagatcatttcttacatcttcattaagtaaaagaataaatagctcatctctcaagttgaaagaaactgggcttggtattacaaaagcaaaattaagatggccatataggttttaggctcattttgccatgcattatgcaaaggacaaagaaaaagaaaaaatagagctctctttacttaaaacatccttaaggagaagctatgaattccccaaagtactacttctctttattatggaataaatggattcccttatacgtgctttgtttagcaatcaaggagaccgcgaaggcgtacattcccgggtgttgcttccaggagaaaccctgaacggagagctcgtcctcttaccaggtcaaggtcccggatcctcgggtcccttgacgctctacccatggaggaggaggaggaagaggataagtacatgttggtgagaaagaggaagaccgtggatggctacatgaatgtgagttctccgcattggtacttgctcttctgattctcatcttcggtaggcctggcatcatacacagcacaggtacacgcacatccttaacaccaggcgatccatagtaaatgttttcctctaaccattcagaactgtaaacgtcacataagcttacttggtaattttattagcaggcgagaattgggttttcttcatctcttcttaattgtaggcatcgtttccaaaatgtccagttaggctacagtaagcgtatggcctgttcccctaccataagctctaggagagatttccaggttgaagtttgtgtgaagaaattacaagtcaagtatctgagattcaaagctggggagagccagttttgaatctctgtgtttcatatttgaatctgttttttcagttttgaatctctttcagtttttcagttttgaagttctgtgttttgtattccttgtaatgcaggaagatgacctgcccagaagccgtcgctccagatcatccgtgacccttccgcatataattcgcccagtggaagaaattacagaggaggagttggagaacgtctgcagcaattctcgagagaagatatataaccgttcactggtgagagcctctaaattacacctgagaatgtaaacatctgtgagaggaagagagcttctgtccctaagcgttgcccaggttctaaagggcctagcatgtgaaatctgtacctatatgtttttttcacacaaggaaggaaaagttttacagtatccctgggatttagccctctttcacagtggaattatctgcttagtaagtctgtagtcatggtaaatcttttctcctaatttagaaatcaattcattcaacatatatttactgcatatctattatgtgtgtatacatagctaggtgctggagtgtggtggtacaccaaagataaaagtggatttgggtaggttattttttaataagaccttttcttaaagggaaagcggttttaccacaccaggctaatttttatatttttagtggagatggggttttgccatattgcccaggctggtcttgaactccttggctcaagcgatccactctcctcagtctcccggaatgctggggttacaggtgtgagccactgcacctggttgagttatttttcataccctggcatatacatgtgtatgtagagattcatagacaaaatgtaagcctatactacgaagagggacattctgtaaatatgccatttcctctgttgaaaaacagtggttttttttgttttttttcttaatggcttatttgtagggctctacttgtcatcaatgccgtcagaagactattgataccaaaacaaactgcagaaacccagactgctggggcgttcgaggccagttctgtggcccctgccttcgaaaccgttatggtgaagaggtcagggatgctctgctggatccggtaggtgcctgccaggggttggtcctgtgggcttgaaggtcagccacaaactgtgatgaggccagaaaaaggcattggtgaaggggtggagccctttctgttatggggtgctcttctttttttttaagatggagtctcattctgtcgccaggctgcagtgcagtggcgcgatctcagctcactgcaacctcctcctcctgggttcaagcgattctcctgcctcagcctcccaagtagctgggactacaggcacgcgccaccacacctagctaatttttgtatttttagtagagacggggtttcaccacattggccaggatggtgtggtggtacaagatctcttgacctcgtgatccacccgcctcggcctcctgaagtgctgggattacaggtgtgagccaccacgcccggcccagggtgctcttaattcagaacacaaatgaattcagagggatggtgctgcataggcatgagccgcttctacgatactcgggtctgaactgtccctgggaagttgctgctccatttatccctggtagctgcttgtaacttccactcctggaaggaagcattaggcattaggaaacattaggcatgactaatgcctattaatcatataaatttttaaccataaagaaggggttaaatgtaatgtagataagttggtgggggaggtaaggtttaacttaattgtgccgtttgacaatcctccttcagaactggcattgcccgccttgtcgaggaatctgcaactgcagtttctgccggcagcgagatggacggtgtgcgactggggtccttgtgtatttagccaaatatcatggctttgggaatgtgcatgcctacttgaaaaggtagtgggtgtttttttttcccttccacatctgaattttatattcatttatgtcttaatgagaagatgatagatgtcagaagagtggttatctctggcggggtggagactgactggaacggggcacactggaagggatgggaacattttctgtcttcacttaggtggtggtaacccgggtgggtgggtgtgtatgaaaaagtcaggtaatatacttgaagatgcgcacacttgaccatagtgatgttataactcaataaaaatggttttaaaaatgaattaggctttcaaaagagaattctttggttgaaaactatgtcctgacacatttccttttgtttttcacagcctgaaacaggaatttgaaatgcaagcataatatctggaaaatttgctgcctgccttctacttctcaaatctttcttgtaaaagtttccaattttttcactgaaacctgagttaaaaatcttgatgatcagcctgtttcataagaaactccaatcaagttaatcttagcagacatgtgtttctggagcatcacagaaggtatattgctagttacactttgccctcctgcagttttttctntgctcccaacccccatctcacagcatccccctctatttccaatgctcctctccaaccgcttagtttctgaatttcttttaaattacagttttatgaaagcatattttatttacttggtgttgaaatagccctcataaaacctaagcacttggaaacacaataatagtattaactaactagatctattgaatttcagagaagagccttctaacttgtttacacaaaaacgagtatgatttagcattcatactagttgaaatttttaatagaatcaaggcacaaaagtcttaaaaccatgtggaaaaattaggtaattattgcagattgatgtctctcaatcccatgtattgcgcttatgttacaagttgttgtcacagttgagacttaatttctcctaatttcttctgcccgaagggtaagtggtgcgtccagcttacacaatcataattcaaaggttggtgggcaatgtaatacttaattaaaataatgatggaagagctatctggagattatgagtaagctgatttgaattttcagtataaaactttagtataattgtagtttgcaaagtttatttcagttcacatgtaaggtattgcaaataaattcttggacaattttgtatggaaacttgatattaaaaactagtctgtggttctttgcagtttcttgtaaatttataaaccaggcacaaggttcaagtttagattttaagcacttttataacaatgataagtgcctttttggagatgtaacttttagcagtttgttaacctgacatctctgccagtctagtttctgggcaggtttcctgtgtcagtattccccctcctctttgcattaatcaaggtatttggtagaggtggaatctaagtgtttgtatgtccaatttacttgcatatgtaaaccattgctgtgccattcaatgtttgatgcataattggaccttgaatcgataagtgtaaatacagcttttgatctgtaatgcttttatacaaaagtttattttaataataaaatgtttgttctaacttgtctgcttttttaaaaataatcttactgtacttaattctaattttttcctcatatttaaataaaaggccatttccaccttttctaaaaaa

SEQ ID NO: 806 - DNA, 14150 bp, Homo sapiens
tcggcgcgcccagcctgccagccgcgctgctgctgctcctcctgctgtgggaccgctgaccgcgcggctgctccgctctccccgctccaagcgccgatctgggcacccgccaccagcatggacgctcgccgcgtgccggtgagggctgggcgggcgaacccgaggggcgggcgcggtgggtgctggacgcaggcgggcgcgggccgaccctctccaactccgcagcctagcgctgccttaactggtggcctgcctaggcgttgcccgcttgggcaagcccctgattttgtgcacctgggataactgagggccatggggacgttcctgcgtggcgtgcgcacccgaagtgcgggcggcgtggagacttgagtcgtttgcaggatggctagcagcgctggaaagccctaggcacgtgcgtccgccaaaggccggacagcggccgggagcgctggccggtcccgattttgcctgccaggcagagccagcctgcctgccccctgggaggttgtcccgcagcggcccagccctttcccgcacacaactcggagccagtgcgtggctcgccgcgtctatacccgcgctcagtgggtggcccttgggcgcgcaccccgcccggcaagagacgcgtccgcttctaaccgctgagggccagcgcgtctgaggtttaaggtcttgcgaaccggtctcctagaacttgggctgcgcacgcagtgtgaagcgaccgtagtcccgggcggtggttaagtgcatttaaagggcttggtgggtcaaagcgttcgccgaccatttgctcgtttcctacttcctccaccccaacccccaaccccccaccccccaccccccagccttactcttagctgcaggacgttgctctgagtggaacgttactttttgctctaacggaagccagaacgtagggtcgggctcctggagagggtagaagagtgggggttgggtgaaacggaagacaatgacatgtttaaaataaatatcaggggttagggaccctcgcgggggtgggtgcgatggggcgtggtttcagagctgagtcgccgccccggtggagctgggcattggctttccggatgaagaaaaccatgtgtagctggtcttggaacctgacatgcctgagttcaaatctgagccaccatgggacttgagtaatccatttcgctttcctgagcctcagtttcctcattggctaagtgagaataacgatagcacctttgttgcaaagaattaaacctgacgtgaaagtgtacttaacatagtgcctggcacgaaaaacgcctactataaatggtattagttattacttacctgccaaagaagttcatctccgtcttgactatttgccttgctgcttttttgtggcttttcctccaaagatacgtttgcctggtaaataactcttggcttgtgctgacttgttaaagctcagcctgtatttctcggacagcttccaatagaatgccgcctttgaggctgtctggggcctctgactgcttgcaggtagattgatgagtaaagggtggtaattcctgcagtaatgcgatgaacactgctgcttaagaagatggcagacttgagttctccttcctgcccctgtgatcttgcagtctattacaccttcctggggccttgaatatcctcatctggaaaatgggatctgagatccttttcagctcccaacattcattgtgtcccaggctggagtgcagtggcacagtcacggctcactgcagcctaccgggctcaagcagtcttcccacctcagcctcccaagtaactgggattacatgtacgcaccgccacatccggctgatttttgtgtttttagtagagacggggtttcaccatattccccacgctggtctcgaactcgtgggctcaagtgatcctcccaccttggcttcccaaagcgctgagattacaggtgtgagccacccccctacacatacacctaacctttatatttagtagctctaccttttacacgttgtcctgccttgttaagagggcaaaagacaaaaacttcctaagatgattgaacggagtttacttaggggtatagggatgttgggagtgccatcatcatgaaaataactttatctgcaagagactgaaatgcgtaatgttaggccaagaaggagggcaagaatgttctggtcacctgacatcttacatcttagcatattttgtagaatctataccagagcttgccctttcaaagttttcagtgtaaggaatcacttctgctattccatggccccatttaaggaataaaaacacaggacctaatgcaacacttaggaaatctcgttaaatattaagaaatgacaaaccactatcctttttttatacaagatagatgccaattacattttctgagagcagtgccaggctgttcagtatttatgaatgaatgaagcatttctatgtaagtaatttgcactttataaaaggacttttaaaaacttaagtcttgtatagcaaagggacagcaacaagaactgaatgacagcctcaagtaatagagtgctaaaatggaatccggtatcccacctgcatttggagtgctatttgatctttaacttggctccttgtaccatttgttgaagcgtttgatgtatttgctttgtaaggacttctgtggaaatcacgatagccctcttgattggaaaggggcctgcttggaagcctgccatcttgaagtagaggtcctgcccagtttttgtagtttgtgaaattagcatcacagtacatagcccaaagcttacataaaaatacctcattagcttgattttggctgagggagaaaatctttctccccttttgtacttttgaaatttccttttagaagtacagtttaatttttttaaaaaaacaggttggattttaggagtttagcattaaaatctcctgtggggctcagtataatgctaagagctaaagattaggggctcataaaggtgggttgagaggtagctctacagatgtttgaataaattgataaatgtctttacaattttcctgcaaagggatcccttcttagaatttgacctggttttggccgggcgcggtggctcacgcctgtaatcccagcactttgggaggccgaggcaggcagatcacgaggtcaggagattgagaccattctggctaacacggtgaaaccccgtctctactaaaaatacaaaaaattaaccgggcgtggtggcgggcgcctgtaatcccagctactctggaggctgaggcaggagaatggcgtgaatccatgaggcggagcttgcagtgagccgagatcgcgccactgcactccagcctgggcgacacagcgagactccgtctcaaaaaaaaaaaaaaaaagaatttgacctggttttaaagatttttgggtccagatacagtagctaatgcctgtaatccaagccctttgggaggctccggtgggaggatcacttgagcccaggagtttgagaccaacctgggcaacatagcaagaccccatctctaaaaagaaataaaataagttagctgggcatggtggcacatgcatgtagtcctgtctactcaggaggctgaggcaggaggcttgcttgagctcaggagttccaggttgtagtaagctatgatctcagcactgcactttagcctggaagacagagcgagatcctgcttcttacaaaaaaaagaaagaaaaaattttttgtagcagttaacaaacttccttttctatgtagggtatgataaatggacatatctactctgtgctgtttgaacctactaaactaaaaaaaaatgatgtctttagttaaataaagtaagcatcacgcttaataggattgctatttccatttgcagcagaaagatctcagagtaaagaagaacttaaagaaattcagatatgtgaagttgatttccatggaaacctcgtcatcctctgatgacagttgtgacagctttgcttctgataattttgcaaacacggtaagtgctgcctgagaataaacagaattgagtctgcagtgctcaaaatgccccagatgctttgtgcgtgattaaaactgcttgctttttgcctacatttctatacagccgttatgaaaatacagtatgcactataatttcatttcactttttgctgtggttctaggtagtaattgttggaggtagattagctacttattctatccttttgaaatgtcgcctaacctaacatgcatgatgatttgccataacaactcagaaatcatttgtaaacctctgaaccatttttctttgtaacaaaagctgttctcttgtagtgcacttgtaaatgtgatttgctctctgcacggtttatggaaaattggttcttgaaaaagaaaaaaaatgcacaaccgcatttatttatttattttacagaaacctaaattcaggtcagatatcagtgaagaactggcaaatgttttttatgaggactctgataatgaatctttctgcggcttttcagaaagtgaggtgcaagatgtattagaccattgtggatttttacagaaaccaaggccagatgtcactaacgaactggccggtatttttcatgccgactctgacgatgaatcattttgcggtttctcagagagtgagatacaagatggaatggtgagttcgagaatttcaccagtttcaagaagtaagatacatttagaggcatgacatatttttagaaatttttttcttgtgattttgattttagtcatgccagcagactttgttgaccttttaaaaatttttagtgttttcttcatgtcttaaagcagtgtttactaatgtagtcggacttacaaatcatgaacattttgtaggctctgaaaatttggaaactggtaagataaaattggccaatctccagattttcgtttccacaaaaatccagcctaatcaggaagcacactagttctaaatattatctacatttgcatttaagttcaagtgcccagcctagtgcctgtcatagagcagacctttgataaatgttggtctcatagtagatctgtggctgcatcttgaaaacctgtgataacttacgtgcaggagctccattgcagataatgacattgagggcccttcctgctgctacttttgctccttggttggcttttcctatgcacgctaccttcctttaactgccgctgccactgttgtgctgtgcctcggtcccactcttctgagcatactgcttaattctgcacacattttcctgttccaaagactttcttgacaaaggaagcagtgcattcactgataatcaagtgcatgctcttcaactcactggtctgacatggatccactgcctgaggttcatggtttgagtaacattgatagaagtggcagtgcctggccaaggagtgttttggtccaaatcagtgcatactggagtttgttgcagggggtccagtctgcagatctggatgcgacacaaacattgtcaatagcctgaataatttctgggcagtgtttcagttctttgaagatactgtcatgattaataaaatgccaattcattataattgttaggaactcatgaaaggtttttgttgttttgtactctctcaatccatggacactaaaagtacaaaaagctgtttgtgggcatgtaagacttttgagacagggtcttgcactgtcaaccaggctggagtgcactggtgtgatcatggctcactgcagcctccacctcctgggcttaagcgattctccctcagcctacccagtagctgagactacaggcgtgtaccaccatgcctgggaacttttaaaaattttttatagagatgtgggctcactttgttgctcaggctggtctcgaactcctaggcccaagcaatcctcccgtctcggcctccaaaagtgctgggattacagccaagagccaccttgctggccttgataaatattttaatgttaaaactgagtctttatgggtgaaattctgggatttatgggtgatttttttcttctctctctctttttttttaacctgcaaccattaccatagtcaattttggaataactttatgaccccaaaaaatgactctgtacccattaacagtcactccctattctttcccaacacccccagctcctggcaaccatcagtctgctttctgtcgtcatagattagcccgttgtggatatttcataaaaattgaatcatgatatgtggtcttttgtgactggcttctttcacttaggataatgatgtcaaggtttatttatgttgtggcatgtgttagttcttcattttattgcagaatattctgttgtgtgaatcagccacatttgatttacccattcatcagttgatggataagtgggttgtttgcacttttttggctattatgaataatgctactgtgaacattcatgtacaagtttttgtgtagtttttgtgtatactcttaggtatatacataggaatagaattgtgggtcatgtagtaactgtttaaccttttgagaaatagacaaagtggctacaccagtttacattcctaccagcagtgtgtgagggttacagtttctccaaatttttgctaatacttttttttattttccttttgctttttttttttttttttgagacagagtctcactctgtcacccaggctggcgtacagtggcataattttggctcaccacaacctccgcctcctgggttcaagcgattcttgtgtctcagcatctgagtagctgggactacaggcatgtgccaccacacctggctaattttttatatttttagtagagacggggttttgccatcttggccagactggtctcgaactcctgacctcaggtgatctgcccatctcagcctcccaaagagctgggattacagatgtgagccaccatacccagccttcttttgctttttagctctactatgaagtggtgtctcactatgttttgtgtttttttttatttttatttttcggagacggagtcttgctctgtagcccaggctggagtgcagtggtgtggtctcagtgatctctgctcactgcaacctccgcttcctgggttcaagcgattctcttgcctcagcctcccaagtagctgggattacaggcgtgtgccactgtgcctggctaatttttgtatttttagtagaaacgggatttcaccatgttggccagactggtgtcaaactcctgacgtcaggtgatccgcctgccccggccttccaaagtgctgggattataggcatgagctaccgcacccagccttgcattgtgattttgatttacattaccctatggctaatttggataaatttttaatgatgaaaacctatattacttttggaatctggaaatattttcattttgaacttctaaaagtagattagagaagtacctagagaagtcaaatgtatagacagaaaataggatgatggttgccaggggcggagggaaagagggaatgaggaattactgtttaatgggtatggatggagttttagttggagaagatgaaaacattctggagatggatggtggtgatggctgcacaacaatgtgcatgtatttaatgccattgacttgtatacttagaaatggttaaaatgataaatcttatgtatattatattatatattttttaaagtagagaattgagatctgttaatataatttaatattgccataaacattgaagccatatttataggggaacacatttttttccctttttttttttttcaagacagggtctggctctgtaacccagccctggcatacagtggcacgaacacggctcactgagcctctgccccctgggctcaagccatccacccacctcagccttccaagtagctgggaccacaggcatgcgccaccatgcccagctaatttttgtatttttttttgcagagacggggtttcaccatgttgcccaggctggtctcgaactcctaggctcaagtgattcacccgcctcagcctcccaaagtgctgggattacagatgtgagccactgcacccagccaggagaacacatttgttcttgtcagaattcttttaaaatacataaagatctgtttctaaagaaatgaaaagcaggtggtaggaattttaacattttaaaaaaaggctcagaaccacaggcctagggactatgaaaatagcttataacagtgtggtccagatgggctacatggaattaaactgcactctgttgatgtactctttgtggttcctgattttgttacccagaggtatcaatgttcagttaaaattcatttcatacaagtgtctcattgaaaagggactttgtagttatactgatgcagcttgtctgctgatcaagtcctaatgactcaattgttgtgattagaggctgcagtcagttcgggaaggctgtaggacccgcagccagtgcaggcactctggacctctcagggtggcgatgaagtttccagcgcggagtaccaggggagcaaccaacaaaaaagcagagtcccgccagccctcagagaattctgtgactgattccaactccgattcagaagatgaaagtggaatgaattttttggagaaaagggctttaaatataaagcaaaacaaagcaatggtaggtatctgactttgtgttagaattaatttttcctctctaagcgactcattacttaaatctgttccatcacgcaaaagttatttttttctgttacatgaataaaaagttatttttgtttacctgtgaagtcttcaatgtgtgcctcaaaatgtgtttctttccctgaactactttttttaaatctgttaaaggcctggttaagtgtataggggaaatcagaaactctgaatgtgtcagcttactatcaaatataaaaccatgagatgtacttgagtattttccagaagttagttgctcattttcgacagttattctaagccaatgatatcagtttaatttcctccctttttagcttgcaaaactcatgtctgaattagaaagcttccctggctcgttccgtggaagacatcccctcccaggctccgactcagtaagtaccagttcttgtttatatacagtagtgttttgggcacacctaaggtcgatctgtgttgtatttaaaaatctaatttctttatttgtgtggccttctagacaaacgaaggggacctagaggaaaccccctgacagatctctggatgatcctccttgaatcctgggcagtttggtctctccttgctgtgctcctgtggcactaaactccttttgattggttctttctttccttcccagctagactaagcccctcatgggcaggtaatgaagattgaaaacttttttctgttctccagtgtgagcacattcctcctacatggtagatgtgcaatagatgtttttaaaattggagaatgaaaataaaagaagaaaatcacaatttcttatcaagttgtagcttggtatcatacacaattgcattctgaggaattaaggtggtacaacttagggagatttggtgtgtctgctgtgatagaaaagatttctttttcctggctttccctgaggaaaggaaagatggaaagagggaagccatacagatatccctctattttgcagtgtagaaactgaatgtgtttctacagggtcaagagacatcagagaaaatttttttttttagaacagaagatcatttcttacatcttcattaagtaaaagaataaatagctcatctctcaagttgaaagaaactgggcttggtattacaaaagcaaaattaagatggccatataggttttaggctcattttgccatgcattatgcaaaggacaaagaaaaagaaaaaatagagctctctttacttaaaacatccttaaggagaagctatgaattccccaaagtactacttctctttattatggaataaatggattcccttatacgtgctttgtttagcaatcaaggagaccgcgaaggcgtacattcccgggtgttgcttccaggagaaaccctgaacggagagctcgtcctcttaccaggtcaaggtcccggatcctcgggtcccttgacgctctacccatggaggaggaggaggaagaggataagtacatgttggtgagaaagaggaagaccgtggatggctacatgaatgtgagttctccgcattggtacttgctcttctgattctcatcttcggtaggcctggcatcatacacagcacaggtacacgcacatccttaacaccaggcgatccatagtaaatgttttcctctaaccattcagaactgtaaacgtcacataagcttacttggtaattttattagcaggcgagaattgggttttcttcatctcttcttaattgtaggcatcgtttccaaaatgtccagttaggctacagtaagcgtatggcctgttcccctaccataagctctaggagagatttccaggttgaagtttgtgtgaagaaattacaagtcaagtatctgagattcaaagctggggagagccagttttgaatctctgtgtttcatatttgaatctgttttttcagttttgaatctctttcagtttttcagttttgaagttctgtgttttgtattccttgtaatgcaggaagatgacctgcccagaagccgtcgctccagatcatccgtgacccttccgcatataattcgcccagtggaagaaattacagaggaggagttggagaacgtctgcagcaattctcgagagaagatatataaccgttcactggtgagagcctctaaattacacctgagaatgtaaacatctgtgagaggaagagagcttctgtccctaagcgttgcccaggttctaaagggcctagcatgtgaaatctgtacctatatgtttttttcacacaaggaaggaaaagttttacagtatccctgggatttagccctctttcacagtggaattatctgcttagtaagtctgtagtcatggtaaatcttttctcctaatttagaaatcaattcattcaacatatatttactgcatatctattatgtgtgtatacatagctaggtgctggagtgtggtggtacaccaaagataaaagtggatttgggtaggttattttttaataagaccttttcttaaagggaaagcggttttaccacaccaggctaatttttatatttttagtggagatggggttttgccatattgcccaggctggtcttgaactccttggctcaagcgatccactctcctcagtctcccggaatgctggggttacaggtgtgagccactgcacctggttgagttatttttcataccctggcatatacatgtgtatgtagagattcatagacaaaatgtaagcctatactacgaagagggacattctgtaaatatgccatttcctctgttgaaaaacagtggttttttttgttttttttcttaatggcttatttgtagggctctacttgtcatcaatgccgtcagaagactattgataccaaaacaaactgcagaaacccagactgctggggcgttcgaggccagttctgtggcccctgccttcgaaaccgttatggtgaagaggtcagggatgctctgctggatccggtaggtgcctgccaggggttggtcctgtgggcttgaaggtcagccacaaactgtgatgaggccagaaaaaggcattggtgaaggggtggagccctttctgttatggggtgctcttctttttttttaagatggagtctcattctgtcgccaggctgcagtgcagtggcgcgatctcagctcactgcaacctcctcctcctgggttcaagcgattctcctgcctcagcctcccaagtagctgggactacaggcacgcgccaccacacctagctaatttttgtatttttagtagagacggggtttcaccacattggccaggatggtgtggtggtacaagatctcttgacctcgtgatccacccgcctcggcctcctgaagtgctgggattacaggtgtgagccaccacgcccggcccagggtgctcttaattcagaacacaaatgaattcagagggatggtgctgcataggcatgagccgcttctacgatactcgggtctgaactgtccctgggaagttgctgctccatttatccctggtagctgcttgtaacttccactcctggaaggaagcattaggcattaggaaacattaggcatgactaatgcctattaatcatataaatttttaaccataaagaaggggttaaatgtaatgtagataagttggtgggggaggtaaggtttaacttaattgtgccgtttgacaatcctccttcagaactggcattgcccgccttgtcgaggaatctgcaactgcagtttctgccggcagcgagatggacggtgtgcgactggggtccttgtgtatttagccaaatatcatggctttgggaatgtgcatgcctacttgaaaaggtagtgggtgtttttttttcccttccacatctgaattttatattcatttatgtcttaatgagaagatgatagatgtcagaagagtggttatctctggcggggtggagactgactggaacggggcacactggaagggatgggaacattttctgtcttcacttaggtggtggtaacccgggtgggtgggtgtgtatgaaaaagtcaggtaatatacttgaagatgcgcacacttgaccatagtgatgttataactcaataaaaatggttttaaaaatgaattaggctttcaaaagagaattctttggttgaaaactatgtcctgacacatttccttttgtttttcacagcctgaaacaggaatttgaaatgcaagcataatatctggaaaatttgctgcctgccttctacttctcaaatctttcttgtaaaagtttccaattttttcactgaaacctgagttaaaaatcttgatgatcagcctgtttcataagaaactccaatcaagttaatcttagcagacatgtgtttctggagcatcacagaaggtatattgctagttacactttgccctcctgcagtttcttctctgctcccaacccccatctcacagcatccccctctatttccaatgctcctctccaaccgcttagtttctgaatttcttttaaattacagttttatgaaagcatattttatttacttggtgttgaaatagccctcataaaacctaagcacttggaaacacaataatagtattaactaactagatctattgaatttcagagaagagccttctaacttgtttacacaaaaacgagtatgatttagcattcatactagttgaaatttttaatagaatcaaggcacaaaagtcttaaaaccatgtggaaaaattaggtaattattgcagattgatgtctctcaatcccatgtattgcgcttatgttacaagttgttgtcacagttgagacttaatttctcctaatttcttctgcccgaagggtaagtggtgcgtccagcttacacaatcataattcaaaggttggtgggcaatgtaatacttaattaaaataatgatggaagagctatctggagattatgagtaagctgatttgaattttcagtataaaactttagtataattgtagtttgcaaagtttatttcagttcacatgtaaggtattgcaaataaattcttggacaattttgtatggaaacttgatattaaaaactagtctgtggttctttgcagtttcttgtaaatttataaaccaggcacaaggttcaagtttagattttaagcacttttataacaatgataagtgcctttttggagatgtaacttttagcagtttgttaacctgacatctctgccagtctagtttctgggcaggtttcctgtgtcagtattccccctcctctttgcattaatcaaggtatttggtagaggtggaatctaagtgtttgtatgtccaatttacttgcatatgtaaaccattgctgtgccattcaatgtttgatgcataattggaccttgaatcgataagtgtaaatacagcttttgatctgtaatgcttttatacaaaagtttattttaataataaaatgtttgttctaacttgtctgcttttttaaaaataatcttactgtacttaattctaattttttcctcatatttaaataaaaggccatttccaccttttctaaaaaa

SEQ ID NO: 807 - DNA, 303 bp, Homo sapiens
ttggccgggcgcggtggctcacgcctgtaatcccagcactttgggaggccgaggcaggcagatcacgaggtcaggagattgagaccattctggctaacacggtgaaaccccgtctctactaaaaatacaaaaaattaaccgggcgtggtggcgggcgcctgtaatcccagctactctggaggctgaggcaggagaatggcgtgaatccatgaggcggagcttgcagtgagccgagatcgcgccactgcactccagcctgggcgacacagcgagactccgtctcaaaaaaaaaaaaaaaaagaa

SEQ ID NO: 808 - DNA, 522 bp, Homo sapiens
cttcctcaaaagtatataaaatttgaaaagacctagaagtgatctagtggaatgaagacgctgaggtaccattgaggttggggaaactactgggacgtgcttacaggataaactgcaaaacaaaagcacaagtttgtaatcatggaatgacatgccttattctgaaaacttaacgtttgtagcgtaccttataattcataagacatttaaaaatggtattgaatcccaataacctatgcgtagggttggatcttgttgttatccctgttttttaatggaaaatctgaggcctgaagatggtaggccatgtatatgcctgccccgccgttgagcctggctcctgctgttggagaaactttcccagtctgtagagagaggatgtggtcctggcaagcctggctcctgcctgattctgtatcttctggtaacacacagccgtcatttaaaaaaaaaaagacaaggtctttccctctgacagactaaaagctgaatccgcttatttcgaactctgccttgaggcgg

SEQ ID NO: 809 - DNA, 607 bp, Homo sapiens
ctcaaaaatacttcatccatttgagcaatatgaaagaataggctagagagaaacagatttggtttttcaagctaaaaagaataacagaaagtgggcgagtcttcagtgagctgtctgcctttgaaacctaggaagtaaacttaatttggatgtgcatttaggagatgaagcactacaggtggtgaaatgctctagcaatgaagcagggaagggagaggggggaaaggaaatttgagccaagcaacctgaaggtcaggggaagccggtcttacagatgttaagggaggaatccaagtaggcaaaggggatgaacagcagtgcaaaggctctggggcagcaggttgcccggtatgttccagaacaggaaggaggccagtgtggctggcatggagagctaaggctcaaaggagaaagtgaagagaaagaggtagtaagggaccaggaggaattgagcccggccagccgtgctactgatgttagcccacatgtcacagtgtgtgagggagatagagtccttgggaacaataatatgcagagcttttaaaaactttcatactgtagccatcaattccatcatcatggtggtggtatccctgggtggtggtgg

SEQ ID NO: 810 - DNA, 741 bp, Homo sapiens
tagagatcctggcttcacaggaaagagccaagggcatgggttttgctgagggcgtaagagcttggggaaggtgagggctaggtgtgtacgggtgccctgatgtcctcttagcctgctggtgaggaaagtgcatgtttaataaatgggctccagccaactgtgtgcagttatttgtagcctgcataattttaaaaatgtggttgagcatttaggtctatcttcagaatttaggctccatttgacttagttttcctgaaatatgtagaaaactaatggtgaaagaggacctaattcttgaattatctgcttgaactgtgttgctagttattccaagtagaatttgtaaaatggtccatcattctctaagcaaaatgagggaaataacaattattttctagaaatttcatatatattgaatattacaaaatcatgtaactagaaatgtttaaatggtcacactgggccaggcacggtggctcacgcctgtgatcccagcactttgggagaccaaggctggtggattacaagatcaggagtttgagaccatcctggccaatatgatgaaaccctatctctactaaaaatagaaaaattagctaggtgtggtggcgcatgcctgtagtcccagctgcttaggaggctgaggcaggagaatcgctggaacccgtgaagcggaggttgcagcgagccgagattgcaccactgcgctccagcctgggcaacagagcgagactccatctc

SEQ ID NO: 811 - DNA, 1423 bp, Homo sapiens
agcagaggtaattaataggcagttacaatgtggaagattctggaaagtagagttctgttgtctgaaatttagtctgacagaggaatattagcaagataaatgtatttggaccaagcactcccgagaggaagggcatgctcaaattgtttctgtaaaaagtctctggcggtgtttggctcccttctgcgtccttcatgaaacagttctccttgagtattacggttggcaagcatgtgggtgggggagatgtcacacgcacccgctccagctgtacaagcaagccactgcgaggattagacgcttgttagttatgaacttaggtgtctggtctgtttctttgcctttcaaaggcacttcctggcagagaggtacaatggtgctttgcaggaaaccctgtgcccacagcatctgttctgcagcttggcagaccgcagctggccctgagcatggcctactaattctctgggtcaggtgtggctgtggtgagatggatctcagccaggtaagaccctctaatctctgttttctttctcctgccatagatacactgatgattggagggtatgacaggaattcttgcctgcctttgggtcgtgagggaaacagagacagcgtaatggctttttggagtgccaggagcagagtccccagagttcattcttagaaaactatgaagctgttctttgaactccaactttttctcctatattcattcagggctctttcctctacaaccccctcattcttgctgttgatagatgcctctttcctactctctaaatgtccaattttatcttcctttggaatgccatcaaattcttcctccctttttctgtaccccacctccaaaaataatcccaacacccacctcgtcagagtgtccatttatttcctcagggctaatcccagaaggagcatacaagttggtgaactcatactaatatgtgaatgattgttgcccttggatggttagaaaatcaaggtagttgtccactgtagaagattgtttaaagccaagtggttaagaatattctatatccttccttttgcatatattatctcgttcatccttgtgaagcagataatctcaccatctcaatgtacagaaaaggaaactgaggctcagaacattttgagtagcctacttaaatagtctaggcagagattgaacccccacgtctctggccccaagaggtcttgataattccctcacaactgctgcctaacagcagataaaatatatttggattcttctcacctttaagaaaacctagtaagttaatctctaaaaatcagcaatctgctcaggggatacagggagaactaggactattgtcccaaatgtgtagtcatatttatctgcttaccaaatgaccatgtgttgaatccctgaaaaccatgggagaaataccaattaaaaaaa

SEQ ID NO: 812 - DNA, 913 bp, Homo sapiens
tgtacacattttatttccttttcatgtcttgttgcactagctagaactttcagtattgaaagtagtaaaagaagccatgcttgccttggtcctttgtcttagtgggaaagcttccagtttctcaccaacatgatgttagctgtagtttctttgtagatgttctttaagcagttgaggaagttcctctttattttcagtctttggagagtttttatttttatcccatacttcatttcaaaatgctgagaggtttctttgttgttttgttttgtttgatcatgaatgggtgttggattttgtcacatgctcgttcagcatctattggtatgatcatgtgatatttctttagtctgttgatgcgatggattgcattaattgatttttcaaatattgagtctgccttggttgtggtatataattctttttattaaattgttgcattccgtttgctaatattttgaggatttttacatctttatttatgacagatactttaatatccataggatttgcagtgatgcctgctctttcatttcttactttttttttttgagatggaatctggagcccaggctggagtgctgtggcgaaatctcggctcactgcaacctccgccttccggttcaagtgattctcttgcctcagcttcccaagtagctggaactacaggtgtgtgccactacgcccagctattttttattcttttttgagacagagtctcgctctgtctcccaggctggagtgctgtggggcaatctcggctcactgcaacctccacctcccaggttccagcgattctcctgcctcggcctcccgagtagctgggactacaagcgcccaccaccacgcccggctaatttttgtattttcagtagagacggggtttcaccatattggcctggatggtctcgag

SEQ ID NO: 813 - DNA, 406 bp, Homo sapiens
atttctttttattgctgattaatatcccattgtctgaatataccacagtttatttattccttcatctactgaaggacgtcttgattgcccacaagttttggcaattatgaataaagctgctataaacattcatgtgcaggtttttgtgtgggcactaagtttcctctcctatggatgaataccaaggagtatgattgctggatcatatggtaagagtatgtttagttttgtaagaaaccaccaatctgtcttccaaagtggctgtcccattttatgttctaccagcaatgaatggagtttctgttgcttcacagcctccccagcatttggtggtgtccgtgttctgaattttggccaatctaataggggcatagtggtatcttatgttttaatttttatgccccca

SEQ ID NO: 814 - DNA, 297 bp, Homo sapiens
ggttttctttcgtttttgagacggagtctcgctctgttgcccaggctggagtgcagtggcgcgatctcggctcactgcaagctccgcctcccggattcatgccattctcctgcctcagcctcgcaagtagctgggactacaggcgcccgccaccacgcccggctaatttttttttgtatttttagtagagtcggggtttcaccgtgttatccaggacggtgtcgatctcctgacctcgtaatccgcccgcctaggcctcccaaattgctgggattacaggtgtgagccaccacaccc

SEQ ID NO: 815 - DNA, 313 bp, Homo sapiens
tttttttttttttttttggagacagagtctctctctgttgcccaggctggagtgcagtggcgcgatctcagctcactgcaagctccacctcccgggttcacgccccacgccattctcctgcctcagcctcccaagtggctgggactacaggcgcctgccaccacgcccggctaattttttttgtattttttagtagagacggggtttcaccgtgttagccaggatggtctcgatctcctgacctcgtgatccacccacctcggcctcccaaagtgctgggattacaggcgtgagccaccgcgcccggcctaaa

SEQ ID NO: 816 - DNA, 47567 bp, Homo sapiens
ttaataatttatcttttattgaaattgttgaatactttatattacagtaaagttgattgaaaaaaaaatgaagagaaaaatcaattttaaaaaatacactcatgttgaaatcaaacaagccagccaaaccggtacaggctgagggatgctgcagggcggtttgcttctcagcaatagaacaccagagtctatatacaattctacaatgcgagaaaagtcattcactaaacatggcaggaaaggcgctgccgccagaataagaacaccagcagcgcctccctcctcctccatgctgtgaccgcccggcctccctcctcctccacgccatgcccgcctggcctccctcctcctccgcgctgtacccgcccagcctccctccagcatgaggccaagtgcaatgctagggccgaggctctggcccatgatttttcatgcagtttctgtaagtcacacactgtgcaaattaaggcttcttataggtcgaatggttgatcaacacttttttcttaaaaaaataagcacagtaaaggtggtatcatgagaacctgaagagatgagacctataccccaaatctggaaaaaattcattttctctgacacctcaactccactcacacacacacacacacacacacacacacacacaaacacacaaatcaatctttgggcaggttgtttgaattcaccagccggcaaaaatactgacaaatgtgctctgtacgcccaggcttgaagatatcatgcaaaaaggtgcagccattcctgactaaaggcatagaacaggcaaactctccaaaacctaggcactcggggaccctgtgcacgtatgtgtgtgtgtgctcgcacgcacgtgtgtgtgcccttaagaaacagaaagcaaaagagaaaagagacagaatgagctccaactcaggggacacattaatgaccagttcaacatcccgccggaagctgccccatacactgacagcctcaccatctcaagatggacaaactggtacatcacacccctgctggcaggaagaaacggtggctgtttttttttcctttttctcaaacctgagtaattgtcaaagtcaataaatagggggagagaattaaaatgctaaaatatatcggggtcaaataccctatcgggactaaagcagcaagggtttcttcgaatgcagccctctgttttgagatgcgtccggccttatgcttttaaatgaggacttggggcaaaaccctgggcacaaggtaccgccctgtggccgatctgagccatgccttattccaatgactgtaaacaatcaggaaggagtggggcctgacctccttcaccctctcccccatcacaaaaactcttcccttttgaaagtttctgttaaaggcaaaattatagaagcatcatcgagtggaagtcttatttggttggaggtgcttggctgtcccgcggctccgtgctcccctgcaggcactgcggagtcagatgtgtaagaggtcctcgtcgctgtcgtcatggaaggacaccagcttggtggagctcactgtcttctgctgtgcagagctggacttccctttcctcgccttctcacccctgaccagccccaccctatcgtcctcacgctcctgaagggcattgctctgtgcgtttctcactgggtgggagctctctgccccagctcccctgcccgagtgaactttcacctctgggatggtcagaacctcatcctcactgtcctggtcatccccatgcagggagctgagggctttcactgacttggtggtaatatggccgttctcctgcccttcctttccctgccgtggaggaggcagctggatctcttccatcagccactctgtttcattctcatctgtctcttcttccttattcacctgccagggatcaacagcagagaccacgtgagccccctaagagaccccattctgctccaccatccaccacatcagggatgctctctgctggcacgagctggggaagaactggcccactgtcctcacagtcactgcatctccagttcccagggaaaggaagacgagggctggcaacaccttcctgttcctaatgagactgcaccaaggcaggagggtttgggagggtggcagtggggtcatttggcaggagtctcacagccaagggtgggaccaagcagaaggcgttcgggatggcctggaccgaaaagcagaccagtgatcccccagcgcagctgggggagaaggggctcttccgggctactcatagactgaaaggtgcccactgcatggcaggggaggaatgtcaaaggagggactccagtcaaaagcctagttttagagagcaattcatcattacccatcgagaccacaaacattatgtcctttgatccagataatgcctcttttctgcaaatttacctgaaagaaatcatccaaatgctacatgcacaactatcttcactactgtgtgtgtgtgtgttttgttttttttttaaagaacagccaaaaacagtggaaacaacctaattattaaatacttcaaggaaatcagttgtaaccacgagagaaacttgagggaaaaaaataacaaaaaaatgtgctggcgtaagtggctgaggcaacgggtgttgctttcctttctggattccagtcagcctgtgactgctttccttggcacccctgatgagaacgacatggacagcgcagcacagggggccggggaggcaggccttcaagagactcgccacagaaaattacctttgagtatttgtaggacacgttggaacttctcctacagcaagtggtcagcttacttatcactgtttccctataaaaaaaaaggagacaataattactccagtgtagagagggcatgggcaggagccccacccccgccagccccacccccatctgcaccaccagggggctggtggtggctgcatttctcccacattctgaatgacaaatgagtagccgtgacaggttatatataccctaatgtatttgttgtgattgagtggaaagaagatgggctttggaatccaacagcagagggccctctagagcaacttaacattagggcaaggactttttcacatgactaacaggaccacaccagtccgtcgccactaagcctgcccaatggtggctcgcagagacagacatcacatgcccttcccggcccagaccttcttctgccccattctgcattttgggtgtagagggccacaatcggtactttttttttttttttggacagagtctcactgtgttgcccaggctagagtgcagtggtgagatcttggctcactgcaacctccatggttggtactttctgaccacctctctcattggcctgtggctcagctggcaaatgacagtggcagcagggaacgcctgagctggccagctcctgcccccaggtcagagccactaacactgacgcctgacgtgaaaatctgcttgaccgtcacatggagagtcctttcacccagcaaagtggcgcaaaaggatggcatcatacctggtacatagcaggcgcttaataaactcctgcatttatgatgtgaggagggcagaggggtcagctgctcagtgggaaaaggcacccatgaaaggtgccgtttaatgttctactcatctttggacacaaaggaccacggtcctagaagccgcaggcacgggtgatgtgcgagggcctcggccttggtcagacagaaatgcaggcatttaaaaaccacaacgctggggactgcttccagagagttttggactaagaacctcgagccttcgctgctgtagggcttaaaaacaaataaataaaaccccacaaaactgaccccaagattagctatgggaggcatgcatccacccgccccacctcgccctgccacccgcttacctcctctccttcttgtagagcaacagggccagcaggcagcaggtgagcgccaccagcagcaggctgagcaccgcgccgactgcctggctccgttctgacagccccttgtgcatctgcccgtcgtccccgggattctcgctgtcaaagcccaccctgcaaggacgtcacagaaaaggagccgtgtcacagggtggtcctgctgccacagccacaacctgagacctgagtccccaaggcaagagcagctctgactttcccaacaccatgtgattcttactcctgcccagaaaacaaggccacaagtcccactccacatggaagagggctgcaaaaagttcctgatgatgagtttgtggcagggttgtcagaaagcagacaagaaggcactgcttccagctccatgaactatcattcacccaaacacagaggagacaggcaggagggacgcggccccctctaggtggcccaatccacggcaggactaggctggggcagaggctgtcccgaagcaccacacttctctccagggtcagagctctttcctctcagaatttcttctggaagcagtgagcgcagcccaccatgagacaccatctccacacgaaaggggcccagggggccttagaaacaggccaggacggggcccaggggcggccacagaccagggtggggcccagggagcagcagagcccagcacagcccccgacgggtctcctctctccaagcctgctccatcccaggagaaggctcttgagcacaccagctgcctcaccagcggagttcaccattcccacccaagacccacatgcacacttgtgggaaaaagcagtgcgtttccatgacatcgaacactcaagcagagttgggacaataatagaaaatgagaaacaaccacggagacttccctttgcgcttagggagcaagatgacactcaagagtgtaacgacttgacacttctaatctctctggccctctgtcacttggggccacacacacaggaacaggatcacataaacagaaattcctcctgtgctgctggtgataagaggcaaccccagcggggcgcatcttgtgctgctgaagatgccggctgctcaaagaactgaggttgagggcaacaggccaacccgcggcccagccgcaagggctgccgctctcaaagttcagcttaagccaaacaatctaaaacatcagcaagacaagaaaccacagggacagcctggcgtccagttctaggtgggcctgcaagggttgacctctgctcagaaagaagcaccaccacactccacagacaggtctgagagctatgcagacctctccctccaagccagaaacccactcacccagaagcagctccagccactcaggaccactcgaaatgcatccaagagacacatcatcactcagttctaagcgtattttactttctacctttgatttcttctttggaccatagattattcagaagtgagttttagtcttcaaacgtatttctatttttcagttgtttgttcttggttcctaacttaattgcatcatgtatgtagttaattgcatcagtcagaaatctgctgacttaggccgagcacagtggctcatgcctgtaatcccagcactctaggaggctgaggcaggtggatcacctgaggtcaggagtttgagaccagcctggccaacatggtgaaaccccatctctactaaaaatacaaaaattagccaggaggtagtggcacacgcccataatcccagctactcaggaggctgaggcatgagaatcacttgaatctgggaagcagaggttgcagtgagccaagatcgcaccactgcactccagcctgggcaaaagagcaagtctctgtctccaaaaaaaaaaaaaaaaaaaaaaaaaaaaaaaaaaaaaaaaaaaaaaaaaaaaaaaaaaaaaaaaaaaaaaaaaaaaaaaaaaagggaaattgctgacttgcctgctttgtggttaatttttgctaaagttttctaagtgtttgatgtaagcttgggcaaacagtgttctcccaacgcagggaacagtgttctgcgcatgtctattaaatcttgcttttcactgtgctgtctcaatcttccaaaaaaagctttactctttgtctactcaacccagcaatcactaggcttgtttcttgtgtgtggttttgtcaatttctgctttacatatcaaggcttttttattaggtagatggaagtttaggattcttgtatcttcctaggaaattagcccttttaaaattataatgaccctctttattctttatccctaatatttttctttaatatcctattttatcttatattaacataactactgcagctttctttcagattattttctggtatatcttttcttctcctttgactttggtcttttctgtatccttgttttaggcatgttccctgtaaacagagttgtttttgaaatccagtttgacaacttgttttttagctgacaagtttagtcaagctatacttatgattatagatatatttagatttatttctaccatactgggctgaaatttctacttatctgatttttgttttatttttctccttgcttgtcttctttggggatttaagtatttttacttctccttttcttctccgctgttttggaagttacatactatatttatattattttagtggttattcttaaaatactggcatgcatactaagacaggaagtctaacagtatgtcttccaaacaattaggaactctaccttttcttccttccttcatttctttcaagaaaatggttttactttcatatgatgctatcactgtaagaaattttaaaagctgggaactctgccacccctctcagcttagacaccactgttgtccagtacagtgtgtcctcatagggtcgctgacagtttccttcaaactgcaaccttccgtgaagcgactatgggaggtcctcgaatgacatcatttccttcaaaactgtctcattataaagttgatgaggccgggcacggtggctcacgcctgtaatcccagcactttgggaggctgaggcaggcggatcacaagatcaggagatcgagatcaacctggctaacacggtgaaaccccgtctctactaaaaatacaaaaaaattagccgggcatggtagcgggcccctgtagtcccagttacttgggaggctgaggcaggagaatggcgtgaacctgggaggcagagcttgcagtgagccgagatcgcgccactgcactccagcctgggcgagagcgagactctgtctcaaaaaaataacataacataacataacataacataacataacataacataacataaagctgaggaaaaaaaactggtttcattatacatcatttcacataaagttgcagtttccaagaacctatcgatgatataaagtgaggatttaaagtattttaacctttcttgaattattttctaatacaacaaattagcctcccctaaagcttttacagtcttttctttgtatctgctctcctggtatttcataagtgggtgggtcttgtcatcaataactgtgctgggcacatagcctgccccttccatctgtagatgcctgtcttttagctttgtgtaaattttttgactttaatcaaatattgtgaaagaaccatttttgtaaagtaggaggaaggtgtaagacagctctatcttcatctactattgcaggaagtcaacagatgagatataggatgttaatttaaaatactgaggtaaattccagaagaaatagctaaaagaactaaaaatggtaatctattagggcgaacattgctacctgtttgttatagttacatgattttttttcctgagatctagtctcgctctgtcacccaggctgcagtacagtgacgccatctcggctcactgcaacctccaccttccaggttcaagcaattctcctgcctcagccttctgagtagctgcgattacaggtgtgcaccaccacacctggctaatttttgtatttttagtagagacggggtttcaccatgttgcccaggctggtctagaactcctgacctcaagtgatccgcccaccttagcctcccaaaatgttgggattacaagcgtgagccaccgcgtctggccatatttacatgattctacaatgtacaacactgataacatttggggaaaaaaaaatctcaggcactattccacgtcacccccgggtggtacctgcatccctcaaaatccaccatctgagtttttgctcttggtttcaacttctgtttcttttttttaaagtccttattaccttgtcagtgtgttaagggatttaaacagctcccaatcctgatgttctgaacatcatgaaaccgaggtttcctggagaatcttcctctctggttttagagtcaaacaccaaagccctataaacagtgcttttcctactcacagaagtcgaactctaaacattcaacatggacgggatcctagcctggcctggtccctcaaacccacacagaagaccagctgccatgtcaggaggcaggattcatctcatggcagctgtagcctctccatgacagagaatgcagggaaagttcacttctgggttttatcttttataaaaattcacattttgcttctttcaggaagaacttccagtttcaatcctttcattttgtaatgacgtcaccggaacaccataaacattcaaaagctgaaaataccacaagtgaaatttcaaccaaaagcctctttccctgactgtgcagctgaggatccctaagtacacaggcctgaacagcacaggacaaagctggtttttgctgagctcatgtccactgttaagggtgggcagggggagtgctgatttaagatgtaaaatgtgtgatcttcattcccccatgacccccaccactgtcgtctgctgactctacggtccctttttcaggacatgaaggaaacaattacatggcaagaattcatgttcccccaatcttaaagtctcaggacagagaatgaaaagcttatgtaaaatggtgggccaggccgggcatggcagctcacgcttgtaatgccagcactttgggaggccaaggcaggcagattatctgaggtgaggagttcaagaccagcctggtcaacatggtgaaaccccatctctaccaaaaatacaaaaattagcagggcataatgacacatgcctgcaatcccagctacttgggaggctgaggcaggagaatcgtctgaaccaggaggcagaggttgcaacgagccaagaccgcaccactgcactccagcctgagtgacagagcaagagtccatcccaaaaaaataaaaaataaaaataaatataaatacaatgatgggtgggggtaacataagaagaaaataaatccaagaggaaagcaactgacaacatgttattcgtggcaaagtataaaacggctgtgggacacaagacaaccaatggaggtgccaccttccttcagagcagaaactgctccctctgttctcatgctgattctcaaaatctggagagtaagcttttcattcattcaaacaaacgtaaaaatactgcactcaaatcaaagtaaaaatactgcactcaaatcaaagtgaaactttaccaaacaatcatttgtattacgacacaaaagatgttccaggattacacagaggaggcaccaccagtacttgcctcccaggagctaaggagagggaggcagcaatgggaacagggtagagggacagagctggggtgccctgactggaccctattcggggcatggtacacacaaaggaaacaatggcactgctgctgggggtggtgggaggtgacgcagccatggaccaaaaatcagtggcaggatgctgacaagcaacggagcggggcactgactatgtggggtccgcttctatcattttctctattttttggtgcatgttctgaatatttcacaagaaaacattggggaaaaaacacacatacacttattcttaagggaagatgtggggtacaagtgctaagcttccggatgtcatactcaccccagaggacacacggctgaggtgtaccaagagaagaggtactggcagtcggcagtctcgtgactgaactcggggatcccgtcctccaccagagggtcacagtggaagaagatggtggaagaaacagacttggtcttatcctttccgcacttagaggaagaggcaaacacgacatcgagatcgccgtctgtcaaacgggaagggcacacatggcatgtcaccatcatttttcacgagcagactgagcttagctccttacggtctaaaaagtttgcaaagacttaaaatcaggcagaagagacttcatcccacgtcccacaggcactctgttcacagcttacgaggccactcgatgcacatggatagagccctgcccttagtcagcatgcagtaaagaatttttgttttgttttaaccacgagtatttattgatggactgaagacacaattttaatggaacaataaggcacaaccgtggattaaaacagtctgctgtacagccaaaagaagggaaaagctacaattttaggaactttaaatatgcaaatcaaggagcctctgaagtatctaacagatcagtatcagatattcttccctttctatataattcctgtattacatcactcaatcacaaagtccaactgacacttcataaagaattcctcattcatttatatttgagccatccagcctggctactcccctgttctccactgttttccatcgctttgcagtgtattttttagcaatccccttcctaaagaattatgtacacatcttcaatagctttccaaagcaaggaaacaagcaagcaagcagcgagtcaagaaagtcagccaacggcagatatgtgaatgaacagactcacagagacatacattaggatggcaacagcctgattcactgaagtctaaactaagctgactttggcagaaaagttgctgtgacttgcttaaagacttggaatgccaccttaggttgtgctactagtgccagacctcttgtttctaagggattagcagtggtctacacaaggagctgggaaaccagtgtaaccagggagctaatgatacaacagtcaacgctttggacttgtataagaagcggactatggcttctagcattaacatttgccaagtgtaaaattcataaagaattttgtgcaaaacttcaagacacagagaacaatctttaaatattttggactaggatacattaggcacttccataacactaatctttctaacttggaaacgtatagtgaaaagcattccagtgcacataacactgaggcataaaccatgcagcagaggtgtgaatgcaggaggcttcacagggtgcgcagcctccttgttcaaaaagccatgagaaagtccccaagcatattgtctgagcagccgttctggtggtaaccgtgtcccaagactaagcaaatctgcaggcatattgctactttttgaatagtcaacactgcactaacaagagacgccccataggtacaaagttgagaatcagaggccagaggtagagtgacgtgggcaagcaacctaaaagacttgactccacacctctcaccaaggccacctttcaagaatatctccacccagcagccctttgatgacagagaagagtgcagaggatgatctcatactcccgagagaagtgttggttaccaaaaagctcctggagaggcaacatcccagagggcctttttttttttttttttttgagatggagtctcgctctgtcgcccaggctggagtgtagtggcacgatcttggctcactgcaagctctgcctcccaggttcacgccattctcctgcctcagcctcccgagtagctgggactacaggcacccgccaccacgcccggctaattttttgtatttttagtaaagacggggtttcaccgtgttagccaggatggtctcgatctcctgacctcgtgatctgcccacctcagcctcccacagtgctgggattacaggcgtgagccaccacgcccagctccagagggccttttaataatgaaggtagataaaaactgccagaccaccgaactatcgagccaagtcagaaatacaataccaggcatagcttggggtgccaagtagaacagaggagattctgaggcttcacaaaaagcagaaagactgcatgactacgtgaacagtatgttgaatgtacacagaagtgggaagcaaaggacatataaaaaggatggagaagcatgctggcagactcgccagagggaaggcagcaggtgcagtctacatccagtgaaagagctttgctggcttgttcctcggcaggattccctatcttactttctcagactggatggatgtgtggcattcagcagcagaacagaggaagacgatatttataaatgaagaactggcgaatggatactgagaagaaatagactgggtgtaccattctgtaacgccctgtttatagaccaaaagcaggtttgtgttgacagaacatatttggggttgttatgcaacagcagtagtactttgggagaaggggaatgatggggtggaggtagggctggtggacaggaggactgtcaagttccagtacttaaatactagactgcaaggaatagtttgctgtctgtcctttagtgaagaaatcagatgctcattttctgttctacatccaccttctccaaaaccttagcaaagtctgtgataaagatatggcactgtccccatgctgatcagcctcctgaatggtcctgtctgcgatactgcccagctgcttatctgagatatttatttggaccatcatgcacagcacccttaacagctcatcacgagagatcttgttatctttatccaaatcatatagtcgaaaagcaaactgcagtttgttgcttcggctgttgagtggttcaggtccattcacaactttgctcttttcattatcctcaatggtttggaaatgagccagagtttgcaggaatccacggaagtttacctggtcctctccctctggaaggaaggcattgatgatccagtcccccactgggttgatggcaagttctggaatcccctggaaatcgtcctgttctctcctttgtccaggttgctgaaccggctgtacagacgtgtgatttgactgtgggaaaagccagtctccttcttgatctcctcaaactcttcatcgtgcagtaaggtggaggcctgagaccccatcactgtgccaggagctcctccaggaacagaagcaacggcaacaagagggaaggcaagaatttaaccttgcccaaaaagagggctggccttgctccttggctaatgacaggatacggagcaggggctggccatgcagtacctgagtgatcaatggaccaatcctgcccatgtcagagccccgggaaaaactctggacaccaaggcttggggaagcacctccggctgatgatactccatgtgcactgccacacgtgggtgctgggaacacaacacatctgattccacgggagagctggtgggaactctgcattcaattccctcctggactctgccctgtgtgcatcttggttgattttaacctgtatctttttgctgcagtaaatcataactataagtgtaactgcttccagggagctctgtgagttatggtgaaagggtaaatctgaagttggcttgggaaccccttcagtgtgctgttgctgtcagaagtgaggaacccttgtgtggactccttgcatgaactctgctgctcccaacctttgtcactggctgaaaatctttgtggctggtgctgctgggtgccaggaatgcagaggcgagagtgcagggtaggagacggacatgtccacacacagatggggcccagagacaggcggtgcggctccgctccgggagggccccacattctcgcttgggagtagctgaagcaggggctgctgaatggactgttccacagggctgatgtggggaagcaaaccgcccagcagctccacgtcctgatgagagacagctctgccctcccgaaggaatggcaagcctcaggaagagatagaaacttcatttcttcatgaaagatgaaaagatgtcttaaaactaaagctacttcctggggctggtgaatgaagaaagtgaaaaggtctgaaagggattttatttaccaagaatgactaaatgcgcatgcacaagcactctgaaagctggggatcctcaaaggtctgctagacataccacttgtgaacgtggaggtcttatgtgtaaccagacaagtggccagtgctgcgcgatggagcgtgaagactcctgcagacacaccagcagtatcacctgctatgagaaggtgggccttcccaggaggggcactggaggtaggtttggaatcctgcagacacaccagcggtgtcaccctgctatgagaaggtgggccttcccaggaggggcactggaggtaggtttggaatcctgcagacacaccagcggtgtcaccctgctatgagaaggtgggccttcccaggaggggcactggaggtaggtttggaatcctgcagacacaccagcggtgtcaccctgctatgagaaggtgggccttcccaggaggggcactagaagtaggtttggaaggatgaggaaggtgggccaaggcattccagcaccaagagcagcatatgtaaacccaccaggttacagggtgactttgggaactagtgaataacctgatggctgaggcatgtgtaggagcagcagcttgcaaggctaccctggtacatgggagcctctcagacatcttcaagctgtgtcagagagagcctagactttccttctctgcatgatagggcccctgaaggcttctgaaacaatccttccttccttcctttaatcaagatttaccgagcactgggaaagaggacagcaagagaaggcacaacctgtgacatgcaacatctgattctgaatgactgaaggattcaccgaagtgtgaggaaggcagagaacagagaaacacagagtgctagctccgtgctgtggagttatgcaagtgaatgaggctgatcaactttcccatcatcaactcacccagaaagcagaacattcactttcccagttctattcaggggccacaggtgctatgagcagatgcaccagggcgctgtctacaatctgtgaccaggagcagcgatgctgacccagcttccctccatcaggtgctgccgtcgtggagatgcactcagcaccagggcacggagcacctgctccttctcggcgatgcgctcagcaccagggcacagagcacctgctccttctcggcgatgcgctcagcaccagggcacggagcacctgctccttctcggcgatgcgctcagcaccagggcacggagcacctgctccttctcggcgatgcgctcagcaccagggcacggagcacctgctccttctcggcgatgcgctcagcaccagggcacggagcacctgctccttctcggcgatgtgctcagcaccagggcacggagcacctgctccttctcggcgatgtgctcagcaccagggcacggagcacccgctccttctcagccgcaccagggcacagagcacccgctccttctcagcgatgcgctcagcaccagggcacagagcacccgctccttctcagcgatgcgctcagcaccagggcacagagcacccgctccttctcggcgatgcgctcagcaccagggcacggagcacctgctccttctcggcgatgagctcagcaccagggcacggagcacctgctccttctcggcaatgtgctcagcaccagggcacagagcacctgctccttctcagctatcactactctcccctcccagaggacatgatcggcagctctttgacatcagagcaggctggggttttctttaaacacacttcatttttttttaaagagttattacatccacacacggttcaaaaatcaaattatgaaaggtatatagttaagactagctgttcaaaacaaaagcagcctttcacgattatgtgagggaacaaagggcaacacccttattagtgccagtttaaaaccttccttcacaccctggactctgccctatgtgcgtcctggttgattttaacctacatcctaacatttaggccagtttcctttcatccttcttacaaatataaaatctcttacccttctctaatattatttggcattccaaaataaggaagtgtcatggttaaaaccaaatcaaaggcaattctgactgtgcacagctcagcctccacccaacctcagaaccactggatcagaccaggttttagtttttttgtacatttacttgataactaagacacaatttgcctacagtgaaatgcttagttctgacacgtatcgctcaatccactgtcaagaaattcataacaaagtaaagaattagaccaaggtttttgttttaaaagtggtccgagatttcaactgaagggagttagttgaaaattttaatccccttccttggaggaagttaaatgtggaactttgtgggaagccacggattaccttgaaggtagtacttggtcttgtcagaggttccaactttccgactgaagtgctgatcgttgggcttcacctggcatatgttggctccagagcacgccgggtttctggagcttgtgatggaggaaagttggatctcatacaggtagttgtccccattggtcctcatgtccccagaggctctgaacagcctgaagagacagaaaagatcacagtgacatggaagtccttcaagaaggcattcatgacataaaccctcagtcctcagaatcactgcagggccccaggatgcttcctttcctagggaaaggaagcacggacacgctagggcagcacgtctgtgaccccacagcaattctgaggacaccagtttccctctcaagaggctttctccccaaccagttctggcctctgagtgctaatccaccttcctcaggtgccgtatccagcaccacacggccctcgccctgtctgtgcacctcggccaccacccccaagagcagccccagtaacactgctgagaaacttattttctaaacactggtaagcccagaagattcctgctcaaacatgtcagaaggcttcggcttcaacccctgagattatcatgaagagagggagaaggacgggggatttatttttacactcatgagaattcaccatctttggtgttaaaacttaatgattgagtaacgcttttcctcagtttaagcaaaagatgacgatgactccagcaacagtaactaaaacacagacctatttatcctgcagtgctccccgatagggaaagagcggcattgctggtttaattttgaacacatttcacagctcagaaggaaaacgttttacttacttaaaataaatatctccgaggctgaagctcttgccatttatagggttggtgatggtcccattcaccatctgcacctcctgaggcttcacggcgcaggcagcccgggagtcccagctgaagtagtaagtgcagctgtcgatatcaaacctaggaggagggaagcacaggctacagtcacttccccagccagacataagggaagactgcaaaacaatgaacactgcggagcccttgaagcagctcactggctttcagtcaaggtgctgcgagacttcagttgggtcccgaggcccccactccccgggctgcgcaggcctaggcagaatttcccgactcaacactgacggcagctcggagcgagggtggttattttactcacttcttttcatcaccacaatggacagggaagatgactgtggtgcacacatcagtaatgtgacaaagcaggcaagcattcaatataaattttttaaaatttgtaaaccgtgcaacattcaaaacctggaaaatttgctcctagatttttagatttttgtttaagcttctcagactcatacattcataaatcctttggcaatttctgagtcaccccttttccaaactcagcgtctggaaggaatcagttctgttcacaaacagcagctcacatgcaccctctgttggccaagctctccctggcaccagatgcaatgtggccgggaaaacttgaatataatccaagcacatcccaggtccagatgcaggtcccagctgctcgagggtcccagccaggctgcttgaacacctcgggtgggacaaatccacgcccctttgtttctactatgacattcaaaggtagaggtcagttaagtactgctcagccagtgctaaacctagttcaagagacaagctagcccagagaagttgcactggtcttgtaacagtgtctcagcactgtatctggaggtcttccctgcctggagcagccccgcccaatacagcacaatcagcggctctggccctgagctcctaagactcagccaaaacctgcccatgaaaaccccaaggaggaattccctccagtatgctcactgcacagtcccgctctgagcccccagtctcctgacctcttgaatgcaggtctgcccaccgtctttgtacaggtcaattctatcacggaggatgcggtcttatttccaccacacggataacctttggagtacgtgacaacaactttgtcacctgaaacacacaaatgattgaactgacattatttctagtgcattataaaaagcctcaggcaggcgcagtggctcacacctgtcaattccaacactttgggaaaccaaagagggcagatcacttgaggtcaggagttagagaccagcctgaccaacatggtgaaaccccgtctctactaaaaatacaaaaattattcgggcacggtggcaggtgcctgtaatcccagctactcaggaggctgaggcaggagaattgcttgaacccgggaggcagaagttgcagtgagccaagatcgagatggcgccattgcactccagcctgggcaacaagagcaaaactccatctcaaaaacaaaaacaaaaaacaaacaaacaaagcttcaatgttaggagtaaaaatctggtttaaaggccagaagaaaataaattttgggctccctaaaggtttatcgacctgttcttgcattcccacactcaggggtggtcacctggcccactgcacaattgtcacagcctaagacctggggtcaaacccaaaccctcctactcccgtactttgtggccctgggttgctgagcttctgagccttgagggccttacctgcagaacagggcactgtccaaagtgggcaggtttcgggcatgtatagaaagtgcccaacaaactcatgtgaacagtgggaccccgggtaatggcagccttcattatcgctccaattgtgtaaactctctctatcatattaggtgctttcctgacaggtaccctcatgtgagcctcccagtaataacagagcacagaatggaaaaagtgaaaagccagaaacagaaaccaactgtggttttctagggtcttctagctttcagtcgagcactgtctgcttttaaaagtgacccattaaaagaaaaacctgagccctcgaacccgcagggtctgagagaaaagtgagtacatgctttaagctgcaggtatcactggggcagcatggccgccaggttccaactctcaagccaccaccaagaggctgcttgtggctgcgcagggggctgttctgggaacggtctgggcccagcctggctgcatggacagatgatgtctccagggcatggcgcagggtgtccaggggaagcaggtgccttccaccctgaccacacacacacagatccttccaggcaggggcatgcggtggaggcaacatgggcacagtgctcacttcccgagtgttttccacaggacacaggctgaggtactgagggctgctggatggtgaggtgggaggtgggactctaggctctcaggcctgccccaaactcaaagctgctccagctgaatttgttttaaatattgggcttctgtgtaaaattttggaaaaaagaattccactgttttacggaaaatttttaaaacttctggcatatgggatcaaacaagaaaaaactttaatagtgtagacagcccttactgattgggcaggaggctcaacctcctcggctcaggggcccagcctgtgaaacggatgacaacgctgccccatggagtggatggggattaaacatatattaagcacagctgcttgagacatgttggttctgaaaacaaaaagtctacctcccaccccaacaggggtccattccctaagcggacaatgggggcaccgtggttgtccttagatgctgtcttgttggcgccaaagattaagagctcatttggtgtcagacaccagattatttctcgttccggtcagcaggtgctcaggatgccaaatgccagtcccaggagaaagcatgagctcttcccgccaggcgaggctggacttgcaaaatggtgctctccaaatggaggtggcctgcaggtcaccgctaagaagtcagatgatctagttccatgtcaccccctgtgttcactactctcttttgctcctcctgcctcaaacttttaggaagccttaagtgttttagtcatttcagttggctgaagttggggaaagactagtcgaatatccatatatactgcaagattacaggggaaaaagcaaccctccacgaccttccctccttcccccttctggggcagtgtgggagtggcagcaataactgacctctaaagcagtaagaacctcccagggagggcgggtctcaggctggcggtctgggcgccacttcctgtatggcagctctccctccacctaccaacctgcagagtctgtgtgtgatttttatcaagggtggcagtagttttctcggaattctctttctccatctcaacatctcaagctaatctgaagtagccctgtggctgaatcaggacaactcgggaaaccccactccagcctaagaggcaaaggtgaatattttcctttactggtccctccaacaaatcctaattgctcttactaagaaacctctattttcctcctttaaataatgaaagaaaacaactttcactcagcaaccaagtacaagatcaatttcccgtgaaaaattgttaagacattttacaaagatgtacctctgaactacctgtaccaagtcctcatgcaactgtttggctttcctaaacaaacacgtgtgtttatgccaatttaggcacttgatctacagctagaacgtgaacttcagaggaactctgaacattctgagacttcctcctggatagacgcacttccccgagatagcccaacccctctaaacacacagactaggacctgcagtctcatataatacaaagcagcacttattttaatgtgccaggagagccaaaatgcctgtgagacagtgacaggcaatcatatctggaggtttccaccaaagcacatgctcactctccttgccatcctgagaacaccctcaccttcccggttcagatgctgctccttgaaccaaggaccaggacccacaggccttacctatgacacccagcttctgcgtgtgaacgagtcccaggacctggacgtcaccagttgtggtccttctgcaaatgctggccctttcagagcagcccaggggccctttatatattttctggcacagatttatatagtacctagaaaacgacacaaaggggcaggtaaaaggcatgcaagtgacgtctctgccctgacacaggagggctcttcactttactttcagagaaaggttctgataactaagggctccattccatcactgaatgtagcactaaaatagcttttccaattaaaaaaaaaaagggcaaaagaagtcttcactgaagaagggagctcaccaaccagacacacgcggagtggaatgtccacacctgcggccaccctggacacagcgtggtacagtagaaagaagggctccggggctgggagaggcagtggctagaatctcggcaagtttcccacctcacttagaaccacttaaaccctgtgagtccatgcccctgctcctcggtgatgtcttgcaggagcacctggccaagcgggcgctccccacgcagagtggtcaggaccatgggctgaccccagccagcaaagcctaaggagctcctgccaaagacccgagaaaacccacacgcctcccacaacctgagctacacacaaacgcaaatcaaacccagcctaactcagtccgcccaggttcttccagctccagaggctccgtttccagtcaccaaagctcctgcccccactctgacctcagaaccaccctctgtgccaggattgacactgcgggctgcttccaggaacagtcacaactcaaccaccatcagcctcacatgggcatagtattcccatcttgagaacccaaaagagccaaccatcgtcaagcagtctgaagttcacatgctgagggtgtggcgccgcgggtggactgggaaggcactcacgagactccgttgtggacgagggaccaggacccggtgagagaggagagcagccgcaggtcgtaggttttgtgtttctggacgaatttgcactccaacttctttggagggcagacaacttttgttttccactcaaatgtcacatcacacccacgcacttcactgaagacttgtggcctcccaatgtcctcatcttcatcacacttaaatatgatgctggatgtccggtagctgtttgctggggagtgtagggaaaagagagagagatcagactgtcactgtgtctatgcagaaagggaagacataagagactccattttgaaaaagccctgtactttaaacaattgctttgctgagatgttgttaatttgtagctttgccccagccactctgccccagccactttgacccaacttggagctcacaaaaatatgtgttgtataaaattaaggtttaagggatctagggctgtgaaggacgtgccttgttaacaaaatgtttataagcagtatactcggtaaaagtcattgccattctctagtctcaataaaccaggggcacaatgcactgcggaaggccgcagggacctctgccctggaaagctcggtattgtccaaggtttctccccatgtgatagtctgaaatatggcctcgtgggatgagaaagacctgactgtcccccagcctgacacccgtaaagggtctgtgctgaggtggattagtaaaagaggaaagcctcttgcaggtgagatggaggaaggccactttctcctgcttgcccctgggaactgaatgtctcggtataaaacccgattgtacatttgttcaactctgagataggagaaaagctgccctgtggcgggaggcgagacacgtttgcagtaatgctgccttgttattctttactccgctgagatgtttgggtggggagaaacataaatttggcctatgtgcatgtccaggcatagtaccatcccttaaacttaattatgatatagattcttttgctcacatgttttttgttgaccttctccttatcatcaccctgctctcctactacattccttttttgctaaaataatgaaaataataatcaataaaaactgagggaactcagaggccgatgccggtgcaggtccttggtgtgctgagtgccggtcccctgggcccactgttgtttctctatactttgtctctgtgtcttatttcttttctcagtctctcatcccacccgactagaaatacccacaagtgtggaggggcaggccaccccttcaggggagcagaggcgggagaatgtcagaccaaggcctgcaccagggcacgttcctgcacgccttccccatgctgcctcaggagcacctgcagactccatccgccatctggcaacacaccacgtgctgccctggccacatctcatgttgattcactcatgtgtatcctgactccaaatagacccagctccttggcacacagcctttcatcgtacttcttaataaccccacagccctaggtgattcctcacacgggtattcaatatttgaccaatctactaatgatcacgaaaaaaaataagatagctgggcgcggtggctcacgcctgtaatcccagcactctgggaggccgaggtgggcggatcatgaggtcagcagttggagaccagcctgaccaacatggtgaaatcccatctctaccaaaaatacaaaaaaattagctgggtgaggtggcgggcccctgtaatcccagctacttgggaggctgaggcaggagtatcacttgaaaccagaaggtggagcttgcagtgagccaagactgcaccactgcactctagcctgggcaacaagagcaaaactccatctcaaaaaaaaaaaaaatttaagataataatgtaatacctacaagtacttgaaaacaggagtgtgattcagaaaatagggaataacgttttgtcaaaataagcctcaaaacaaagctatagcaatccttcgtaaatttaacacgtttggttccttaatacatcccattttggtccctggactattgcgggaagtcagggaccatgaacggagggacctgctgaagccgtgacagaagaatatacattgtgaagatttcatggacatttatcacttccccaatcaatattataatttcctatgcctgtctttactttaatctcttaatcccatcatcttcgtaagctgaggatgtatgtcgcctcaggaccctgtgatgattgcattaactgcacaaattgttcgtaaagcatgtgtgtttgaacaatatgaaatctgggcaccttaagaacaggataacagtgattttcaaggaacaagtgagataaccttaaagtctggctgactgtgggccggtgaggacagagccatatttctcttattaccgaaaacgggtaagagaaatatcgctgaattctttccccagtaaggaattttaataattaacagccctgggaaaagaatgcattcccgggaggaaggcaggggcgcctcttaaatggccactctaggggtgtctgccttatgcagttgcagataagggatgaaacacgccctggcctcctgcagcgcccccaggcttgctaggatttggaaattccagcctggcgaattctagttaaaccggttctctgctcttgaaccctcacaatgtgtgcacagtgggacatggaagttatttagtgattctagtttcgcgctgaccttgtgatcctgccctgaccttctgccttgtgacctcttgtcatccttgaagcatgtgatctccatgacccacaccctattcgtacactccctcccctttgaaaattgctaataaaaacttgctggttttgcggctcgggggcatcacagaacctgccaacatgtaatgtctcccccggacaccagctttaaaatttctctcttttgtactctttccccttatttctcagaccggccaacacttagggaaatagaaaagaacctacgttgaaaaatcgggggctggttcccccgatactggacatttatgaaaattagtaatttttcttttttttttttttgagaccgagtctcactctgtcacccaggctggagtgaagtggcatgatctcggctcactgcaagctccgcctcccgggtacacaccatcctcctgcctcagcctccccagtagctgggactacaggcgcccgccaccacgcccagctaatttttttttttttttgtatttttagtagagacggggtttcaccatgctagccaggatggtctcaatctcctgacctcgtgatccacccgcctcagcctcccaaagtgctgggattacaggcgtgagccaccgcgcctggccaaaaattagtaatttttcatgcatttccctcatctcacggtccgtagacacaagtcacagcagttggctcctctcatgaaacttcctgagcaccgcaggggcaaggcactgagtgtggctcaccaagaaacctccatccccacctgggctgccacatggcggaaagtcaataaatgagtcgcctggtttaccggaatcctcactagcttcagaatcctgaagacccatagcagacattcattttcctgaggcataatctgaaccaccagggctaaaacctggtatgtggacacaaggccctccagctagtgagtgggcctagccagccacccagcacagcatctcacggcagctctaccacggtctgtagatacggttacccagcaatcccacagagcaattcaaacgtttctctgtgggaaacagcccgagtaagaaaatattttatgcaagagaattcctgccactgactggggcatccacaaaggtctcagtgtgaatcgagccttgacagtatcaaggccccaggccatgtggggacgcggagccgtcctactcacagtgtctgcagaagccccactcgtggtctctgtcgtagtccgcagttgtgctacaccacagcttcgccctgctctctatgatgcactcctcgtagctcttcccattgaatatgaaggggaagacacaggggacgccgtcatcggtttctggaaagaagaagaacattatcagtgtggcagctgtgcctcgccaggcacaatcacctcagaatgcagcagcagtccctaaggaagctgcccatcctaaagcacctacgtgacaaccggcattcacctgccaaaactcaccaggcaactgagagaacacagcgtgattcacacaccagcattcacaccgggggtgtacagaggaacagctcacattcacgcccaaggttacagcactcataggaccgtggagctccactccgcagcttctttctgctgctatgtctaatttctagtttactatgagcttgaagtttatttacctcattgcaaatatttacctggagggcaacgatcaccattcacgtaacttaaaacgaccgcttcatcctggtgcctgtaatccagtttcattgattgcagccgtccaaaggatgcccccttggtgcctgagagcagacagactcctccgtccttacagcctccttgttctggcccgactgcaaaggtgcacaccccaacgctgtaggtgcgcgagtcgcgagtcacctggacaaaaaccatgcgtggccgtcagcagagtggcagcacccaggtctcaaagtgaagagagaaccactattgcagctgatgctggaggcaggttcatgaggaagagcaaagactcctctgtgtgcatcagagccacgcaatcgccttggccctaggctttccctggggggcctcccccaacccctaggcccagcttgcttgctcctcctgctccctgctgggggcctcggccacccctgccagccagccactgctctggctgtcgtctccagtcagagcccagtgagaagggacccagcagtggggtcaccccacctccctcacctgtgtaataagacattgtgcgggccaagtgagtgaatgagcagagccgacgctgcacgctgaagcatggacctgactctcctggcccacccagcgcccagaaggctcacacctactgcacacctgtcgggaggacctgtacccaggcagagggctccatcacaggagccagggtgttgacacctgggcccaaaactccaggctcatcactcaccagccgccgtgccacagcaggtgctggggttccgtaccccagtccaggcactggcatggtaacatctagatatctaggcttagggagtcaggggcccccaggcaccagtgaccacgacaccacatcagtaagaccagcagcccaaagaatcagcacacgccagggctctggcatggcatggaggcacatgcccaagtgcctctcaattccagggcacctcctacctccctcttcccaaagctgccacaatcagcaaacaactgccttgatcatcttcaaccaggttggaggaattaaatccctgtagatttcagccacccaggagctggccctgtccccatggataccttacattcatgtctccgggctgccccacctgccctctgtctgatacaaagggtcccactacccgcctcatgaggttacttatcatcaaaaagcgttaagtgcagagccatgaggtacaacgcaagtgtcagctgcgctgagttggccacgcaatccaagaaccttcctgagacctggcatgccctacgagagcaccaagatgctgcccagtggccacatacaccctctcagctcacaggtaccacattatccaaaacactcccagcagcctcacagcacctggcacctggtacacctgcaccagcaacgcccagggtgaacgcattaccttaaaggtgctcgtggaaaggctggacaagttgaagctgtagaggagctgctcatctgtcagggtacagccatccatcctcacttcatcaggacagacgacaggagtctcccattcgaacacaaagtcgcactcgctggtccttaacagcttaggcgttccctgttgccaggaagagcacgggtcttaaaaaccccatggcatagggatagatagcagtgacacaccacgtccctacaggggctgtgcataacccacagcggcctctcagagggaagggatgctagacaacagcagctgaaagacccaatgccatcttcaaggcacagacatcaccctgcccttgccccctacacatcctgtgagctccctggctgaatccaggtcttgtcttctacttagagagaaagcctcaatgttctgtgctacgggttcaaaggaagaaagggggagggcttatatgtcatgagagaggtctgtgaaactgagaccctgcctcacaagtgctccaatctactgtctctagacacgggagacatttattcaaggggcaagatgccacatggccagatattccataggccaagtattgtagaatcactttatttattccctccctcattcaacagcaacaaaaaaagatgaggcagctctcaggaattccatttgtaattaatgttaagcatctttttccctatgattcagtggtaaaagtacttccattgaaaatgaaaactgctggggaagaaaaatcttctaaaaatctttctggaacgctagaacacacattcagcataagatgcttcatttctaaaatcaagtaaacactaatcaccctcaatgtgcagctgctgagaattaactaaaatcacattagctaattcgatttgtcacgttggcagcagagtcaaagcaaggcatagttccacactctttagctggtggtgtagataacaaagcatcactcatgatgaggtgggtcttagaagtgaagactgtcctttaaagaacgaagaacttaatgcagaagccccccgcaaggcaaaatccacgttgccccatgctgtgtgcatctacagaggcacacccagacacccctataaaaatatgccaatacgcttataaacagatgcaatgggtggactgaatacagctctgcctttccttactaactaggactgtcactacactctaagattcatgaacacatccaagggctttgaggtgctctgggcccctgtggagtagccccaaacagcaggactgtttcctcctccttctcaaatactgtctctctcactggtcaggcggctgccaggtcactttctgtcactgtcagcacacccatgtctaacagtccctttacaaacctgctccaggcccaaacatcagaaggatgtctttatcagaattacaagacacccaacagatcctaatccatcacctgaactcctaggggtcagatgagccttggaatccaacatctttattaggattttaagaggcaattctcacacccccagatcctgtgatcaaacatattaatatttctgcagctagatgtatcaatatccacattaggtgggacaaatccacaccataaatagcctcagtccattcatgtcaaaggagccccaagttttcagagcttcagagatttcagaagcacagacgacaggctgtggtgctgtgtccctggagcaaagagctgttcccctgtgcagtagctgggacctggctctgcccctgcagagctactctgagtccctgtggaataggggccataatctaccaatttatctcacagagcagggatcaaaagaaaacgtcctcaaagactataaccaataccgaactcattataatggaagctggtattctttttttaatgcacataaaatggaagtcaatacctcattataagtaaaaggtgccactttgttgtagctattctgattccaggggtcttttgttacttgttaacttctgggctatgtcctgagtgactatagctgcccaaatgtctttctgacttcccagttagaataaaatcagtaattgttaaagtaaaaacaaaagttatgacacttttatgcatcagcagtcaaagctgaatgtcatttctatacttgtgttctatgtttttaaattacagcaagtttctatatgctgttaactgcgggggagctcactcagccctcaatcagtggtttaaattattcagacacactactagcgtaccatcttacccaaggcagacattttgaataagagtatccttggacctgacacgcactttctggttgtctagccttggctcactaacccgcagttgagcatctagatcgtcacaggcccacacttaccatgctcacacctctcttacagtgaaacgcgatgagcgaggtgtagttgaaatgcttgtccgctaagcaaggagtactgctttcaaaattcaagtaaatctcatttgctattggattgagtattggtggtcctgctacccggccgatatcctaaacaaagagcgagggcaaacagtatttcaggaaattaaccattcccaaggttagtggaattaagaattgatacagaattgcaaaaaccagacctcataggttctgagaatgagcagcatctaaagaaactgggtttataccaactccagttggaaggcttgacagatgctgtgtaacctccgtatgtcagtggttatcgttttgatcctaacgttagttctaaggttggttctatttctaggtatcttcaattttcaaagatcctaagcaataggaatctctccagtcacatcaaggagactacagagtcctcccatcagctgatgagggaagcccggaacctgaaaaacctctaaggatgctacacggtcctcccaccacctgacaggggaaggccggaacctccatgctgacctgccaccctcactgcccagtgctgccccgggactgcccactgacgtggcccagcagtaaccactggctatgtccttgggagaggggacaggaggtgttcactgttcattttcattgcttagcacagcacctggcacacagcggctgcccaagagatatttttgagtgaataaacaaataaataaaagaccagtctgagtattatgagaaaaaaaacaaaaaactctttttttatttttaaaaagtaaataaaggtgaatggccaggaactgtgtatgtgatgaatgtgtgtgtgcatgcacgtgtgtgtgcatgtgggtgtgagtgtgtgtataagcagcttccccatgattttgttctcagctacagtgctcttcattcaccactgtggggcacgttcagaccacgtggcaccacaccttctccagttaaataactttctacatcttttaacatttgacaatgggtggccaggcaatgattcccgatcgaggatccccggtctgcgctgtcagaaaggacgctaccaaagagcttcctggggagactcagcttgtccaggcctccatctcacacagagctggagctgtgctaattcaggctgtggccgatctccttacacactcctgacatctccccatatcactgccacatataatggccatctttctaaaggacatctagatatgttacaagaggatccatctttaaagcataatagatgatacagacagaaatacagacgacttgtgagatacattcaaatattaaaacataccaaggatttgacaaaatatgaatataactcatggagacaatttttaaagatccaaatttctattaaaacatgctagtaagccaggcactgtggctcatgcctgtaatcccagaacttcaggaggatcacttaaggccaggagcctgaggccagcctggctgggtgacatagcaatactcccatctctacaaaataattttttaatgcataaaaccaaagcttttaaggcaaaatatttagctattagcaaacgtactcttgcccttaattataactccttgccaaagaaactgtttgcatttcgcaagcgttttaactacagaagacaaggcatttcacacaaagaaaccaggctagggcaatgtgctttcctgtcacttcacctaaaaacttcttgatttgggtcaaccctgaggctcatgacaagtagagtccctacacacatattcgtgttacctcccatgctcaaagactggctggctaccatcatcagcgaacagttcaatgtgcaaacctttaatcttccagtagcggacccagaacatacacagtcccacttactttctccattttttttatgcttgagcaactccccactgaaggcaagaaacaacgcaaaggttatcactaaaagtcttgcaaaaattatctccacccttggatttgtcatacttactatggggggaccatcaataggaactttgcacacagcggctccggcaggacagggcactccgtgcatgggatttagtggctgacaaatattgatgtagaaatcagggttggtatcggaggcatcatcctcactctcatcataagcctcataaccaccagtgcgatgaataaggggagacaagtcaacaatagagcttccattcctcacggaacattcggtctgttaagtaggaaagactgctttgagtctacaaaaaaattttcctaatcaccactaggtcatccataagaatttaaaagctgaataacaacaacaaaaaaagtagaaaggtgtcaaaatgcttcattacatagcactgggcacttccagtcaactttattattggggtgatcaggagtggacagttcagctgggcatctactagtgggcaagtgaacctgacgaaggggcccgggtgcagccaggcactggacatgcacttctcccgtgcccatctgaaaactcaccgcttgctcgcaggccagcggcgtgtgccaggagaagaagagagtgcatgtctgcttgtccagggagatgagcatgggcctattggttggcctggcctcaggcctgcacacgaaactgatcacactcttatagctcaggccggatttggagggacaaggggacccatccttgtacaccagctgcaggacctggtccacgtatctcagcctcttgttggccttgcccacgctaatcctggtctgtccaaagcaggcccctgcaccacaagggaaaggcggagaaaacacaatcacagactcgatggccaattttctgatgagaactttcgcaagtcaggaccatcaatttcatagccaacacttataacttcaagtgtccaatccggctttaaccattgttttacattgaatgttcattccatcacatgaccatgtgtcccccacatggggtgactgctgcaggagacaaaagcgtctcagcttcctggctctgctcatcctttttgccattagcatgcaaagagactgaggacaaccccagaggacgggagagtcagacaacacacgagagaccacagcactcacccacgccaggagggcagttttcattctccccacagatgctcatgtaaaccaaccccttctcgctgtaagcagctgtgaatcccgccctgccacttaaggagctcagatcaaacaggtgtcctgtagggtggaagaagatggggacacagtgactccagggagctgagacttgggaggctcatcatcggcgagctcacacacagattatgtcagcatcgggacttctgacttctcaccacgacccctgtcctaaatcctccaccaacagccaggctgtatcatgagactgtcagtcccttgatccatgagatgtcccatccttagctgaaaagatcgtggctcacagcaccctctgctgggccataccacagcagccactaagagtctggtgggcatggggagagcctgcccagcacacctcttgctgccaatggactgtgcctgtgcctttctgggtgcccagcacaagggcaggtgagagactcctggcaatccactacactgatgctgaaaggcagccaggggctagctctaacctgccctggagagcctagagctgctggactgacactgtcagtaaccccagtcaggagcacctctcacaccaggagagtgacaggagggatggattctctgtgggagcattctctcctccactgaaggagagccaggagaacacacagcagcccatccagagaaaggccaaacacacccacacaccatgacacctctgcccagggcgcctgctgcccatagcttctctttgggtctctcccctgatgagctgggtttggtgggggcaccgtctctcacctgcgctggggttaacgactggcaccacctctcacctgtgcttgggttggtgacctggcagtcatcatgctcgttgctcttcatgggacaggctgtggctgtgggccaggcaaaggtgtactcacagtcctccacggcgctgatgaacatgggcctggagttctacaacaaagcacagacaggtcctgaagggatcacgcaaaaactccatgtctatcatgatttcaacttacaagtggaagcttctctgaaaaactccacagcatgtgacatttctgtctccatgtgcctgtgggatgaggcgcagattaggaaaagcaaagggtcagaatgtgtcctgagctgccaccatgggcttcccctgcaggtaagtgaaacacccacaggcagcaacacacttaggggaccaggaagctccctcaggctgaggaacaggacaggggttggggacaggcgtgcaaaggatgctggaagggctacagggagacacaaatgtgtaaatcattgataaaattctaaaaaccaaatgaggtaaaatccattatcacagtcaaaacaaaaagatataccaagagaactagcccattccacgcatcctcccactggcaccagccaaggcttactctgctcatctcaaaacgcttcatgtccactgcagagttagcatgatgagttcagcagcaccttccttcccaggtaaaccccatgattcctgctgggcaccctgataagccacgctgcagtccagcctcccaggccctgggcacaggggcctcgacacacccccacccttccctcccagcctcctgggccctgggcacaggggcctcgacacacccccacccttccctcccagcctcctgggtctggggcacagggcctccacacacccttcacctttccctcccagcctcctgggtctggggcacagaggcccccacacaccaccctcatccttccctcccagcctcctgggctctggacatggggaaccccacacaccccttcacccttccctcccagccttctgggccctgggcacaggggccccacacaccctctcacctttgccccccacatgtggggcagcccttttgtcctcggccatgagcctctcaggtcacagaggagaatgctcagaggccccagcagctcatgagtctggactaagcctctgcacaatcttcccaagaggaaacttccctgccgctccaggcaagagggcaggcctgaagctcctggagccccccatcccaagctcccctaccactgctgcccaccgctggagagcatggggcgagccaccctgacacccagcgagctggtcttgcccgagttaatgcccaactcagccaccgagcttgtcatgcacgctagcactggggctcaccacaatctcacacacagaaaaacctgtatgcagtcgacacctgcttacgtgcatgccaaacaagtaagggaagaactgatcacaggcactcatgctcactgactgtgcatctcccgtgtgtcagaaatgacacctggcacttcctacctcttctctcgaaaccctgcaatgggcaggacaagtatgcctcatgttatgaacggctgagcagggcagactacctgagtaattaaccaagttatgtggctgggaagtggcagcgctacctgtgacccgggcccagccaaccttctcgtgcttcccaagctgccgccgtgaagacaaaagggcatgtagtcaaacaacaatctcctccacagcctttaggggtctgagtcaaactctgaagagaaccaattctgagtcgggaactgccaggcaagcttctaaggagccagacagcacgagggttccccagattgcaggccgcggcgacgctgttcccccaacctctggtaagggcgcatcatcccaggctctagaactcgcatcccaaggcagatgaggacgtgcggctcaccgccctgcacatgggctcaattcccaaagctgcaacagcagaaggtgcaggaacagtcccttaccacttggctctcgctgcaggtgaatcggatggtggttgactttttccgaatcccatctggacataagtcgccatcaacgtatttcaggacaattatgccatctctccactgaggtccgtcccttaccctgccgaggttcacgggcttggagccacccagcagacacgcggctgcttctggagggcacggctctgcagcaccagacacaagaaagagttgcctttagtgactccccaggctagaacagaacttcatcaggcaataaatgtcacacacgctgcagaacttcatacgctttctaagagtcacttcaaaatacctgctatttctttcacataagtcagatgacaatgacatcacgttagttctcactcacttacatgctgttttgtcacagatggactggggcaggcgggcgtgagtgtagaggaatagctaggctgtagcagtcgaaattctttctgaaccccatataggatgaaggttatattcccaaattaagacagaggaacattttaaatggcctacgtccatgcaccttctttattcaagaagctaccaagaattctgcctgtttcccagtccctaaaatgcctgtgccatgtgccctgggtgaagaactagtcccatgccacaggggtacagccactgtcgaagtctgcacagcacaacgcagcaaggggaagtggaaccacagcctcaaaccacacagaggatggaaccaccttctgcagctaaaaataaccacaccgcctttgaggtgagccacccaagatgcaggtggggctgtatgaaactccacgaacatgggatgagtttcatcttcagggttccgaggggccatgagtggtaccaagatccctggaggtgcccttggtttcccatgtacagctgacatccagtctcagccaaccaccgcaggtttgagtgagctgtccctgcatcacaaaaggaccgaccatacaactctcaacatacgcaggcacacaccaagacctccacgtcacaccccccatcttctacctgctaagaaggattcctcaccatggctattatttctatctattatatcttcatctcctcatgttcagaaagggttatcatgttcccagcagtcctcagcactgatttaccctgggccatactagggatcaactgttaacacccttaaatcattcttcgtcctgctgtttctcggccgaaccacgtccatgctgcagagagtaaagcgcctccaaagaatccccatcctacttgatcttccctgataaactcatgacaagccaccaccccatgaagaggccctctctcaccagtgccagccttcaatacactcactgcaaacaccatcccacgaggaggccctctctcaccagtgccagctttcaatacattcattgcaaccaccaccccatgaggaggtcctctctcaccagtgccagccttcgatacactcactacaaccaccaccccacgaggaggacctctctcaccagtgctggcctgtgatacactcacagcaaacaccaccccacgaggaggccctctctcaccagtgccagcctgtgatacactcactacaaccaccaccccacgaggaggccccctctcaccagtgctggcctgtgatacactcactgcaaacaccaccccacgaggaggccctctctcaccagtgccagcctgcggggccagagacttgcagacattgatgaggtagtgctccgggtcccccgtcccagtgatggcttcccagttgtcactgtaccttgacagggacgagaggtcgaaggagttgccagccccatctctgaaaagaagaaaacccgcagttagttaggcttggtcgtattctctttaaacattgggcactctgtctagaaacgttcaagtattcaggcatagtctaagcctgacagaactttagactcgacttctctctgtctctgtcacacacacacacacacacacacacacacacacacacacacaccccccatcagaatcagcaacaacataacttccctgaacataatagttcaggaaactattaggctcacttaaaaaaaaatttaaattttaacagaaaaactcaagtctgcaaagtgcgtgccgtctgtgctcaggccactgagaagtggaacttgctggtgacaaaggtaagcagccaagatgctaggagcacacacagcaggggccatgcccggggcagccgcacgccacctgttgtttaaaaccaaggccgccagcagttactgaaattctgaaattaaaatgggcttgctgacctttctgcacaggctaaaggttcactaactacacaaatcccaaatacagacagtaactgggaaccaaccccatgccaggagcaatattaacagtgagtgagacacacactctgccaccacggagcaggaacgggagcagctacagatgccacctcagcggcagctcttagcgcttcagaggggaataaaaactggtcattcattcaaaagctgtgtgctaaactgggggtactgtattaaacaaaacagtattaaacatcatcaatcttacaaagtttaccaaaattacctgtggaagaaaatgaccgtgaacaagataagacttttaaaaatacatactgtatttgatggaagtaagagctgaaggaaaaaaggcagataagggggatatgaagttcggggggcagaggcagctgttgaaattttagacagtggagccagagaaggcgtgaccgagaaggggacctgtgaatagactctgagagaaatggaatcactgaccatcctggcacccagtaaagcgcatcccaggcagagaacagcatgagcaaagggcccgaggcacataagcccgacatgacccgagaaagacagaaaccccgtgtggctggaacagagtgaaagtgaggttattagagacaacacgggggtcatgtccatcagaggaagaacttcagcctgtaggtcccaatgagatgggcgctcactgcattgaaggtttcagcaagagcgacatggtgggacttatatctcaagaggatcattctaattactgtgtgggactaaccaaacgtgtgacaagggacatggcaaggagacctcggagtggcagctgcagtactgcacgcacgagaggaggagtgcccaaaccaggggcaggtggcaggaagggaaagctgcctgaaggtgatgggacaagaacagagcttagtgaatatcaccaaatgctctaaaagtagtcaacagaagaaacagaaatagaactaacaaagccaaggcagaggaaagaggagaggagaacagcacaggtgaggacagctttcatcttttaaaagagagtcaacagacaccattagaagctgacaaacagaggtttagagttatagaaggttccaaaaagaaccacaagaagaaacagtaaaaagtggagtgaagctaggggttggggagggagaggtgagggtgggtaatttcatctattaatatttttggactctcaattacaatagacatatattaacttttattatgagattataaaattctcctctgatttaattctacttttaaaaacttagcataaaaatatctttaggaaggccgggcgcagtggctcacacctataatcccagcactttgggaggccaaggcagacggaggatgacctgcagtcagcagttcaagaccagcctggccaacatggtgaaaccctgtctctactaaaaatacaaaaaataggctggctcagtggctcacacttgtaatcccagcactttgggaggccaaggcgggcgaatcacgaggtcaagagttcgagaccagcctggccaacatagtggaaccccatctctactaaaaatacaaaaaaattcgccaggtgtggtggcgggcgcctgtaatcccagctactcgggaggctgaggcaggagagtcacttgaacccgggaggcggaggttgcagtgagtcgagatcacgccactgcactccagcctgggcgacagtgcaagactctgtctcattaaaaaaaaaaaaaaaaacaccacaaaaattagccaggcatggtggtgtctgtaatcccagctactagggatgctgagacaggagaattgcttgaaccagggaggaggaggttgcagtgagacaagatcacgccactgcacttcagcctgggtgacagagcgagattccatctcaaaaaaaatacatatatatatatatatatatatatatatatacacacacacacacacacacacacacacacacatacacatatctctaggaaaaatgctttatgtgcaaagaaaatcaaaattttattccttgtatataaatatcagaaaactgaaggcagcctcacatggcagaaagagaactgctaagtgaactggggatatctactgaggacatttcccatccagtagaaatgagaaacaaatttgtttcacatgaaaatatttacaaaatgttaactggaaaaggtaaggttactaaaattatgatttaaagtcactgaacataaattactaaatgcttgcatttacatacgttcctaaaacttaaatgatgatttcacctacataaataaccgatgacacaacaggacaaaggccggaaggaaacagaatcacctgcactttcccccaggaaagtcaacagtgatcaagtggctcatactgggtgtttcacacggcagaacacagggcatccctccaaaaaacagaaccgcagacccacaaaaccaaaatctctaaggatgggaccccaggtgtccagagggcgatctggcaaagctgttgagagcagctctgtggacgatcacatgcaacgaagacctcccttcatcgcaggggtcaccacaccgctcctggcccactctgctcactgacatgtggatcacgcaagagtgccaggggtccactctctgcttcagctccaatcccttccccatgcagtcaccacagcagctccaggtggtgacggagctgagagttaacctagcccgactcctcattttaatatgagcaaaccgagtcctaggtaaattaactgactaatctaatcccctgcacccaagaccactaattattaaagcaaaatcataccaagttagtctgtccaaaagagacaacacatccatggacttacttgaatgaacattcagtcagatcgaaaggtgggcaggcatactgcgttcgccactcaaacaagtaggaacaatctgaagtctcctttagaaatactggctaaaaaagttaagaggcacatatataaaagtgagaatgcaaaactttagtttatactttgagttttaagaatgaaaatagtaaagaatggttacgttcatgaaaatcaatactaactgatgaaagtttcaacatattttctgtaaatggttattttaaactcagttaaccaggagatttgatgagatctgaggacagattctttctaatatgatcccagcagcctgagggtggggagaagaccccgctgagggccgtcggtacatgctcacccgctgggtgccgcggtcacagtagaagaagatggctgtggagcgctgataaaccttatggcaagtgtccccccccgtgaagttcatttttaacaagccattttcataagttagcttctgagtcaggagacctgtaaagaaggagaacattaaacaaggtttggttcgggtccctaggctgtcaaacttagcctaagacatgtgacaccacacaccctgaagagtgtgagacaaagtatccctggcctcccagcaccataccatgcactcctgtcacattacactttgggaataaaatcaggcttccccttgtccaaggctgctgcaacgtcacagactgacccgtgtatgatgacatgaggcattccttagcctcatcacctaagggaatgtcactttctccactgtgcctgagggctgtccacgtactcaccaccagctactttgacttcatttttacaagttcctaaatgtatttaaatcttgcccaactgctgaaacagcatgaatgaccaacagcgtgccctgtaatttctacagccaaacctcgtactaaatgcattccctgtgactcaatgctatcaagtactaccccagaacatccaacactggctagctcactgtgtcccaacgttgtaataaagaagagaaatatgaccttagagtcagtaactggcatggctaactaagaataaaatagacatgctctaccaacatccttcagtatgtactctgtttaagaaaatcaagcaaaatccgaaatatcattaatatgcttttttttttttttacagtagaacactcatgtttctgactcaagggaaaattcatcttcagcaaaatattttaatattttaattccattcctttgcaacaaaaggaaaacgacaaacaatggtacctgccactttgtgaaatccctgcggttcccgcttttcctgacatgaggagaccaccttggacttgtcacttgtggggcagacgtctgaggaaagcttcccacagacccggaagtaataagtgtattcgccagcgctcacgatggtgtcgttgaggcccaggggcttcaggtcatacaagttgccatgccttgggtctttcacctcacagttgtccccttcaagaacatggaagaagtgaagggcaactgcaaccacacacgcattcacattttcaagcaaaaagctttacaaatggccgggcgcagtggctcacgcctgtaatcccagcactttgggaggctgaggcgggtggattactaggtcaagagatctagaccatcctggccaacatggtgaaaccccgtctctactaaaaatacaaaaattagctgggcatggtggcaggcaccctgtagtcccagctactcaggaggctgaggcaggagaatcacttgaacccaagaggcagaggttgcagtgagccgagatggcgccattacactccagcctggcaacagagcaaaactcggtctcaaaaaaaaaaaaaaaaacttttacaatttttggttaggtaaataccagctataaatgggcattaaaagccatttccacatgattttgtttatatataatacaaatcgcctggcaaacagctttctaggaaagtctaggtccccgaataaagacttgcttcatcaaacaacacaaaaccaaaccccacattagtgtcttcaagcatcagacgccaaaatcccatcaatccaggcacacaaggaaaatgtcactcgtgaaattagcaatatgcttcagtaaaaaaaaaagctcaaggaaaagaaattatcctccccctagcgtgtgtctcatgaccccagctatggctgttatcacacggtctcatatctaaggcatcgttcagaacgtctgctactctatacatttaaaatgacttgtagggacaggcccagtcctaccttccactctgacaacgggacaggcttccacagttctccagataaacacgtactcacaaccatcctgaagctgaaatgctggtgagccctgtaatataaatcagcagcctgatttgtttcctgtttattttaaaaattaatcaaatggggccgggcacggtggctcacacctgtaatctcagcactttgggaggccgagacgggtggatcacaagttcaggagttcaagatcagcctggccaagatggtgaaaccccgtctctactaaaaatacaaaagttagctgggcgtggtggcaggtgcctgtaatcccagctactcgggaggctgaggcaggagaatcacttgaacctggggggcggaggttgcagtgagccaagattgcaccactgcactccagcctgggtgacagagtaagactccatctcaaaaaaaaaaaaaaaaaaaaaaattaaataaatgatagccacagttagtacccaatctttgacctccatgtgcaaactacgtaacatttattaaacatttaagacctgaagaaatgagtgcattctcgtcaaaccctagcaatggctgaaactccacgaaaacacaggcaagttttaaacaagatagaagattcagaggttcaagggaaatgggaaatggagtcacccggggacaacatctcattgctggtctgaacacacaccgatatctgagcacactcaaacgtgatcctggtggagaagcgctggttcccacacttgtcaccgttgacatacatgatgctcaaagatccattcgccgcggcttggggactcatctgcaccacacccagattccagctattgccttctgacactaagcaagaccccactgcgctgcctggaagaacagaataagtggtttgggcatgaggaaggcgatgaccttgagtcaaatgctctaataaaatgaacagacgccaatcaagagaccaaggagaactcaccctggcatccaggaatgtaagggagaggattgcaaacgctcaaatagaaagtcctctttctcccatcgacagaggtgtcaacagccgtccaaggtttcctgactgtgcttaggccagtcaggtcgtactcatttccagccaggtctgaaacacaacaaaaaaccacgctggagaactctgcctccttgtgagcactcaagaactgcctttcaccctaaataagccctgaggaggcgtgaacctggcattcctaactgtgaggataaggaaatccacgggaggctgagaggctttgcctacaaaacacacccactctgtccctcaaaactgcccttcacagccgggcctggtggcatgcgcctgtagtcagctactttggaggctgaggcaggaggatcacttaggaccaggagttcaaggccagcctgggcaacatagtgagtccctaaagactctttaaagaaaaaagccaaacccccactgcccttgacaaggaagtaccactgttgcagagcaggcagggtcaatcccagaggtcaaggtctcctgtatacactgtcagcttccagggcacagcttagggagtttaacatctttttctttttttttcaccctcaaataagaagctctgacagtacatgtgaaatgtgtttcctctgcattttcttctctgttcttaagatgtatctgatcccaaaagatagcttaaaaccattaactatatagtcagattctcttcaagaaaaacattacaactctaggcatcattcaaagagaatatataacagaaatgtcacgctgcctgcataaccaagcatacacaccacacacacacaaatatacatacacacagaaacacaccttcatatccactcacacacacactgactcttgaccggcctctcagttcttaggccgcacggccttaccggtgacttggcagtccactggagaaggaacacaggccaacgcggtttcaaactcaaagtaagtgtttcggatcccttgcccagagtcgatatcttgatgcaggaatttgaggggccctgagtaaacatcatcattgcaaacaaagcggacgataaaagcatcagcggtacctgtaaagcaagaaggcccagattttaagagacagaacagtattcatggcgcagcccacaagcacagtgcagcaacaggacaaggctgccactggcaacaagcttcacagccgttcgtgggagcaatgacaccagggcaccaagtgtgtatcgagggactcgacatgaacaaagtggtcacactcgctacaacagtggcctatgacaggtttacacactcactgcaacagtggcctgtgttacaacaggtttacacactgcaacggtggcctgtgttatgacaggtttacacactcgctccaatggtggcctatgtgatgacaggtttacacactcactgcaacggtggcctgtgttatgacaggtttacacactcgctccaatggtggcctatgtgatgacaggtttacacactcactgcaacggtggcctgtgttatgacaggtttacacactcactgcaatggtggcctatgtgatgacagctttacacactgcaacagcggcctatgttatgacaggtttctaccataagcctaacatcctggcattcctactcttccagaaaatatttaaatcccacgagtttaccaatccaagcattagaagacaatgtaactctaattcgttggcttattgaacaaatactaagttcctaccatgtatcggaatgaatgaagcagacgaaaacccctgcctgcagctgtgctggttgcagagcgaggagcaagtacaaagattcaagaggggagggtgggagacagtgcactttgtttatatcagaaacagggaggccagcgggccaagcgggaagagcagcagggggtgatcatctcagagagcccccacgggcgtcccatggccgtactgtggacactggcttctactctaggtacagtgcagagcctccgagggctctgagctgggaagtgatatgatgtgatgtttcagaaacatcactctgactgctgtgttgaatacaggctacagcagccccccttatctgcggggggatatgttccgagacccacagtgaatgcctgaaattgagaaccctatatatactatgctgtttcctatacacacatacagaggatgaagctcaatttgtaagctaggcacagcaagagatcaacaataaaacagaacaactgtaacaatatctgtaatgacagttacgtgaatgtggtttctctcattctttctcacaaaataccttattattttcggaccatgtgataccacaaaagtgaagccacggataacgggacccctgtattctgcgaggtcaaacgcaggaagaccaccgtgatggctcctgcagcaaggtggacagcacagcccatggtggcgggggatgtgcacatcctacactcaggaaggtgcatggccagccacagagccaccagggccctttttagctacaaaacaacatggctctgagctcacctttggcagagagaggccctttgtaggtcagagtgatgaagccctctgtggacagctggaggcttttctcaattccgactggccttgctggcttccaattcttgagctcttcag

SEQ ID NO: 817 - DNA, 308 bp, Homo sapiens
aaaattcttttttttttgagacagagtctcgctctgtcgcccaggctggagtgcagtggcgcgatctcggctcactgcaagctccgcctcccgggttcacgccattcccctgcctcagcctcccgagtagctgggactacaggcgcccgctaccacgcccggctaattttttgtatttttagtagagacggggtttcaccgtgttagccaggatggtctcgatctcctgacctcgtgatccgcccgcctcggcctcccaaagtgctgggattacaggcgtgagccaccgcgcccggcctaaaattctt

SEQ ID NO: 818 - DNA, 323 bp, Homo sapiens
gctttctttctttttttttttttttttggagacagagtctctctctgttgcccaggctggagtgcagtggcgcgatctcagctcactgcaagctccacctcccgggttcacgccccacgccattctcctgcctcagcctcccaagtggctgggactacaggcgcctgccaccacgcccggctaattttttttgtattttttagtagagacggggtttcaccgtgttagccaggatggtctcgatctcctgacctcgtgatccacccacctcggcctcccaaagtgctgggattacaggcgtgagccaccgcgcccggcctaaa

SEQ ID NO: 819 - DNA, 4062 bp, Homo sapiens
atttttactttttttcctttttctattcttttttttttttttttttttttttttttttttttttttttgagacggagtctcgctctgtctcccaggctggagtgcagtggcgcgatctctgctcgctgcaagctccgcctcccgggttcacgccattctcctgcctcagcctcccgagtagctgggactaccggcacccgccaccacgcccagctaatttttttttaatttttagtagaaacagggtttctccgtgttagccaggatggtctcgatctcttgacctcgtgatccgcccacctcggcctcccaaagtgctaggattacaggcgtgagccaccgtgcccggcctattctttttttttttttttttttttttttttagtagcacttgttgttgaagcatttttactttttgtatttccttctttctgagttactgtggtaggctgcatctaaaatgactcctaagcaccgtaccttctggttttcacatccttgtgtaatttcctcctcttgtgcttgggccggacctaatgacctctttcaaaagaatagaatatggcaaagtgacagaatgtcacatctgagattaggttacaaaagactgtgactttcatcttcctctctctcttgcgctctcacttgctcattccaatgtaggaaattgccatgttgcaatttccaaaggataggtcacaatccaaaggataggtccatatggcagaaaaacggagggtagcctctagtcaacagccagtgaggaacggaggccctgagtgcaacaccctgatagggactaagtcctaccaacatcaacacctagtcaagccttaagatgactgcagcacccgctcaacaccttttatacagccttatgagaaacccagagccaagagacccaactaagctttgcctagcttccttactcatagactctgtaagaaaataattgtttattgctttaaggcaccaagtttgggggtaatttttcatacagcaagagataactaatatagattctgtttgataaatattaacttacacctaactcagatttcactcaaagaaattaatatgcatgtgagaagatatattctttacccagccacgggaggtattgcctaggaaaaacttagatagttgccaaccgattgtatcataatctcacttctgagtttagaaattaatattaaaggactgtagtttccagtcagacttttccatttaaaaaccatgagcttctatttttacaagtcataggtacttaattagttctccactattctgtaaaataatacactcctagttctgtgataactctggtcaattctagaaataagtattcgttagtacaaattaccagagcctgtggatttgaatgtatcaatctgttttattaagcaggccccattttgtgaaactcagctggaaaacgacagtcaacctgacaattctcatagatagttaatttaagaaattcttcttcttcttcttctttttttttttttttttttttgatagagggtcttactctattgcccaggctggagtgcagcggcacaatcatgtctcactgcagcctcagcctccggaatagctgggactgcaggtgcacaccacgatgcccagctaatttttttttttttttttttttttgagacggagtgtcgctctgtcgcccagagtggagtacagtggctccatctcggttcactgcaagctccacccgctgggctcacgccattctcctgcctcagcctcccgagtagctgggaatacaggcgcctgccactacgcccagctaatttttgtatatttagtagagacggggtttcaccgtgttagccaggatggtctcgatctcctgacctcgtgatccacctgcctcggcctcccaaagtgctgggattacagatgtgagccacggcgcccggccgcccagctaatttttaaattttttttgtagaaacagagtttcacgaagttgcccaggctggtctcaaactcctgggctcgagcagtttgcccaccccagcctcccaaagtgctaggattacaggtgtgagccaccacacttggctaattttctttttctttttctttcttttttttttttttttttgagacagtctcactctgtcacctggctggagtttagtgacacgatcttagctccctgcaacctctgcctcctgagttcaagtgattctcctacctcagcctcctgagtagctggaattacaggtacacaccaccacgcccagctaatttttgtatttttagcagagacagcgtttcgccatgttggcctctatctcttgaccttgtgatccacccaccgcagcctcccaaagagctgggattacaggcgtgagccaccatgcccagcctaattttttattttttgtgaagatggggtctctgttgcctgggctggtctcaaactccagggctcaagtgatcctccagtctcagcctcccaaagtgctgagattacaggcatgagcccctgtgcccacccaaaaaattattcttaagctggtgagtacataaatgtttctttattattttttaaatctatatatatgttttatgaagtttttgttatgtgtaatacatttcataataaaaacaaggtttaaaaaaaacaagctttctgacttgttctgatatttaagattttggtaaaaagttttaagttttaaagagtgcatatgggctggtccgagtgcagtggtttatgactaattaatcacaaccagttccagatttctttgttctttctctactcccactgcttcacttggctagcctttagtaaataaataaataaatagagtgcctatggtagttaaccaaaaaaagagtgttttctaagcttccattaagtctatcatacactatcattaattcccctaagactgtgtcaagttacctatttacaaagatcgattgctcagatccttcaaagttcatgaatcctttagttttggatgataaagagtgaaaaaacaaaagttaaagagaagcccacagaaccagagaaaaaaagaagttgccttctttctcatccttcataaacacctgcccacacaggttgatgtcctttttcaaatatttagtcagaccccaagcactacctttgaccctggtattacaagtcccactctgcctttactactcatatctgaacttttaatatctaattacaatattcagtgaactgatattacatgctaccatttttaagtttggaattaaacttggaattatgttgacaaatctggtttgttttagaacttaatacgatttagaacttttgtttattatgttttataaattaaatgccattttttaccttttaaaattatcttcctattttattcattcagcaaatatttatatacctatagtaaaagtatataaacctgatatatagtaatatatccagaaatgttcaggatagaaatgcagtagtgaacagacaagcaagcttgtagtctttaaataaattaccaactgtaatgctgtttgacattatgtttttaaataatgcataacctattgttatcagggagttatacatacctatgtattaccatatatcttccaatataggcttgtaataaagtcagtatactcacgttctcttttctaagcatgtcttaacaggttaaaccacacaaccgtgatatttgtatattatataattaacatcttaaataacagctttgaaatttctttttttttttttttttttttttttttttttttgagacggagtctcgctgtcacccaggctggagtgcagtggcgcgatctgggctcactgcaagctccacctcccgggttcacgccattctcctgcctcagcctccccagtagctgggactacaggcgcccgccaccacgcccagctaattttttgtatttttagtagaggtggggtttcaccgtgttagccaggatggtctcgatctcctgacctcgtgatccgcccgcctcggcctcccaaagtgctgggattacaggcgtgagccaccgcgcccggcctgaaat

SEQ ID NO: 820 - DNA, 310 bp, Homo sapiens
ttttttttttttttgagacagagtttcactctgtagcccaggctggagtgcagtggcacaatctcggctcactgcaagctccgcctcccgagttcacgcctttctcctgcctcagcctcccaagtagctgggactacaggtgcctgccaccacgcccagctaattttttttttttttgtatttttagtagagacggggtttcaccgtgttagccaggatggtctcgatctcctgaccttgtgatccacccccctcggcctccaaaagtgctgggattacaggcatgagccaccgcgcctggctgagaatc

SEQ ID NO: 821 - DNA, 255 bp, Homo sapiens
tgcagtggcgtgatctaggctcactgcaagctccacctcccgggttcacgtcattctcctgattcagcctcccaggtagctgggactacaggtgcccgccaccacacccagctaatttttttgtatttttagtagagagggggtttcaccgtgttagccaggatggtctcgatctcctgacctcgtgatccgcccgcctcggcctcccaaagtgctgggattacaggagtgagccaccgcgcctggccagaaatc

SEQ ID NO: 822 - DNA, 4635 bp, Homo sapiens
taatttttttttttttttttttgagacagagtctcgctctgtcgcccaggctggaatgcactggcgcgatctcggctcactgcaagctccgcctcccgggttcactccattctcctgcctcagcctcccgagtagctgggactacaggcgcccgctaccacacccagctagtttttttgtatttttagtagagacagggtttcaccatattggccaggctggtctcaaactcctgacctcgtgatccgcccgcctcggcctcctaaagtgctgggattacaggcatgagccaccatgtccagctgagactgcatttctaaaggctccaggtgaggttgctgctgtgatgctgagggtcccaggactgcatatctgctgcagggccttgccccttccaactcctgctgccttcttgacattccctcccctttcactgagcttgtgcacagactgtcttctcccctctgggctacgcacccagtttttcctgtctggaatgagctgctattcccccttaccctacacaccccatctcctctttccccaacagcaccctgtgctgaagccttcgcaggatttaccaggctgacctgttagtacctgcatggatgtcttcagagcagagactgtggattgtctatcaccaagttccagcacctggtacaggatctggcaaatcacaagccctcaggaaatatctggggaatgaaaaatgaacctctgagaggagataagatagaaagacgcataatcatcatgacatcatcatagcaaataccacttggcacttactctgtgctggccctgttgttggtgcttgacatttagttaagtcatttaattcccacaacaacccagttttgtagggattatcatcaaccttattttattttaattaattatttgagatggagtctctcactctgttgcccaggctagagtgcagtggcatgatctcggctcattgcaacctctgcctcctgaggtcaggagttcaagatcagcctggccaacagggcaaaaccccgtctttactaaaaatacaaaagttagccaggtgtggtggcacgtgcttgtaatcccagctactaggtaggagaatcccagctgaggtagaagaatcgcttgaacccaggaggcagaggttgcagtgagccgagatcacgccattggactccagcctgggtgacaagagcgaaactcgtctcaaaaagcaaacaaatgaacaaacagaagaacaactccgtaagtttgtgccaagctgatgcttacagctgggcttcaggaccattaactgaggatgcagaagatacaggtggcagttggaagagacagtgggggagggccttgttgagaagctaaggtcatggtgtggaggggaggaaaggagggcaagtatcagagtgggacaagagtgctggggaggacaggatggctgggtaagatggtggcgaggagtgatgggtcctgggagccagggaagagggaggagaaggactgcgcatgagtgtggttgacagagagaggctggaaacctgaatggagcaggaagtcaggcatgcagacaggtttggcaagaaccaggatggtgggagcggggctagacactgtgtgctggatttaaggagaaggcagttaaacaatagggaaacacgccaaaaatcttgaacttgagagtagaactacaggtaacaaaggtgttttgttattctttttaatgttttctaacttttaaaatgagcatgtattcttttgtatctatatttgaatttatagcataatttttcacattaaaaatggatttactttaataggcaatacagccgggcgtggtggctttacgcctgtaatccccagcattttggagggccgaggtggaaggatggcttaagcccaggagttgaagaccagcctgggcaaaaaagtgagacctcctcccatctctacaataaaatacaaaaattggccaggtgctactctgggcacactgcctatagggtagccctgctctgcaaggccagtactaggagggaaaaagaaaaagaaaacaaaggaacaaacaaaacaaggaaaaaaagaaaaaaaaattagtggggcatggtggtgagtccctgtagtctcagctactcgagatgctgaggtgggagattgcttgagtccaggaggttgaggctgcagtaagagtgagccatgatcaggccactgcagctccagcctgggtgacacagagctcactgcagccttcacctcctgggctcaagtgatccttctacctcagcctcctgagtagctggaactacagccgtgcaccactccgcctgggtaatttttgtatttttttgtagagacaggatttcgccatgtttcctgggctggtctcctggactcaagtgattcctccacccctggcctcccaaaatgctggtattacaggcatgagccaccacaccctgcccttttatcttttccttcttcttccttttttttgtttttgagacagagtctcgctctgtagcccaggctggagtgtagtggcgagatcttggctcactgcaacctctgcctcccgggttcaagcgattctcctgcctcagcctcccgagtagctgggattacaggtgcccgctaccaccccggctaattttttgtattctagtagagatggggtttcaccgtattgctcagactggtcttgaactcctgagctcagtcaatccgcccacctcggcctcccaaagtgctggtattacaggcgtgagccaccacggctggccccatttttcttaatgtagatgttcttggtaacttctgggtacatattctttgttagatatatgtattgtaaatattttctaccagtctatgatttgatttttcactcttttaaatgtgtcttttgatgaacagaagttactaataataatgaggttcaatttaataatcatccatctcttatggcttatactttttttgtgtgtcttaagaaattttggtctacttcaaggtcatgaagatattctcctatgcttttttttttttttttttttgagacggaattttgctcttgttgcccaggctggagtgcaatgttgcgatctcggctcactacaacctctgcctccccggtttaagcgattctcctgcctcagcctcctgagtagctgggattacaggcgcatgccaccatgcctggctaatttttgtattttggtagagacagggtttcatcatattggtcaggctggtcttgaatccctgacctcaggtgatccgcccacctcggtctctcaaagtgctgggattacaggcgtgagccaccacgcccggttgatattctcctatgctttcttttagatgttttattgtttttacatttaggtctctgatccatcctaaactatgttcattaatggtgtggtcgggtcacgattcatgtttccctatgtgggtatgtaattgacctactaccatttattcaaaagaccattctaccctgacttgtttgcagtgacactattataataagtcaggtgaccatgtacatgtagatctctcgatttcattttattttattattattttttttgagacggagtctcactctgtcacccaggctggagtgcaatgggatgatcttggctcactgtaacccccgcctcctgggttgaagtgattctcctgcctcagcctcctgagtagctgggattactggtgtgtgtcaccacgcctggctaatttttgtacttttagtagagacagggtttcaccatgttggccaggctggtcttgaactcctgaaatcgtgatccaccggcctcagcctcccaaagtgctgggattacaggtgtgagccactgtgcccagccatgtaaagatttgaaggaaataatgagttttttttttttttgaaagagtcttgctctgttgcccaggttggagtgcagtggtgtgatctcggctcactgcaacctccgcctcccgggttcaagtgattctctggcctcagcctccctagtagctgggattacaggcgcatgtcaccatgcctggctaatttttctatttttagtagagacggggttttgccatgttggccaggctggtcttgaactcctgacctcaagtgatctgcccgcctctgcctcccaaagtgctgggattataggcgtgagccaccgcgcctggcataggaggtttgttaatagtagctgtgatggggttgtaagcttatgggtgatttttcttttcttttttttttttttggtatactccacaccgaacgtagtattaatactcagacaaaatgaataaatatttttctttttttttttttttgagacagagtctcgctctgtcgcccaggctggagtgcggtggcgtgatctcggctcactgcaagctccgcctcccgggttcacaccattctcctgcctcagcctcccgagtagctgggactacaggcacccgccaccacgcccggctaattttttgtattttctagtagagacggggtttcaccatgttagccaggatggtctcgatctcctgacctcgtgatccacccgcctcagcctcccaaagtgctgggattacaggcgtgagccaccatgcctggccagaaatgtttttcaaaat

SEQ ID NO: 823 - DNA, 287 bp, Homo sapiens
gagacggggtctccgtctgtcgcccaggctggagtgcagtggcgcaatctccgctcactgcaagctccaccttccaggttcacgccattatcctgcctcagcctcccgagtagctggggctacaggcacccaccaccatgcctggctaattttatgtatttttagtagagacggggtttcaccgtgttagccaggatggtctcaatctcctgaccttgtgatccgcccgcctcggcctcccaaagtgctgggattacaggcgtgagccaccacgcctggccctatat

SEQ ID NO: 824 - DNA, 313 bp, Homo sapiens
taagtattttccttttttttttttttgagacggagtctcgctctgtcgcccaggctggagtgcagtggcgtgatcttggctcactgcaaactccgcctcctgggttcacgccattctcctgcctcagcctccctagtagctgggactacaggcgcccaccaccacgcccagctaattttttgtatttttagtagagatggggtttcaccgtgttagccaggatggtctccatctcctgacctcatgatccacccgccttggcctcccaaagtgctgggattacaggagtgagccactgcgcccggcctaaaat

SEQ ID NO: 825 - DNA, 6110 bp, Homo sapiens
gttttctttcttttttttctttttttttttttttgagacggagtctcgctctgtcacccaggctggagtgcagtggtgcgatctcggctcactgcaagctccgcctcccgggttcacgccattctcctgcctcagcctcccgagtagctgggactacaggcgcccgccaccacgcccggctaattttttgtatttctactagaggcggggtttcactgtgttagccaggatggtctcgatctcctgacctcgtgatccgcccacctcggccttccaaagtgctaggattccaggcgtgagccaccgctcccagccggaagttttctataaagctttaattattctgtcttcaggcttctctcattccttctacatgtagtgcaacaatgggtgttcagtaaagtagagtgacacagcgaggtcacacagcacattagagggagtgctagaaccagagccccaaatttctcattccccatgttcttttgctcacccatccaaccatccatccatccatccatccatccaacaaatattgctgagtttcttctatgtcagtagctctcaaacttggctgcacattggaatcacctggattccacccttagcaatcctgatttaattgggctagggagaggcatgaatattgaattttttgccttggaacatattgttttatatacaacacagtagtgaatagtgacttcattatggatttgtttctttatagatcacagtggcatataaaattcaaaatccataaacaaagagctcttaggttaaatgagttcttcctaaaaattcttaatggcatgctggtctattctcaagcggtacaattttataatgcaccatcctatatttagcatgtcacatttctacagtaacataatggaggcacaggcagtgcaagcagatttaaaccccttctacttctggactgaaggttagaaaaacacagcgtgtacacacacacacttggatgagttcttccaatacgttttcccccaaaaatgatagttttatcaaagaatttcaataactttcatagtttgtacaaccacactctattagctacattaaaaaggattcaacaaggggccaactacacagtagtaaataaacatgtttgagaatatctgctacattctctatctcctggagaaaataatatttacatttttttgtaaagtgatttaataactaaacaattctttcttttggtcgggggtaggtaatgggattttcaaagcttcacaggtgattccaataagcagtcaatttgagaagagtttctctgtgccagaaactgttcctgatgctgcagatactgcagtcaacacaccaaacaagataattactgacagaaattaaacatgtaattaataagataatatcaggtagaaataggtgctattaaaggggggaaaaacagtgtagtttgggtgtggtggctcacacctgtaatcccagcactttgggaggctgaggcaggcagattgcttgagcccaggagttcaagaccagcctgggaaacatggcaaaaacctgtctctacaattaacaacaacaacaacaaaaaaaacaaaaaccaaaaaacaagcaatgacaactacaacaacaacaattaaaaaaaaccagtgtaatgcaataaagaatagctagagtcagagtcacttttagatgaaggggccaggattaggctttgcagtgccatttgagagagacctaaatcccaaaaggacaccatagaagggcctcaggggaaagcattgctggcagaaggagcatctgaggtgttctggacagtttcccattacccttccagtcctgctctcagtcctctccttgtttgtttcagcacaaggctgaccagtaaggacttcagcagcagggcctggggtatgaggatctgggatgtgggtcttgggatgaaggggtgtctgggatgtgagtcctggggtttgggggaactgagttatagggactaggaagtaagatttcaatagtaatttgacaaaatatattaagaacttaaaaattttctttgatatgatacttccactttcagggcttatatcagatcttcatcacaatgttactgatgagaaaaaaaacctataaaccatctaaatagcccataataagggactggttaggtacattatagtctgtccatttgatatagtgaaaatgtgtgcttcagcaggccatgaacaaaaacagtgagagatgaggctgtataaatgttaacaatgtctgcctgccaaaaaattattacaacatttaaaaggcaaactggaaaaatatttgttacctgtgacaagaattcttccaaatgaggaagaaacatttaacagaaaaatgagcataagacttgaatagagaatttctaaaagaaattgtcactaaatgtctgaaaaaaaaaaaaaaactcagccttattctaaaaggttaaaatgtggtatctttttgcatggaaaaaataattaatgcttaaaagacactaaacaaatgccagtagcattccctagtcagtaaggttttacaacagttcttggacggcagtttggcaaagttaatttttcaccaaatattcattctgtgcctcttctgtgccaggtacagagaagggctctcaatgtgggtgagggtagagattcaggaccaaggagcagtctggagttttcacagagcatgggagattgtcttagtctttttaggctgctataacaaaatactatagagtggcttataaactacaaaaattttattttcctcacttctggaggctgggaagtccaaggtcaaggcatcgccaaatataatgtctggcgaggtcccatttcttatggatgtacagcttctcattgtcaccttacacggtagaagggtgaggagcctctgtaaggcctcttttataagagcacaatcctattcattatggtagagccctaatcacctcccatcttctaatactatcaccttgtgggagtcaggatttcaacatatagattttggggtaacccaaacattcccaccacagcagaggcattaccaacatttagcacccagttgttaaagacatcaaacttcctgcattgattttaggtcataaaaatttctttgaccagagaaatgtaagcagataggagattgtgccagttctgggtgaggtgtcaagaaccattctgtgttccctcactctcctaagctcaagccattcaccaggagaccgcatactcaggcaaccatacctccctccacctgggccctcaagcaagaaacaccagtgagagaccagagcagacctgagccccaagcccagccgagtaccaagcccacgagtgagatatcagtgttggttgtgaccaatgaggtttgggggttatttgttaagcatcattatcatgcataaccttataaactgtacaaagaattgttcccccagatgccataagcatgcccaaccctctgtctgaaaaatgctggatacagaaaagaaagagaacagagctctgggatgagcatgcacagtcaaccaatcatcacagcacagatgacatgacgcatgttgaaataagtgcctttaataatgagttgaaaagtgggatgaaaaagaggaacaggagtaacagttttgagtgggaagttaatgaaagtttctccagggatacaacatgtaagacttgagatgaaagagggttagacctggagcgggataaaggtttccaacagagagggggccatgaatagggaggagcttgcacctgaggggttggagcaggagcactaactaggtgccaactggatggtctggccccatcaggaccttggggaccaccaggaggggattggattttacctaagtgcaatgagagccatcaaagggaattttgttggtttgtttaaatcaaaatttgttttgtaaacatattagttttaccactggtgtgatttagcctttgatctatagaaatggaatttgagtttcaaatgtctccagtggcaggactgcccacaaagaatccctactaccattcacattttggggagggggttaatagcaccaactcaagtactatccttacactgtctagaaatgaaaggaaacaattgactcaggaatttcacttctaaatagcctgcatttacataacagtatccttggaattatagttctatcaagctttcatgtgaaaactaaatgagagaaaatgaaaattactttagaagagagaccaaaaaatactgttttctggattaatcagagacttcctgttaataaatagcaataagaatacaactttcattatcctgaaatcaaataagatgaaaagaattatactaagattcacacatatatttgtgtggatatatatatgggaaaaacctaagcatgtttccctactctctactcacaatcacagagtacttctgacaccagatgtgtggggggttttctccacatgccaaccaagcaactctgcagcaaacaccagctaggtgtcctgttattctgatcctacttacttggagacagccaggtaaagttgggttgagagctcaggataggtgagggctcagtcccaggagcctgaccccatttcacatgccaattacaaactcagattttgacctcagcttctggcccactgactataaaccagggttcccatgattccctccttgggttgtggcattgggcattctggtgagctctccatgtgatctacacatcaggcatgagactttatccctgaaacttatgtcaaattgtccagcttagcagtttttgttcttgtttggagagttgtagcaagatattgaagtaaactagaggaatttaagatccaatcctaaataaataacaaaaacttgaaaacaatcaacagggctatgatctaacaacaagtgtactatggttttcttctgaaacttaatttttctctctattgtcatccccacttctactaaaaataatcacagtaacaccaatttgtttctaaaataagtttagtctcaaacttggcctaattatttgtataagtacagcaagaataaccatataggctccttttaaatttgcttgatgataattttgacaagaaatcttaggctggactttttttttttttttttttttttgagatgaagtctcgctctgtaccccaggctggagggcagtggcgtgatcttggctcactgcaagctccgcctcctgggttcacgccattctcttgcctcagcctccttagtagctgggactacaggcgcccgtcaccacgcctggctaatttttttttttttttttgcattttttgtagagacgaggtttcaccgtgttagccaggatggtctcgatctcctgacctcgtgatccgcccgcctcggcctcccaaagtgctgggattacaggcgtgagccaccgcgcccggcctaaactggactttttaaaacctctcgatgctaggaagtcaaaccaatgcagacatcagactttgcccttaaagccagactctctatgcatgttttcaaatatgacattccagtcaaagctttgataatatagtcaatgttttcagttgtatcatgttaaagagaacagattcttgttgaatttatgcaaataaccatatcatcataaacaaaaataaggatacccatgaattatttcctgagttttggagggatcaggtagggaacaaaagcaaatgtttcaatttttgtttacaaaagtatgcattagcaaattgctataagttatagttagcttaaaagaaaaaaagttcccttgctgggtgcggtggctgacgcctgtaatcccagcactttgggaggccgaggcgggtggatcgcgaggtcaggagatcgagaccatcctggctaacacggtgaaaccccatctctactagaagtacaaaaaatcagccaggtatggtggcgggcgcctgtagtcccagctactcgggaggctgaggcaggagaatggcgtgaacccgggaggcggagcttgcagtgagccgagacagcgccactgcactccagcctgggcgacagagcgagactccgtctcacaaaaaaaaaaaaaaaaaaaagaaagaaaaaaa

SEQ ID NO: 826 - DNA, 2604 bp, Homo sapiens
tttttttttttttttttttgagacggagtctcgctctgtcgcccaggctggagtgcagtggcacaatctcggcgcactgcaaactccaccttccgggttcacgccattctcctgcctcagcctcccgagtagttgggactacaggcgcccgccaccacgcccggctaattttttgtattttcagtagagacagggtttcaccgtgttagccaggatggtctcgatctcctgacttcgtgatccacctgccatggcctcccaaagtgctgggattacaggcgtgagccaccgtgcccagcccatggaacaccatttttaccagaaaaaaactactgacagacaaaccagggttattcagacttaagtatgtggcagaaattctgtcaaaaatgtaacaaagtgagattgtcacttcaagtaaaacaactgacagtttgtgttaccaatgataaaattctagctttcaagtgaaaactagaattttggaaaatcctatctgccactgtgagcttgacagcttcccaatacttgaagacttttccgactaaataggaagacattaaggaaagtgattgtttgatactgtataatgaaatatgtcaacattaggaagaactgtataacacagtgaaccactaaaatttccgaaggacttatgcttaatgttttaaaaaacaggcatggattcaacatccattcaaagtgtaaggtacaccattggatattaatgtaacagtgtaaaacaagtacattgatatagtttcaaattccactttgtaactaacctttaaaaagctacgatttgtcaaactttgatgtgatatcaaagaacatccatgattatctttaaaaagctattaaaatattcttctttccaacttcatatgactgtgaggtgggattttcttcatcttaaaccaaaatgaaacagtgcagcagcttaaatgcagaggcagacataagaatccagttaccttctattatgtcacacattagttttgcaaaaatgcgaaacagtgccacttctgccgggcgcagtggctcacgcctgtaatcccagcactttgggaggccgagacaggcggatcacgaggtcaggagatcgagaccatcctggctaacaggatgaaaccccgtctctactaaaaataaaaaaaaaaaattagccgggcgtggttgcgggcgcctgtagtcccagctacttgggaggctgaggcaggggaatggcgtgaacccgggaggcggcgcttgcagtgagccgagatagcgccactgcattccagcctgggcgacagagagagactctgtctcaaaaaaaaaaaaaaagaaaaaaaaaagaaacaatgccactcctaggataactgttatcaaaaccaggaaataagtgctgatgatgatgtggagaaattggaatccttaggtactgccaatgggaatgtaaaaatggtacagccactgaagaaaacagtatggtttcaaaaactaaacatagtactatcctatgactcagcaattttcacttctaggtacatacagtatcccaaagaattaaaagcagggattcaaacagacatgtgcacattaatgatcatagtagtagtattcacaatagccaaaaggtggaagcaacccaaatgtccactgacaaatggataaacaaaatgtggtatatacatacaatgaaatattattcagttttaaaaaggaaatcccgacacatgcttcaaaacgaataaaccttaaaaacgctatactaaataaaccagacgcaaaaggacaaatattgtctaattccacttatataagggacctgaaatactcaaattcatagagaaaaaataatggttaaccagggattgggggaggaagtaatgggcagttattgtgtaataggtacagggtttcagtttgggatgatgacaagttctggagatggacagtggtgttggctgtacctctcaattgtacacttaaaaattatcaaaatggtaaattttgttatatcttaccacaattttaaaaaaaagggaaaaaaccccacaatgttaatcttctcactgattggggggcgggggggttggtttggaaaatagttatttttcattaaaatcactatttatgcacctagcctatttattagttttgtaaattaacaactactttaatttttttccagctttaatgtctaatatggtaaatatagacagatataccacacaaacagaagctcttaggtccacggtaatttttgaaaggtaaaggggtcctgagaataaaaagtttgagaattgttcttttttttttttttttttttttgagacggagtcttgctctgtcgcccaggctagagtacagtggtgcgatctcggctcactgcaagcttcgcctcccgggttcatgccattctcctgcctcagcctcccgagtagctgggactacaggcgcccgccaccacgcccggctaattttttgtattttttagtagagacggggtttcaccgtgttagccaggatggtctcgatctcctgacctcgtgatccacccgcctcggcctcccaaagtgctgggattacaggcatgagccacagcgcccggccgagaat

SEQ ID NO: 827 - DNA, 306 bp, Homo sapiens
ttttttttttttttttgagacggagtctcgctctgtcgcccaggctggagtgcagtggcatgaactcggttcactgcaagctccgcctcccgggttcaagccattctcctgcctcagcctccagagtagctgggactacaggcgcccgccatcatgcctggctaattttttctgtattttttagtagagacggggtttcaccgtgttagccagggtggtctcaatctcctgacctcatgatccacccgcctcggcctcccaaagtgctgggattacaggcgtgagccaccgcgcctggcctcaaat

SEQ ID NO: 828 - DNA, 27666 bp, Homo sapiens
ggcactgacaggacttgacacattctaatctcctgagggccgctaacaacatagatgacagtctggacaacacaaagggtcaacaggtgctccgagtgtccggcagggctaattggtaagttcgtctcttatacaaggcccgtgggacaagactgggagaggtatttttctttttttcttttttctttttttttttctttttttctgagacagagtcttgctctgtggcccaggctggagtgcagtggcgcaatctcggctcactgcaagctccgcctcccgggttcacgccattctccttcctcagcctcccgagtagctgggactacaggcgcccgccaccacgcccagctaattttttgtatttttagtagagacagggtttcaccgtgttagccaggatggtctccatcgcctgacctcatgatctgcccacctcggcctcccaaagtgctgggattacaggcgtgagccaccgcgcccagcctgggagaggtatttttcttaactaaagtacagaaaataacagagaatcaagaacaatgaagaaacagagaaatatgttccaagcaaaagaacaagataaatctccagaaaatgcccccggtgaaatgaagataagtgacttaccttacagacaattcagaataatgatcatgaagatgcttaccatgtctaggacagcaatgcatgaacaaagtaagaatttcagcaaagagacagaaaaaagttcaaaagaaataacagagctgaagaatacaataactgcaataagagctcaaaagagaagctcaacagactaaatcaagcagaagaaaggattagcaaactagaagataggtcactggaaatcattcagaggagcaaaaatgaaaaagaatgaaaaagagtgaagatatcttaagagagttaggggacatcaagccgaccaaaataggcattatcagagtcccagaaggaggagagtgagaagagatggaaagcttatccaaagaaataacagtcacgagttgcagatcaacatttcagtcaatggcagaccacatgagcacagtggccatagcatgcagcctagctgtgtagtaggctgtcccatctaaatttgtgtaagtgcactccatgatgtccacacaatgacaaattcaccttctgatgcattttcagaacgtatccctgttggtaagcaacgcatacctataatgactgaaaacttcccaacccagggaaggaaatacaaatccacatccaggaagcccaaaggacaccaataagactgatctaaagcaacccacatcaagacacatcataatcaatttcaaaagttaaagacaaagaattctgaaagcagcaagagaaaagcaatgtattatacacaagggaaaacccgtaagtgtaggatttcttctgggggtgatgaaaatgttatgaaattagattgtgatgatggaggcacaactctgtgaatacactacaaacctttgaattgtatgtttttaaatggatgaattttacagtatgtgatgcacaacccaatatagctatctaaaaaaaaaaaaaaaacctaacctatttgtgaattattttgtagaacatgttttctcttttttattcctttattctgttttcctgcagttccctgactgtggtggaataagcttggaggagatgccttcacttactctactgagaggcagagaaaggttaggtatggaagtaaaatgtccataaataatatcaattctgcacctccaaagatgtgtgcctcttacacaaatgtctctataatctgaggggtccaggctacctaacttgcttcttgttgcttcactgcccgttagttcctctcttcactctctaagcttcccatcccctttggatcagcagccaggagcccagtgggagggtatcttacagggcacgttgcacttctgcaggcagtaggccagctccaggggccgcactgctttctgccggctgtcctgcatcttctccagcagcagaagcatctggaaagggacgcttctcctctgctcgtcagctcccctgggcaccgtgatcctgccacacaagaacagccagaaacctccttacatgtagttctcaaagctaggtgcacactggaatcacctgggagaaattttaaatcttcatatccaggccactcccatacaaattaaaccagaattctgggtccggggggcggggcgcgggcagttatcagaatttttcagttcctcagattatttcaatgtgtggtcaaggttgagaagcaccatgtgagtgaatctgctctacaggggaccctctagagagggggatcagcatgactgctgccttggcccctctgcaccctgcccagcaatcgtgctagagcagacggcagatgcacgaggtcctggctccacatctcgggcaagcagcaaaatgtccagcctaaagctctccagactgcagaggcacatgctgggttaggtcctgggaagaaaggcaacatgaaaggctgtccgtgtggtttggcaatgattcatttaatcacaggcatttttcggatgggaaaaaggagagagcacagggcagaaaaggagtgatagagagagacagagggagagagtgcattgtgtgagtgttggtggaaggaggggtgtgtactccccactgacttactccttctccgactttggtctagtcccaactctgtcttttaaccaagtcagtggctgtcaatcctggccgcatttaaaatcacccaaagagggctttaaaaaagtaccaatacctggccgggcgcagtggctcatgcctgtaatcccagaactttgggaagctgaggtgggcaaatcacctgaggtcaggaaattgagaccagcctggccaacatggtgaaaactcatatctactaaacatacaaaaattagccaggtgtggtggcgggcgcctgtaatcccagctacttgagaggctgaggcaggagaatcccttgaacccgggaggcggaggttccagtgagccgagattgcaccgtcgcactccagcctggggacagagtgaggcttcatctcaaaaaaaaaaaaaaaaaaaagtaccaatacttgggtcgcaccccagaccaacctaagaagttttagaaataatgtgtaggccagaatatgcagaagccaatctttcctctgccagcttttgagagaagatctcaaaaagtccaagtcactgtgaataactgaatatattaaaaatgaaataatacaggccaggtgcagtggcttacgcctgtaattccagcactttgggaggctgaggtgggtggatcacgaggtcaggagatcgagaccttcctggctaatacggtgaaaccccgtctctactaaaaatacaaaaaaaattagccaggcatggtggcgggctagtcccagctactcgggagactgaagcaggagaatcgcttgaacctgggaggcagaacttgcagtgagccaagatcatgccactgcactccagcctgggcaacagagcaagactccatctcaaaaaaaggaaaaagaaataatacaaatgctcatcagcctgaagaacagtcttacctcttcaatatcctggtgaagtccacattcattacgaacacctgaatcaaggagttaaggcagcaggtctgtccaatgttgtgtaaaccaaccaggcctataaggggaagagaaaaaaatgctgagggcaaggcctagggtaaagaagttgacaaggctgggcatggtggctcatgcctgtaattccagtactttgggaggccgaggtgggcggatcacctgaggtcgggagttcgagaccagcctggccaacatggtaaaaccatgtctctacaaaaaaaatccaaaaatcagccgggtgcggtggctcacgcctgtaatcccagtactttgggaggccgaggcgggcagatcacgaggtcaggagatcgagaccatcctggctaacacggcgaaaccccgtctctactaaaaatgcaaaaaaaattagccgggcgtggtggtgggcgcctgtagtcccagctactcaggaggctgaggcaggagaatggtgtgaacccaggaggcggagcttgcagtgagccaagatcacgccactgcactccagcctgggcaacagagcgagactccatctcaaaaaaaaaaaaaaaaaaatccaaaaatcagccaggtgtcatgacaggtgcctgtagtcccagctccttgggaggctgaggcaggagaattgcttgaacccaggaggcggaggttgcagtgagccaagatcatgccactgcactccagcctgggcaacaagagtggaattctgtctcaaaaaaaaaaaaaaaagttgacaaaaatctaatgtttttcttaaagctactaaggacatgaagtcctgtaaagtctctcaagtacgaagtgttcattcagcttgcaaacaaatcggagagaagatatcaaacatgaacctttaaaaagctctatcacaagggccaagcacagtggctcacacctgtaatcccagcactttgggaggccgaggcgggaagaccacctgaggtcaggagttcaataccagcctggcctacatggtaaaacctcatatttactaaaaatacaaaaattagccgggtgtggtggtgcatgcctgtaatcccagctactcgggaggctgaggaaggagaactgcttgaacctggcaggcagaggttgcagtgagccaagatcgtgccactgcactccagcctaggcgacaaagcaaaactccatctcacacacacacacacaaaaagttcgataacaagaaaagttttaatatagtccattaggaaaagtgagatgtcaccaaaagtatatattactcactgccaaatgagtagtatgagcaattgttgggagagaaaaaaaaacattagagaaagcataactgagaatatggcttcctttcattcaaatcgttctccacggagctaagtccaaatgtgcatctgtggggctcagggataagagggactccccagtatgtctatgttggactccagcggagaggtctctgcccagttcccactacagggaggcaggaaataaatcagaaggttactttggggaagattcacctaatccagtgtcaccctgagaggctgaaaggcagaaggaacttataagaatatgagaaaaacaaaagataacatttgtctgacccctagcaaccaacctcctcttttccaacccaaccttaggctcagcagaccccacaagggaagtaccactaatctcaggattcttggggaaagggctttggcttacaagataggacagtaagaaagtaacaacctggggtcacaggtgagcacagatttctactcccagactatcaggagcacattgcttccagacagacccatacaaaggtagcagtaaagatgggaactaatgctaagtgcctctagaatcccagcactggcttaaagcagtttccacagatgaccccatttaatcctcccaacaaccctatgtgcttggtactattattacccccatttgtttgtttgtttgtttgagacagagtctcactctgtcacccaggctggagtgcagtggcgtgatctcagctcactgcaacctctgccgcccaggttcaagcaattctcctgcctcagccacctaagtagctgggattacaggcacctgccactgcgcccagctaatttttgtatttttagtagagacggggtttcaccattttggccaggctggtcttaaactcccgacctcatgatccacttgccacggcctcccaaactgctgggattacaggcatgagccaccgcgcccgaccttgtttttgttttttacagatagggtttcactatggcccaggctgtatccccatctaaaagatgcagaaactcaggcacaggaaagcatgagccgtcgaatacaaagctctgcggcttcagagcggagggggtgagccgaacatttacatgcagtcaagaagaggaaaacgggaggggtctaatgaccatgagggtagtcccaggccctgggacgctctctgggctgctctctcttcatgttgctgtcttcttccttcttttcttcaagatctgccggggactgcgaggactcagccaggatggactgacagatttgcctcaggagcccaaacgccttgctcattcgtgatcactccaaaacccccaggccgcagctgcctggcccgcgttcaggacagcacgacttcacttccaggaagcgcttatgtgagccaggcacgatggaatctctgtgaaaatacaatgcgggtaggtaagaattagagaaggaggaatgtgtattcatgtaatccgttctgatgccaaagagcaggtcttagagggagataaatgtttggggagactgactcacagagctctaggctggaaatgacagctaggctacacatcccctaacctgggtcccaggcgtttccattcatcctcagagccgactgccaaatcctaaccgggagcgccctcttgggaaaggacagggaagcgcgcataggactttgctttacaacccaggaccaggcccacttcagtaaaaagccagcactaagcaagaactctcagcccctgatgccaggctggcatacaggggaagcctctcaacccgcccaacacccaaggggacctgcggccctggcagaacagcctcgtattctggcccgcaacactgccggccagctgcagcagtcagataaaccttagctgcaggcaggctgtagctacctgtcggccttaggcacatcctggtgctgggctggtctcatggcatgaattctgggggtgtgactcaatattgtctcagcctcagtggccataggggtacccgtgtaccccctcccccaacccagcacagctgtgtgaagagagacactgtttgcttgggggaagaagaggtaagtggagtacttcgccttggaacccagtgtgtccgaaattggtgggtgcttggtctcactgacttcaagaatgaagccgtggaccctcgcagtgagtgttacagtttttaaagggggcatgtccgcagtttattccttctgatgttcggatgtgttcggagtttcttccttctggtgggtttgtggtctcgctagctcaggagtgaagctgcagaccttcgcggtgagtgttacagctcctaatacggcgcatctggagatgtccgttcctcccggtgggttcgtggtgtcgctggcttcaggagcgaagctgcggaccttcacggtgagtgttacagctcttaaggcagcgcgtctggagttgttagtccctcctggttggtttgtggtcttgctggcttcaggagtgaagctacagaccttcgcggtgagtgttacagttcataaaggcagtgtggacccaaagagtgagcagtagcaagacttacagcaaagaatgaaacaacaaagcttccacagcatggaaggaaacctgaccaggttgccactgctggctcgggcagcctgcttttattctcttatctggccccacccacatcctgctgattggtccattttatagacagccaattggtctgttttacagagagctgattggtccgttttgacagggtgctgatgggtgtgtttacaatccctgagctagacacaaaacgtctccacgtccccactagattagctagatacagagtgtggacacaaaggttctccaagtccccaccagagtagctagattcagagggtcgactggtgcattcacaaaccctgagctagacacagggtgctgattggtgtgtttacaaaccttgagctagatacagagtgccgatcggtatatttacaatcccttagctagacataaagattctccaagtccccaccagactcaggagcccagctggcttcacccagtggatcccacacctgggccgcaggtggagctgcctgccagtcccgtgccgtgcgcccgcactcctcagcccttgggtggtcgatgggactcggcggcgtggagccgggagcggcgctggtcggggaggcttggtccgcacaggagcccatggctgcggggtggggaggctcaggcatggcgggctacaggtcccgagccctgccctgccaggaggcagctaaggcccggcgagaaatcgagcacagcagctgctggcccaagtgctaagccccttactgcctggggcttgcaggccggccggctggccgctccgagtgcgggcccgccgagcccacgcccactcggaactcgcgctggcccacaagcaccgcgtgcagccccagttcccgcccctgcctctccctccacacctccccgcaagctaagggagcccactccagcctcggccagcccaggaaggggctcccacagtgcagcggtgggctgaagggctcctcaagcgtggccagagtgggcgccaaggccgaggaggcaccgagagcgagcgagggctgtgatggctgccagcacgctgtcacctgtcaccaggactaggctcactacagtaaaacccagtactgggcagagcctcatcaccctgatactagaccagtacccacaggcagatctcaccccaccctagtgccagatgagaacccacagccccagtaacagggactggcgatctggcccacatcactacctgacaactacagtggccctgggccctgaataacttcagcagcagcaagcacgccatcacagctgtgggtcttgggcgtgccccagtgctgtgccagtctcggcagctatggccttcaggcataacccagggctgtgtcagcctcagtggccaaagaattccaaccacagtgatgctgggcttagagcaccccccagcactacaacagctgaagcagtcatgggcttagggtcctgaccaatcagcctctccctaatctcctatgggtttcctgatgaaagacgagcccaaacaaagccaggcaatgaagactggcttaggtacctatgtcaatgcacagacattgacacacagccataaggatcaaggtcaatcagagaaacatgacatcaccaaatgaacaaattaaggtgccagtgactaaccctaaagatatagagatgaggcctggcatggtggctcaggcctgtaatcccagcagtttgggaggctgaggtgggaggatcacttgagcccaggagttcaagactagcccgggcaacatactgagaccccatctctacaaaaaaataccaaaaaaatttagacggtcatagtggtgcacgcctgtggccccaaatactgagaagggtgaaggaggaggatcacttgaggccaggagtttgaggctgcactgaactatgattgtgccactgcactccagcctgggcaacaaatgagaccttgtatctaaataaataaataagatgaaataaaataataataatgggtaacatcgaagcactatttcttataaaaggtgaaagccttttatatgtactgtcttatttatccttacacagccatgtgaattaattactgttatattgccatttgacagatgagaaaactgagatacaaagaagtaagtgcatttcccactggcaagtgatgggccagatgtagacaagctggacggggtttaagtccagctaacatgctgctcagagtgaggaataaactcaaccaaatcattggtgggaatgtaaattagtagagccattatggaaaacagtatggagattccttaaaaacctaaaaatagatataccacatgatctagtaatgccactgctgaatatatatccaaaggaaagggaatcagtatgttgaagagatatttgcactctcatgtttactgcagcactgctcataatacccgagatacggaatcaacctaagtgtctatcaaaagaggaatggataaagaacatgtggactatatacacaaaatgggatgttattcagccattacaagagaatgaaatcctgtaattcccatcaacatggatgagcctggagtacattacgttaagtggaataacctaggcacagaaagataaataccacatgttcacactcatatgtgaaagctcaaaaagcttatctcctagaaatagagaatagaaagccaggcatggcagttcacacctgcaatcccagcactttggttggctgaggcaagaggatagcttgaagccaggagttcaagaccagtctaggcaacatagcatgttgcctaaataaaataaaaaatattttattttctaaaaataaaaataaaattagcctagcatggtggcatgtacttgtggtcccagctacttgggagactgaggcaggagaatcagttgagcccaggaatttgaggccacagtgagttatgatcgtgccacggcactccagcctgggcaacagggcaagaccctgtctccttttttttttttgagatggaatttcactctttttacccaggctggagtgcagtggtacaatctcagctcactgcaacctctgcctcccgagttcaagcacttcccctgccttagtgtcccaaatagctggaactacaggcatgtgccaccacgcatggctaatttttgtatttttagtagagacggggtttcaccatgttggccaggctggtcttgaactcctgacctcaggtgatccacccatctcggcctcccaaagtgctgggattacaggcatgagccaccgcgcccagcctggaatatattcttaaattcatgttggatggctcagataacaacaacctctttttcttagtaaatattgactttcaatagttataaacagttgttcttcttacaaggcccagcctaggaggactcaactgaaatgatgacagcagacaattccatcagcaagaaagaggattttgagctcatcattgagggaaagctgatgaaagagagcagagaggttccaggctgcattttccaagatgttgtcctcttctccgccaagacctcccagatacttcagtaggatatagcagtaaaacctcatggagcagatcatttgagcaggctcggtcccaaagggaaacaaaatacagcagcctttcagggtagatcacactggggagacagggaggcggggcagcaaggaaaggaaagtgaagcttaaaaggtctaaggaggatggggagggcaaggcgagcagagagaccgcagctgaagttagcaggggcaataagcatccaccagagaaaacagcctgggcggattccaaggaaggggattttcaaactcaactgctgactcaaaaaaagacccccaggccaggcgcggggtctttgtttgagactctgtctcaaacaaaacaaaacaaaaatcccaaatactaaactaacttagctcccaccctacctgaatttttttttttttttttggttcacgttctctcatgatcttcccgaaatgttatccttaagcttcggggagaggtgagcaacggaaggaactggcccaggcccaccactaaagaagccccaggaccaatcggggtcctcagagaagccccagaagagccaggaacaagctgcagaaaacctggggagggtggggcctccacccaatactccactcacaactggactctctgccaggaaagccaactccaacatttagatgccctaaaaggaacaaaattaacctgccaggaacatgattcaagcagcctcggtgtcttccgacccaccccatcatggcaaccacaattgtagaccgcagtctcgatgacgtgttcacattattttgcatttcttttttctttttttatttttatttttatttttgagacggagtctccctctgtcgcccaggctggagtgcagtggcccgatcttggctcactgcaagctccgcctcccaggttcacgccattctcctgcctcagcctcccgagtagttgggactacaggcgcctgccgccacgcccagctaatattttttatttttagtagatgggtttgcaccgtgttagctaggatggtcttgatctcctgacctcgtgatccacctgcctcggcctcccaaattgctgggattacaggcgtgagccaccgcgcccggcctattttgcatttcttgagtaatcgtaatatgcgggttagaacacacggattacaacactttggatgaaaaaccacataatagggaaattttgggactactctctctcaaaaaaaaaaacagctcgtggaaaaactaggacttaccttctttgaaactatgtttatgttaagcattttcccctttgtaagctcatcattgtgtaaaagtgtcagaactgtgcaacacattttttaacagtccaaaagcaagttctttgataaatcaatatgaagccgtgcacctgtgttactctccctcccgttttgttcctgcgaacacatcggtaacctgcattcactctccatccaactctgttcaataccagaaagaaacttcagatgaaatgcttttcagtatttgccttgttttctggaacaactttaaagtacaaattatacctaaataagtacaaattaaagcctctgctttaattttcaaacactttgaacccagattttcaggggtctcaaaatggagttttgtgtttaaaagtctaaatttagctttcttccaaggaaaagggtgtgaagaagagaggttaagactaaaatactctgatttgcagagtttgacaacatccttccaatttctcaatatgaatgcccactgacccagccattccacttctaggaattttccaccgatatatttgtatgaatgtatacataaaattatattcattgccgtatctgtgccagtaaaaactggaaacaacctaaatctccatgcattgtttaaacaatgtacttcccataccatgtatcaggtttttttgtttgtttgtttgagacagtttcgctctgtcgcccaggctggagtgcaacggtgcgatctcggctcaccgcaacctccgctcccgggttcaagcgattctcctgcctcagcctcccgagtagctgggattacaggcatgcgccaccacgccaggctaattttgtatttttagtagagacggggtttctccatgtctgtaactcctgacctcaggtgatcctccctcctcgatctcccaaagtgctgggattacaggcgtgagccaccgtacccggccgaatcagttttttgttttatttttaatgccattaacacatctatatgtcctgccatgaaaagatgtccataatatactcagtggacaaagcaagttcgaaatgattttaaagacttgtacatagaaacatttctgataaggtacaaacaaaaatgatactgagtggaagactgcgagacacatttgtctgcattgtttgaatttttttacaagcttacaacacttctgcaatttctttttttgttttaattaaacacaaagtcatgtcaaaagtccaaataactatattagcttagaaaaaaattcactggcccaaaatatatgcacgtagtaaatacagatcactatcataatttgcagagcacaattattacttaattccttaattatctgactggcataggagcagagttggatgtctgtgctagaaagaaaacttccaaaatgagccccgaacttgcctcaagcgccatgcaagcgtccagcctccgctgctgagttccacgtcgggactgagccggggaccgagctgggaccgaagttccgctccgggcccgccttggtctggccccgcgctcgtggcaccccgcccagctttcgttttccactgaatggaaagcgaaacttacagcggcctccgcgccgggagctgggcgccagcgtgcggggaaaccctgccggcccgagcttcccgcggctgccgttgcagccgcgcacctgctccagacttccagccctcgctttttttttttttttttttttttgagacggagtctcattctgtcgtccaggctggagtgcggttgcgctgtctcggttcactgcaaactccgcctcctgggttcaagcgattctcctgcctcaggctccggagtagctgggattacaggcatgcgccaccactcctggctaatttttgtattttagtagcgatggggttccgccatgctggccaggctggtctcaggtgatccgcccgcctcctaaagtgctgggattacaggtgtgggccaccgcgcccgacctacaggcgcctttttatttgcgattttaaggtccttgcaattagcctacgtgttagagtcatttggcgtttggtagtatccatggcagcattttttctttcttaatgctattgtatttcttggatcgggtgtcttcacatcaccggcctgtggcttggatgcggcacatggtgtaattaggagctcccctgtgggcatgcagatacagatatttctccacttaagaaggggtcagggggcgcggtggctcacacctgtaatcccagcactttgggatgctgaggcaggcggatcacctgaggtcaggagttcgagaccagcctgaccaacatagtgaaaccccatctctactaaaagtacaaaaattagctcggcgtggtggcgcttaatcccagctacttaagaggctgaggcaggagaataacttgaacccaagaagcggaggttgcagtgagcagagatcgacaagagcaagactccgtctaaaaaaaaaaaaaaaaaatggggtcaagtcccagtgaacccatcatgaagtcgaaacatcgtaagtgaaaccacggtaagtgatggaccatctgtgtatatataaggttaagagatctgtaacatgcacaccggaaaggcttattacctctttagagatgtatttcttgtatgtagactcatgggggtaggggcagaagggttatctgctaggggcctcaaactccagccgctggaatttgcgcaggaaagcagggtacaattcccccaaagcgatcattctttctgaaagccgtccccgcagcaacagacaaatagcctccaaaaacccaaagctgccagaacctcactgaagcgttggtagggtctgcagtaaggtacaaaataccatggcatgaagatgtataaacgtgtccataatagggtggatgtgtgttagaagcatgagcacagatatacacatacaggctatccacacgtccatcgtcagcccagactccgcttacattgctgctggaacggaggcagtgtcgcccacagtgcagcatgttctccctggaaggctggtggactttgcgcagtatggtgtttacacaggtacacggtggtgggcgcagggtccgtcctcattatatttgctgaccaatcagttatataaccagcttcatacatctggtaagtcttgtccacaaacaggaacctcaaaaactcaagtgagggcaatgaggagaggaggttgcaaaatttgataaaatatgctaaatacagcaagtcagtagaaggctaaggagcaagctgcagttgcttgcagcaactatcagcagaaaactattaatagtcaatccaatgattctatctgaatcttggtaggtcggtggagcaaagtaattggtgttgctgccccagtgcagaatggacaagggtgaaccttgggttggaggctggactatataatgtaaggatccattacacttctatggggctcttccttccgtccttcatggtaccctcctgaacaattccgtgctaaggccatcaggtgtgtcaagcaaagtgggcgtttgtgtagtatgttccacagtggcccaagcagggtgctggactggagcaggttgaggagggtggcagcacagtggggctgcccagcacaatgtcagacacaaatgggtgctggtgcagcccggcccagggtcacagcccaagcaatttgaagatgtggcacatcccggtattggagtggcccagtgtgtggtgtccagggagggcagggtgctggtggagatgacagattagttacatacagggggatgaccaggtaactgaatgtattaaggataattggagccagagttgaaactctcagagataggagttacaaataaggaaagggagaatgagcccactagtgttgaactggaattggacttagcagtgtggatccatgattttcagtatgtatacacagatagataaagaagtacaaggcgggtggatcacgaggtcaggagattgagaccaccgtggctaacacggtgaaaccccgtctttactaaaaatacaaaaaattagctgggtgtggtggcacacgcctgtagtcccagctactcggaaggctgaggcaggataatcatttgaacccgggaggcagaggttgcagtgagccaagattgcatcattgcactccagcctggcgacacagcgagatcccctatcaaaaaaaaaaaaaaaaaaaaaaaaaaaaaagaagtacatgtggaggtaaacatgtgtatacatgcatacatcccctgacttggtctgtagggggcctgggaacagtgacaccccaacagtacatcttgcacccagatcttggtttctaattcccattctctagtaaaaggaaccaatgttgcttggagaaatggctgtttctggggttaaggcagagaaagtacaagatgagcctaggacatcttgttctgccagcaagtaagggaatgctccaagaatgatggggatgtttcaaaacgatgcagaagccagctccaagaccatgctcccactggccaaatttggaacaacttgagcattaaaagaaatgatgatttgttctgttttgtttttgtttttgagacggagtctcgctctgttgcccaggctggagtgcagtggcactatcttggctcactgcaagctccgcctcctgggttcacaccattctcctgcctcagcctcccgagtagctgggactacaggcacccgccaccacgcccagctaattttttgtatttttagtagagacggggtttcaccgtgttagccaggatggtctcgatctcctgaccttgtgatcctcctgcctcggcctcccaaagtgctgggattacaggcatgagccaccgcgcctggcctgaaatgatgatagtaacatttcgacctgttaaataaaatgggaagccacacttcataccaataaaagtagatactgaataaattaaaagtttgatgagaaacaggatatttacacagtttcaaagtactctcccacaaaatacatattattaattaccattattacatacatgtgatacaggttcattctgcccgcatgccataaatccatcactgtgacaggttttgcaaaagagaaaagatttattcgcaaggcagcccagtgaggaggcaggagaacagctctcaaatcttcctccccaaagataagtcttagggatatttaccggtgagagaagcagggtggtgtaaggtatgggcaaaggtgattggcagtgggggaaaatgaggcagtcggtgaccactgcaagcatagtcagggttcgtggcacttcacagggcacatgttcaaaaaatgacagccttagcgtgatctgagggtgtcgcttggggcctctgatgtcaaaaggccacttcttttgtttgcacaagcctacttgaaagctcacggtctcaactggtttgaactaggcaggagctgccccaagttcctgaaaaacaatttgaacgatcatgacagtagtgacatacatgttatctgtaaggaagccggcaaggttaagttacagcgctcagtggcgcggccttcagcttcacagaaaaaaaataacaaaagcaagtgacccaaagcaagcagggcaggctaaattgggcagacctaatcagatgaaccccatggtctcatatgtaatattacattataactataaagaatgtaattaatgtaaatattcagtacaagaaagtcatcagtgcggggaacactggaattgcgtgccaccagaggacagagtggagccagcgcggtatcacttctgtgctgttcccatcgaaggtcagtaaccggaaccccttcgccaggacgcgggtcctggccaacccaaatcgaggggcattctgcagatcagctggtctgccatcttcaaacgattcatgaaaatcaaagacagctttgaggaacggctccagactggcagagaccaaagaggtcatagatgaacaggagatccccaactggatcctttggctgtaaaggacaatattggcacaacgggtgaagcttgaatggggtctgaggattaggtggtagtaacttcacaggcggggatttgggagaaatgcaatgtcacgtggaaaactgactctcaaatagttcaagaaggaagttctttggactatacttgcaacttttctgtaggcttaatactgtttcacaattttaaaatgtaaaataatagtaccaggtagtagttttttattaagacagattgtgctttttgaaagcattggtggaaagatttctcaaaatcatgcgcgaaagagtttataatgaaattgtgtaatatttgtttcaaaagaaagtgtgggccctgagaagcattttctgtagtttacacagtatttctgccaatttgggatactttcagtgtccctggaattctcatcatctgaatttcttactctttttccctttaaaaaaaaataaaataaagaagtatgaggcaaaaggccacacctacctacctcactttaaaattctgtctaaaaacctggtcacagaggaagatgttggctaactttaatgcgataatctagttcccctcaaaatggaaagctatttagaaaaaagctatttgcccaacgtgaggaacaatttatagaaactgacaagaatttttgtcctggggaaaggacagggtttgttgcatgggataaggggaagtgatgtggccgggcatgatggctcacgcctgtaatcccagcactttgggaggccgaggcaggtggatcgtgaggtcaagagatcgagaccatcctggccaacatagtgaaacctcgtctctactaaaaatacaaaaattagctagatatggtggtgtgtgcacctgtagaaccagctactcgggaggctgaggcaggagaatcgcttgaacctgggaggcggaggttgcagtgaaccgagatcgctccactgctctccagtctggcgacagagcaagagtctgtctcaaaaaaaaaaaagcaagtgattttttttaaaaaaagaaaacagaaccgatgtctgaaaaagtagtactcctttacaaaacacattctctacaaacgcgtggtttcatgtgacctctgctcagtccctttccacaactttctcctgcctattttcttctctgcattttgtcaggatgctttttattgtaaattttactgtgttttgcatgcttccaaatataaaaaataatttttaagatgaattaaacattgaacctccctctcagtattgttttgggaacatgcattctcctgaggagagggagctgttgagtggaagcagtcaaacagaactccacatttcattttcctggcatgggtttcagggtgcaactcaaacagaatgtgacttggcatctgtcacctttcccaggcactccctatcctctggcaatttgttgccttaatggagaaccattcaaaattaaatattttatattagaaaagaaatgttaaacataaagaaaagttatacaaatattataacaacctagtgagccttccttcactaattttctctctcatacacacacatctatgtgtatgtgtgagtacacagtatatatgtgtatatatttacacaatcactttttttcttttgctggactacttgagagtaaattgaagagattgacattcttcagctctaaataattcaatatgaacctcataggatcaaagatgttttcatacataaccccagtgcaattattaccaaattcagataatttcatatccgtacaattttcccatatataatatattcaatatttaaattttgacagttatcccagtattgtttatacagcaactgttttcctttgtttcttatttttatagatacatagtaattgtacatatttatgtgttacatgtgatactttgatacatgcatacaatgtgcaatgatcaaatcagggtaatgaaggtattcatcacctcaaacgtttattatttctttgtactgggaacattccaaatcttctcttctagctattttgaaatatacaataaattattgttaactattatcactgtacagtactatcattccctctatctaactatctttgtacccataaccaacacttttcatccttccctccctcctattgcttgccagcctctggtagtcatcattctactctccacctccctgaaatcaacgtttttagctcccacataggagtgagaaggtgggatatgtatctttctgtgcctagcttatttcacttaacgtaatgtcctctggtttcatccatgttgctacaaccgacgggatttcattctttttatgactaaatagtattccactgtgtatatgtagtacatttttttttttttgagacaaagtctcgctctgtcacccaggctggagtgcagtagcgtgatcttggctcactgcaagctccgcctcccgggttcacgccattctcctgcctcagcctcccgagtagctgggactacaggcacccgccaccacgcccggctaattttttgtatttttagtagagacaggttttcaccgtgttagccaggatggtctcgatctcctgacctcatgattcgcctgcctcggcctcccaaagtgctgggattacaggcgtgagccaccgcgcccggccttatctagcatgttttttatccattcatctgttgatggacacttggattgattccatatcttggctattgtgactagtcctgcagtaaacatgggagtgcagatatctcttcaatatactgatttgctttcttttgggtgtatacccagcagtgggattgctagatcatatggtagttctagtttcaattttttgagaaacctccatactgttttccacaatggttgtacgaattttcatttccaccaacagtgtacgagggtttccttttctccacatcctccccaaaatttgttattttctgtcttttgataatagccattttaactgaggtgagatgatacctattaatgtggtttcagttgcatttctctgatgcttagtgatgttgagcatttacttatatacctgatggccattagtatgtcttcttttgagaaaatgaaaatctttttcagattatttgccctatttttgttttgttttgtttttgagatggagtcttgctctgtcacccaggctggagtgcagtgggacgtctcggctcactgcaacctctgcctcctggttcacgccattctcctgcctcagcctcccgagtagctgcaactacaggcgaccaccaccacacccggctaattttttgtatttttagtagagatggggtttcaccgtgttagctaggatggtatcgatctcctgacctcgtgatccgcccgcctcagcctcccagagtgctgggattacatgcctgagccaccacacccggcccatttgcccatttttaatcagattgtttccttactattgagttatttgaggttcttatacagtttatatataggtaactaatcctttgtcagatgcaagttcgcaaatattttcccattctgtaggttgtcccttccctgttatttcctttgctgtaaagaagcgtagacgattcttttttttcccctcccccttcccagcttagaagatttctgacaagtgtagtgaaatcaacaactgctctgcaagaatcagattccagggcaggcacagtggcccatgcccataatcccggcactttgggaggccaaggcgggtggagcacctgaggtcaggagttcaagatcaacctggccaacatggtgaaatcccatctctactaaaaatacaaaaaaaaaaaaaattagctgggcacagtggtgaatgcctgtaatcctagccacttgggaagctgaggcaagagaatcgcttgaacccaggaggcagaggttgcagtaagctgagattgtactgtgtctggaattggttccttctggtgggttcctggtctcgctgacttcaagaatgaagctgggaccctcgcagtgagtgttgcagttcttaaagctggtgtgtctggcgtttgttccttcagatgttcacaggtacctggagtttcttccttctggtgggttcgtggtctcactgacttcaggagtaaagtcgcagaccttcgcagtgagtgttacagctcttaaaggtggcacgttgggagttgtttgttcctccggggggttcgtggtattgctgacttgaggagtgaagctgcagaccttcacgctgagtgttacagctcataaaggtagtacagacccaaaaaatgagcaacagcaagatttactgcaaagagcaaaagaacaaagcctccacagcatgtaagagtaccccagcgggttgcccccgctggcgcaggtggccagcttttattcccttatttggccccacccacatcctgctgattggtccattttacagagcgctgattggtccatttttacagagtgctgattggtgcctttacaaacctttagctaacacagagtgctgattggtgtgtttttacagagtgctgattggtgtgtttacaaacctttagctagacacagagcactgattggtgcatttacaatcctttagctagacagaaaagttctccaggtccccacctgattagctagacacagagcgccgattggtgcgtttttacagagtgctgattggtgtgtttacaaacctttagctagtcacagagcgctgattggtgcatttacaatcctttttagctagacagaaaagttctccaagtccccacccgacccagaagcccagctggctttgcctctcagtaccactgctctccagcctgggcgacagagcaagactccgtctcaaaaaaaaaaaaatagcactaaaagaaacttattaaaaaagaaaaacattgtcaggtcaggctaaaggttaaagaggaaaaaaaatcacagggtagggtcaaagagtggcgataacagagaagagagtcatgagacttgaaattaaataatagaaattactcaatattaactgcagagagaaaatagactgaaaaaaattagcagagcctcagtaacctgtgggactgtgatgaaagatttaacatcatgtcatcaaagtccccccaaaaaagagaaaaaagcatgaagctgaaaaatattcaaagatatgatggctcaagattttccaaaaattgcaaaagacatagcctaaaccgaataaactcctaacaagtctgaggcaatctatatcaatatatatatcataatcaaacgcctgaaaactaaaggcaaagaaaaaagtattaaaaacagcaagacagaaattctaccatatttataagggaaaagcaattttttttttttttgagatggagtctcgctcttttgtcaggctggagtgcagtggtgcaatctcggctcactgccacctctgcctcccgagttcaagcgattctcctccctcagcctccagagtagctgggactacaggcgcgcaccaccatgcccagctaatttttgtatttttagtagagacagggtttcactgcgttggccaggatggtctcaatctcttgatctcatgatccgcccacctcggcctcccaaagtgctgggattacaggcgtgagccaccgcgccctgccaggaaaagcaatttttaaatgacggcatatttctcctccgaaatcacagagaccagaaggaagtgacacagtattttccaagtgctgaaagaaaagcagtgtcaatcgagaattctattatccagtgaaaacagccttcaaaaatggaagggatatcagggcaatctcagatgaagaactactaagaatttgtcaccagcagacctaccattaaaaaaatggctaaaggaaattcttgaaatagaaaggaaatgataagtcttagaacatcagggaggaacacagaacaacagaaagagtaaaaatatagataaatacactagacatttcttctgctgagttttcgagagtatctttgtccaagcaaaaattttaacattgtctaacatggttattgaagtatgtagaagaatcattaagataattgtaagtgagagagggtaaaatgacttaaaagaattgtaaggtttctatgcttcagtcaaactggtaaaatgtcaacactagtagactgagatatcaatataatgtaatatgtagagcagctattaaataatttacacaaagagatacacactaaatcactagacatatcaaaatggaattctaaaaaggtgctagtaacccaaaggaaagtacgaaaaagaaaacagagaaaccaagaacagaggaaacaaagataacaaaaaaattctatggaagacctaagacttaatatacaggtaattacattaaatataaacagtctaaatacactaataaaaagatagattagtgagtgaaacaagccaggcacacaaagtcaaatatcacctgttttcactcataagtgggtgctaaaaaatgtgtacacatgaagacagagattggggtgacagacaatgaagacttggaagggtgaaggagtatgagggggtcatatgataggtaattcctaattgggtacaatgcgcattatttgggtaatggataccctaaaagccctgacttgaccactatgtaatctatgcatataacaaaactgcatacggccgggctcagtggctcacgcctgtaatcccagcactttgggaggctgaggtgtgtagatcacttgaggtccagagttcaagaccaggtgggccaacatggtgaaaccccatctctactaaaaatacaaaaattagctgggcatcgtggcaggtggctgtaatcccagctactcaggaggctgaggcaggagaatcacttgaacccaggaggtgaaggttgtagtgagctgagattgctccactgcactccagcctgggtgacagagtgagactccatctctaaataaataaatcagcaggtatttataaacataggccagataatgtcacttctctgctcacaaccttccactggtaccacatctcacagcaaatggaagccaaaggccttacaatattagcaacagccccagctttcaggccacaaaattcatcttgaaactgtagcctactgagtattcttaacgtaaacatttccttaatataaagcagtatatattcgctgtagaaaaactgaaaaatataaaacatgtaaagggggaaattacttataattccacagtctaaaatagccactacactggtttttttaatatatatatctttttgtaaatctagtttttacaatttaatgatactgaggcaaacaaatttgccacatccataaaaattttgaaatcaaatagaaataaaataataaaaagacagattggcagagtaggtgttttttgtttgtttgtttctgtttgtttttttaaaaaatagaaccaacagcaagcatagtggctcacactggacgctgaggtaggagggagcccaggagttggagaccaacttgggcaaccatagcaatgtagcaggacgagccgcagacaaaactcagacaccgagttaaataaggaaggggtttattcggcggggggcattggcaagactcctgtctcaagagcagagctctccgagtgagcaattcctgtaccttttaagcgctcacaactctacgggggtgcgcgtgagagggtcttgatcgattgagcaagcagggggtacgtgactgggggctgcatgcaccggtaattagatgggaacaaaacaggatagggatttccacactgcttttctatacaatgtctgtaatctatagataatataaccgattaggtcaggggtcgatctttaactaccaggcccagggtgtgatgccgggctgtctgcttgtggatttcatttctgccttttagtttttactttttctttctttggaggcagaaattgggcataagacaatatgaggggtggtctcctcccttagcaagacttggtccctacacatttttttttttttttttttttttttttttttgagacggagtctcgctctgtcgcccaggctggagtgcagtggcaccatcccggctcactgcaagctccgcctcctgggttcacgcctttctcctgcctcagcctcccgagtagctgggactacaggcgcccgccaccatgcccggctaattttttgtatttttagtagagacggggtttcactgtgttagccaggatggtctcgatctcctgacctcgtgatctgcccacctcggcctcccaaagtgctgggattacaggcttgagccaccgtgcccggcctgcattttttaagtaaataatttttcctctttaggcctcatctggtttattttttattttttgtaagatttaaactcagacttaaacatttaattttatccatgtgtgcatatgaacctcttccattacttccaacaggtcagcattgtgtaaactacacttcagttataaaccttgttttgagcagccaggttgcagcccatacaatgttcccagtgaggacttcctcctacctatttccctccatctctgagcgagcgtggacttgctgcacgggggggtgcacacttcatgctctatgtgctgagggacttccctccggatccgaccttgttaatatcccagttgtgagtgagagcttctgaagctccacaggttaactggaaattaaattgcagcgttagttgtctcctcagaactcactggtttcatgcctcactcagaagtaactgcacaattccagggcgtccacaggaacctacaggttttgcctacccctgcccgcgactggctgatctccaaaccctctccctggcttcccgctggctgctcctgccactcccgtcgtgttccgccccaagcccctttgctttgctctctgctcctccaggcggttcctcccacacagacgtgctgggctccacaggggcgccttttgcctcaggtggatcagaacatgtgttcgtgtgactctttttttttgttttgttttgtttttgtttttgtttttgttttttgagacaagtctcgctctgtcgcccaggctagagtgcagtggcgcgatctccgctcactgcaagctccgcctcccgggttcacgccattctcctgcctcagcctcccgagtagctgggactacaggcgcccgccaccacgcccggctaattttttgtattttttagtagagacggggtttcaccgtgttagcccggattgtctcgatctcctgacctcgtgatctgcccgcctcggcctcccaaagtgctgggattacaggggtgagccaccgcacctggccaatttttttttttaatttagccaggtgtggtggcagacacctgtagccccagctacttaggaaaatgaggcaggaggattgcttgaggccaggagctcaaggcttcagtgatctgattgtgccactgcactccaggc

SEQ ID NO: 829 - DNA, 41206 bp, Homo sapiens
ttttgtggaaaataactttattcatgactgtgtttatcacactatcttatggagaagagatgatcaataaatatttgctgaataaatgaatagcagttacaaaacacttgattcatatggaattaatgttggttctcaaagtgaaaaattacaaacagcactgatattcagccagtatacaagtctggtcacagcagttgtataatactgaaataccccctgccactgacctttggcccccagatgcctcccactgccactgctctccccactgggaacccctgaagttcccacaggctcataactaaagggctaatgtcttgcacagcagcgagcacccaggaccgagcagccacatggccgggtctgctggtgaaagcatccattctgactgatcaggacctgaggggcctcatggttacatattttgataatatccctaattataaataaggctcagttatatagtttgaaaacaatgcttctcctcattgcaaaatctcttagaagactccgtagatccaggaacggaaatggaaaatgacagcgtgtcaatctctgaaggttttgggcatttccattagcactccatcttcatgtaaaccagaagatatgcagtttcctgcctagagagaagagaagacacatcagcacagcggcatgaaaccttcatcagaaaacaatgcttcattaatccgtgacaggacaagcgtcagcaaacttccaggcggctggattaggccttcatctatccatcaccttggagaggaacaaaataggtggcctgggaagataagcactatgtttctattagttaatatctaaagcggaggttaacaagctatggacacacaagccaaacccagccctcttggggttttttaaatctactttcaacttttattttagattcagcgggcacatgtgcaggtttgtcacgtggatatgagcatactccccaacagttggcctttcacccctcccctccctccccatccagcagttcccagttgttgccatctttaagtcaatgagtccccatgtttagctcccatttataagagagaacatgcattatgttttgtttggtttttgctggtttttttttttttttttttaatggagtcttgccctgtagcccaggctagagtgcagtggcacaatcttggctcactgcaacctccgcctcccaggttcaaacgattctccctcctcagcctcccgagtggctgggactacaggcgcccgccaccacgcccggctaactttttgtatttttagtagagacagggtttcaccgtgttagccaggatggtctcaatctcctgacctcatgatctgcccacctcagtctcccaaagtgcagggattacaggcgtgagccaccgtgcccagccttttgtttattttttgacgagaccgttcttgctctgtcaccaggctggagtgcactggcacaataatagctcaccacagcctcgtgctcctgggctcaactgaccctcctgcctcagttttagcttcctgagtagctaggactatggatgtgtaccaccatgcctagctataataatttttatttttttgtagagatggagtcttgctttgttgcccaggctggtcttgaactcctggcttgaagtgatcctcctgcctcggcctcccaaattgccgggattaaaggtgggagatcgcacccagtctccaaccctctttttgcaagtaaatgtaactggaccccagccatgctcatctgcccatgtactgtctacggctgcttttgctctacagggcagagttaagtggttgcaacagacaccgcacagaccacaaagtctgaagtactttctctccagccctttacagagaaagtctgccaacctctgatctcaataacagggaaatcaatgacaaccacaaagtgacaaagattgggtgtctaagatggatgttcagaataaacaagagagaaagatgaaaagtagaaggaggatttcaaacgcaagcttcacctaatccattatttttcaaatgaccaggcctatctctgtagctgaaaatcacctcaaataggatctctgatatacagtctccaaaagctcagctaagaaacttacaaagtctctctgccttaacttcatccaccttttttctctccagcttctcctcggtagttaatgattataaaaatatttattggctcatgcctgtaatcccagcactttgagaggccgaggtgggcggatcacgaggtcaggagatcgagaccatcctggctaacacggtgaaaccccatctctactaaaaatacaaaaaattagccaggcgtggtggcgggcgcctgtaatcccagctactcaggaggctgaggcaggagaatggcatgaacccacgaggcagagcttgcaatgagctgagatcctgctactgcactccagcctgggtgacagagcaagactccatctcaaaacaaacaaacaaacaaacaaaaaaacagtgtgatggccaggcgcagtgttcatgcctataatccaagcactttggcaggctgaaatggatggatggcttgagcccagcagtttgagacaagcctggcaacatagcgagacctcatctctacaaacatttttttaaaatatgccaagcatggtgtacagactgtatgcctgtagtcccagctattcaggaggctgaggtgggaggatcacctgtgcccaggagttcaaggctgcagtgagctatgatcacaccacagtgctccagcctgggcaacaaagcaagactccatctctaaaaataaaattaaattaaaaaaaagatcttcgctgtaaaagaggtatgctcaaatgcaataaaagcatataagaaggccaggtgtggtggctcatgcctgtaatcccagcactttgggaggctgaggcaggtggatcatgaggtcaagagactgagaccatcctggccaacatggtgaaacaccgtctctactaaaaatacaaaaaacaatcagctgggcgtggtggcacacacctgtagtcccagctactcaggaggctgaggcaggagaatcgcttgaacctgggaggaggagccaagtgtagtagccaagattgtgccactacactccagcccggcaacagagcgagactccgtcaaaaaaaaaaaaagaaaagaaaagaaaagaaaaccatacaagaagcccctacgaatctgggtgaatcagcaaaggcttcacaggataggaaaaggccatgagtatgaaaacatgagtggggagttggcctagatggtaaacgaggagaggacaatacggccaggaagtgcatgtgcacagcagacgggagatggagggcacggctgattggcagctacctgtactttaatattcctggagtgtgacgtgtgaggcaaacatggggtggtggggtgagtgctggagatgaggcggacagtgagccatcagcatgttagtaacaggggaatccatgggcgtttcatgcagctccaaggaccctatgtgagctcatcagactccaattacccaaatctgtttcttaccagtggtagttaggatttccgtaggtacactggatgtcttcccaggacacctggaagccagaaacaaatggggtcaagcagccagctgacacaagcacccacagaggacaggatgctataatgtgcccctcatcctccagacaagcccacccctagcaactcccaagagcctggagcaacagcagcaggatgtcttgtgcaatgaagtatgtttagtgcccttgtccctgtgtttaaacttggtcatgcttatcccagaggcctaacttacatatttctaacactcgttgctctctagacatttcccacaaagcaggaagctgcagagcatgagcctagagcaccaaaaacttagaagtgaagtgaattgaacccttacagaggtgcaaaccacatggggacttcagaccgaaaaaggcttgaaccctcatcaaaggccccacacccagacagcaggatcacagtgtgtcttgatctcagagacccacgcagccctgagcccagcatttgctagaggtggccaatccagggcaggaggcaattgtggatgatgtttcttaccaagcaaatattggagtcattgaagcagaaccattttccatccacagcattccggatgtagacacagtaatgaccggagtctgccattcccacgtgcgcaatcacagcaaaaagctcatactgccctccagactggaaagagacaggcacgagacagttcacccaccaccacaaacacgactgcctcacacatttatacctgcccacactaggcccgactctgggactttagaatattagaaaacagtcccgacccacagccagtgggcaccctccaggaggggctttcccgagtgtggatcctgaactgcgaaggctcagcagcttggcagggcagagcacgcaagagatggaaggcaggtcatgagagaggcccccaaagccaaggcaagattagaactttcccctgggaggggtggggatcatcagaacacagttctgtttctccacaagcccaggaatgaccctaacctgagccaccgtacccagccaaaaaagtcttttgtagggggaggggagacagagggcaagggcggcagacgcaaagctgagtcacccacagtggaggctgaaattatccctatttccatttgcagactttgtgcagaactttacaaaatgcagggcaatatctgtatctaaatattagtttacaagaaataaaagggttacaggaacatgttaaaagatatcaaccagccagtgctggcatatgaaaaaaatattcaaccaaatcaactgcaaggaaaagaaaaggagcggaaatctaaaaggaactcaagaaaagaaagaaacttaaccaaatgcaagtgtaggcgttgtttggatctagagtcaaacaaaccacatagattacacaacagtcaggaagtctgaacgttgaccagatatttgatgctattaaggaattgcaagatggagatgattatcttttgagtgcttattctttagggatacataatgaagtgtttataaatgaaatagtatgatgtctgggatttgcttcaaaaaaatccagtacagggttgggtgaaacaagagggtgggttataggaaaagcaagacctgccatgagttttggtaactgttacagccaaggattcactgtctaactcttccttcactacacactttggtatctatttgtaatgttccataacaaagtcttttttgttgttgttgcaaagatggagtcttgctttgttgtccagctgggctcgactcctggactccagcaatcctcttggcctcccaaagagctgagattacaggcgtgacccactgcatccagtcaaaaaagtcttttttaagtgaaaaacaattttaaatacacttcattgggcagaatctgcaggtagaaataaaaagaactagaaggaaagaaaaagagaatcctatgaaatgtatacggcctaagtaggtaaagaaatcatgttataataggagctattgtaacatattatcaggtcttaattttctaaatgtcatggttctagagcataaatagccaaacagaccaataaaacagaagagacactccaaaaatagacccgtacatacaggaatacaaaatttgttatgtagcatttcaaatctatggaaaaaaagatatttgtgtcttttttttttagtttttcttgttttgtttttagagacggggtcttgcgctgttgcccaggctggagtacaatgatagatcatagctcactgcagcctcaaactcctgggctcaagtgatcctccaactcagcctcccaagtagctgggactaaaggtttgtgctaccacacccagctaatttttttttttttttttgagagacgggggtctcattatgttgctgaagctggtctcgaactcctgggctcaagcaatcctcctgcctcagccttttgaggtgtgggatcacaggcatgagccacatcacctggccttgtgtctctttttttctcagaatctcttgataagttattatctcaggacaagtgaattaaactttactctgattaaatgtggtccagtcaactggctactttatgattatcctcaaagtgggcacaggccatctgaggaagaaagtttggttggtactatgaacccacaatgacatgtttgcctatgcatttctatgtattccacattatttccaaagaagcctactgaattctggattctgtccctcagtgctgtgaggcatatgaacacaaatccaatatttagaaagaagaaaggcttttgaggctggggacagtctctgaggaacaggtggctcctagcagactgggggtgaaggaagggaaaacagaaaggacatggcatctggggagaggcaggatggcaaggaggtcgggatcatcccacctgctcctcagcatcacaagactctcgcttcattggaaggatctggctgaaatccaagctctgggggaagtacagggagtggcagatctttctcgtctgtgaattcctgatggagaatcgcatgaggtggattgtcagggtctggggcaaatgggtcagcttcaagacctgaaaaatcaaaatcactctggagatgaagtctacttggaatgagagagtcagagaaatgtcagggctagcaacgcgttcttcccaaaaagaggggagcggggcgacatcacggagttcaaggctcctgttcgccgaatctgctgagctcctctgagaataatgcaaaacttggctattctaccaccatgtggccccccacaagaggcacaagggcacagggctctgcacaggtaccaggacccagggagccaccgcgtctgctccagggagctggtctcgcctggagggaaacgccctgccggctgctctcaggcgccctcctgcagtccctctcagtgatgcgacatgagaagccacatccacggctccagatatcagaaccacagcgtcccagatactagccagacccagattccctttctcacccaccatggggtgtcctcggggcctctgatgattctatcaggaaatccacggggggcaaccccagactagtgaaggacagatgacccctgaacagcacgggtttggactgtatgggtccgcttatacacaaattgttgtaaataaatacagtctgccctcccccataggcacgagttccacatctgcaaccaaatgctcatcaaaaataaagtatcccagatgcacaaccgcatagatgagggactgacttttcctatacgtgggttccacagggccgactgggtgtgacttgagtgtgtgtggattttggtaaaagcaggggtcctggaacaaatcccccatatgcaccgagggacagctgagtctgatttagggaatgagtacctgtttcccacgggtcttcttcccacagttctcacagaagcacttgcttttgcttgataactccctgggctggaagaagcagtgcagggcgtcctcctgtcccacccaagagaacagggaaaaagcagcgttggtatttcccacctagaatactatattcatctgttctcacactgctgtgagacaatagctgagactgggtaatttataagaaaagaagtttgattggcccatggttctgcaggccaaccggaagcatggcagcatctgcttctagggaggccgcaggaagctcccaatcatggcggaaggccaagcaggagcaggtgtcttacctgggaggagcaggtgtcttacctgggaggagcaggtgcaagagaccaagtggggagctggagtgcaggggcgcgatctcagttcaccgcaatctccgcctcccgggttcaagcgattctcctgcctcagcctcctaagtagctgggactacaggctgcgccaccacgcccagctaatttttttatgtttttagtagagacagggttttaccatgttggccaggctggtctcaaactcctgacctcaggtgatccacccacctcagcctcccaaagtgctgggattatgggcgtgagttaccacacccagcctggctccacacttttaaacaaccagatctcatgagagctcactgtcacaaagacagcaccacgggggatggtgccaaaccattcacgagaaaccctcccccatgatccaatgtccttccaccaggctttacctccaacactggggattacaattgaacaggagatttttgggcagggacacagtcccaaactgtatcagttacagcctccccacactttgcagctgagggtttcagcttttcttctggttctcctcatatcccccttaatgcctggcctggtgtggtccacttggcaggatctcaaagggcacctactgactggaggaacaaaacaggagggggctcctattaagggagcagtatgagggaagtggaggtaggagggaaaaacatttttgccaaacaaaggagaaattggccagtgccatgaaaatgaaataagtgactttccagaagccagagatagatcaaagaggcaagggggaattggccacactgtgctgtgtggtgtaatggtttgagggtttgtcctccccaaaacccaggttgaaactgaatccccagtgtggctgtatggaaaggtggggactttgagagataattggggagggcaaggtggctcatgcctgtaatcccagggaggctgaggcaggtggatcatgaagtcaggagtttcagaccagcctggccaacatggtgaaaccccatctctactaaaaatacagaaattagctgggcatggtggtgggcacctgtaatcccagctacttgggaggctgaggcaggagaatcacttaacaccagaggcggaggttgcagtgagctgagattgtgccactgcacttcagtctgggcaacagaggaagactctgtctccaaaaaaaaggggggggggaggttattgcatcatgagggcacagccctcataaatgaattaatccactcatggattaatgggttaatcggttatcctgggagtgggactggtggcttcatacgaagaggaagagagatttgagctggcacattagcatgctcagccccctcgccatgtgatgccctgcactgcctcgcctcaggactctgagagttcccaccagcaagcaggccctcaccaggtgcagcccctcaaccttgacttcccagcctccagaactgtaagaaataaattacctagtctcagatattgagttataacaacagaaaatggactaacacatacaggggcagcaaataccaagagaatccccttaccagtgtcttcaggggctttgagtccacatcaaaaagagaaagtgggagggtgagcatgctgctgtttctgctactctccatggcacagtcaacgcaaatcaaggagtccttcacccggatcgtatacagggcctgcagtctctccacctgcaagagggagagcggagaggtgagatgggaacaccaccataagccaggtcaggccaactgccagaaggtggagccaagagacagaagctcctcacaaaggtgcaaaataataccagtaacaatattatgaaactgtgataagtgttttatgtggattaactcttttttcttttttttttttttttttttgagacagagtctcgctctgtcacccaggctggagtgcagtggcgcgatctcggctcactgcaagctccgcttcccgggttcacgccattctcccgcctcagcctcccgagtagctgggactacaggctcccgccaccacgcccagctaattttttggtatttttagtagagacagggtttcactgtgttagccaggatggtctcgatctcctgacctcgtgatccgcctgcctcagcctcccaaagtgctgggattacaggggattaactcttttattcctctacacactacgggaacaacagctgaatgagtgaaatgagcagcatcttaagcttccgagtgctctggttctaggttcttaccaagtgcacatcagtgatctggtccttaatcaggttccagagtttgaggtacagttgggcagcatcatgttggacaaacactggccacagagaaaaggaacagccaattagtgaggtcttcagagtcgcttctcatgccctggtacttagacacacatgaacactcatcactttgtctcttcctagccctccaccccactgcaaggctaagttggcacgacagaagaagtgatcaataaatgaacagtaagtttggtattgatttttgagaacgcctcttaaaacttaagctccagtgccagatgtagtggctcatgcctataatcttaacacttcgggaggccaaggtgggaggatcgcttgaactcaggagtttgagaccagcctgggcaacatagcaagactccgtctcgataaaaaatttaaaaaagtacttgagagtagcggtgcacgcctgtagtcagagctacttgggaggctgaagcaggaggatcactggagcccaggatgttgaggctacagtgagctgtgatgtcaccactgcactcagcctggggaatgagatgtccacagggactttgaaaagcactgatacattcctgaggatctagaaggccaggcgcatgcccaagtaagacctgagagggctcagatccctcccctctggctgacaacaaggccacatgcaagaaagcaatgaaggcgaatacagaatcatgaactgcccagaaacgataaaacagcaacaacaacaaaccctgctgtggggatctctgatgtccagtgttgccaccttacattatctaaaatgttcattttccaacaaaagagacaagacctacaatgaaacagaaaagcatggccacccaggaaaacagcaatcgtagaacctttcactgagaagccctagatgttggcgttactaaacaaagactttagccgttataatatgttcaaagaactaaagaaaaccatgtcaaaagatgtaaaagaaagtgtgaaaatgctgcctcaccaaataaaaagtatcaataaagaaaaaactataaaagaagaaccaagcagaaatcttgagttgaggagaaccataactgaaatgaaaaatgtactagaggaggtcaatagcagattagagctggcaaaagaaagaatccataaacctggagctaggttgattgaggttctccagactgaggacggaaggaaagctgaacacagtacctatgcagcgaaaagctgaggagctgctcactgcgtgtagagctcaactaactctgatacaaaaaaaaatgtgatacaaaaggttttatacacaaatgtgaatttattctgaagccagcctggggcaaggagcaagacacatcctgccttttaatgtgccatttctcctttggaggagagaggggcattttcataaggtgtgttgtgggggtggggggagtgagcaatggcggttttctaccgggcagttatcaagttcccagcagctgagttggcgcctttccgggcagaaaagtggccgagtgggcatgctttctccatgccttcctagtgggtgaaagacaaacccctagagggtggaagtttcgaagccaccccctggcagggagagttccctggtgggtatgctttgggctgcaaatctactgccaagtctcaggaaagatcagctggaagaacttgcccgttctcaatcaaacctccatcagcctacctccatttacagattcttccttttgcccagcagggaatgtctggagaggggtaggcgaaaggtgatatttgcatttctaaagggctaacaggaaacaggaaacacggccgcggtgaggggtgagggatgggaagaggagaagtgaaaagaaagtaataagaaaactaatataactatctcttagaaaatgggagtactcagttacacccagatgggttcactagtgaacgatgggttctaccaaacatttatgggaaaaattataccaattccctacaacctcttccagaggacaaaagcagagagaacacttcctaactcattctctgaggccagcattatcctaacaccaaaaccagacagacattgtaagaaaaaaacctaaaaaccagtatctcccgtgaacataaatgcaaaattcctcaacaaaatattagtgaatcaaattcaactatgtataaaaagaatcacagagggtgacacaagcgagatggtagagaaggaggctcctggtgctccccttctcccatggacacacggtaaaactctcatctacacacagatcaactccctctgaaagaaacccagaaaccagctgagagaggcctgcacagggggcaatggggagaacacccacatcgcaaccggttggaaaagctgagacacactcgcaccacaagccccaccccagacacagtaccttactgtgaggaaggaatccctactcccagctttctcctggagaggggagggtttggaccacacataggcagccccagcttttgcagttcccactcaagggcttggctgctgggtcacctagctctgggagcagacatgggtcagcagttatgaatcctctgcgaccacagagggcaaagaggcagttttaaacgggcacgtgagcacttccagcagctgtgctcagcacagagcaaacaggcagaaatgccaggcttccagtttctccctggaaggatatgtctgcgggctctcctagctgttgcccgagggatgggcttctattaataactggcctgcacctggagccaatgaggcaggtaaacaatagatttccaggagtctggacaggcctgtgggcaagtcccatgccttctcccaccccctgctgtatggtaaaatcaggtctctaacttcacacattgagtacacatttacccctctcaaatgaaggtctagctcctcgaccaccgagctttgggagctgacaaggctctgtatttgtaagtcccacaggggcacagagaccaaagaacatccccccaggcccagtgcagcgtgaacaggcaaaaaggcccggctcctactttctccctagaaggagtttgtctgcacagtgcagctgctgccctggggtttctatgcatctgggagctgacagagcaggaaaccagtgctcctctgagaccctgaacaggcaggtgagcacctccacagctgctcccactggtttgctcaacagatagcgtcaagcttccaactaacctgtccgtctctaagcagagagcagccagcattcgctaggcccctgggggtgacaaagagtaaaacaatgcgtgaaggagtgtgcagtttcaatatgagtgcaggcacttgccacagatcctctgtccagcgttttgcagagcaagtggcggattaactcatgctcccagcttttccctgaggatagaataaactggaacacacatttaatgccccaacgtctccacctgcacctcaaggggctggtttctatctcccctgtctagggcactgacaggacttgacacattctaatctcctgagggccgctaacaacatagatgacagtctggacaacacaaagggtcaacaggtgctccgagtgtccggcagggctaattggtaagttcgtctcttatacaaggcccgtgggacaagactgggagaggtatttttctttttttcttttttctttttttttttctttttttctgagacagagtcttgctctgtggcccaggctggagtgcagtggcgcaatctcggctcactgcaagctccgcctcccgggttcacgccattctccttcctcagcctcccgagtagctgggactacaggcgcccgccaccacgcccagctaattttttgtatttttagtagagacagggtttcaccgtgttagccaggatggtctccatcgcctgacctcatgatctgcccacctcggcctcccaaagtgctgggattacaggcgtgagccaccgcgcccagcctgggagaggtatttttcttaactaaagtacagaaaataacagagaatcaagaacaatgaagaaacagagaaatatgttccaagcaaaagaacaagataaatctccagaaaatgcccctggtgaaatgaagataagtgacttaccttacagacaattcagaataatgatcatgaagatgcttaccatgtctaggacagcaatgcatgaacaaagtaagaatttcagcaaagagacagaaaaaagttcaaaagaaataacagagctgaagaatacaataactgcaataagagctcaaaagagaagctcaacagactaaatcaagcagaagaaaggattagcaaactagaagataggtcactggaaatcattcagaggagcaaaaatgaaaaagaatgaaaaagagtgaagatatcttaagagagttaggggacatcaagccgaccaaaataggcattatcagagtcccagaaggaggagagtgagaagagatggaaagcttatccaaagaaataacagtcacgagttgcagatcaacatttcagtcaatggcagaccacatgagcacagtggccatagcatgcagcctagctgtgtagtaggctgtcccatctaaatttgtgtaagtgcactccatgatgtccacacaatgacaaattcaccttctgatgcattttcagaacgtatccctgttggtaagcaacgcatacctataatgactgaaaacttcccaacccagggaaggaaatacaaatccacatccaggaagcccaaaggacaccaataagactgatctaaagcaacccacatcaagacacatcataatcaatttcaaaagttaaagacaaagaattctgaaagcagcaagagaaaagcaatgtattatacacaagggaaaacccgtaagtgtaggatttcttctgggggtgatgaaaatgttatgaaattagattgtgatgatggaggcacaactctgtgaatacactacaaacctttgaattgtatgtttttaaatggatgaattttacagtatgtgatgcacaacccaatatagctatctaaaaaaaaaaaaaaaaacctaacctatttgtgaattattttgtagaacatgttttctcttttttattcctttattctgttttcctgcagttccctgactgtggtggaataagcttggaggagatgccttcacttactctactgagaggcagagaaaggttaggtatggaagtaaaatgtccataaataatatcaattctgcacctccaaagatgtgtgcctcttacacaaatgtctctataatctgaggggtccaggctacctaacttgcttcttgttgcttcactgcccgttagttcctctcttcactctctaagcttcccatcccctttggatcagcagccaggagcccagtgggagggtatcttacagggcacgttgcacttctgcaggcagtaggccagctccaggggccgcactgctttctgccggctgtcctgcatcttctccagcagcagaagcatctggaaagggacgcttctcctctgctcgtcagctcccctgggcaccgtgatcctgccacacaagaacagccagaaacctccttacatgtagttctcaaagctaggtgcacactggaatcacctgggagaaattttaaatcttcatatccaggccactcccatacaaattaaaccagaattctgggtccggggggcggggcgcgggcagttatcagaatttttcagttcctcagattatttcaatgtgtggtcaaggttgagaagcaccatgtgagtgaatctgctctacaggggaccctctagagagggggatcagcatgactgctgccttggcccctctgcaccctgcccagcaatcgtgctagagcagacggcagatgcacgaggtcctggctccacatctcgggcaagcagcaaaatgtccagcctaaagctctccagactgcagaggcacatgctgggttaggtcctgggaagaaaggcaacatgaaaggctgtccgtgtggtttggcaatgattcatttaatcacaggcatttttcggatgggaaaaaggagagagcacagggcagaaaaggagtgatagagagagacagagggagagagtgcattgtgtgagtgttggtggaaggaggggtgtgtactccccactgacttactccttctccgactttggtctagtcccaactctgtcttttaaccaagtcagtggctgtcaatcctggccgcatttaaaatcacccaaagagggctttaaaaaagtaccaatacctggccgggcgcagtggctcatgcctgtaatcccagaactttgggaagctgaggtgggcaaatcacctgaggtcaggaaattgagaccagcctggccaacatggtgaaaactcatatctactaaacatacaaaaattagccaggtgtggtggcgggcgcctgtaatcccagctacttgagaggctgaggcaggagaatcccttgaacccgggaggcggaggttccagtgagccgagattgcaccgtcgcactccagcctggggacagagtgaggcttcatctcaaaaaaaaaaaaaaaaaaaaagtaccaatacttgggtcgcaccccagaccaacctaagaagttttagaaataatgtgtaggccagaatatgcagaagccaatctttcctctgccagcttttgagagaagatctcaaaaagtccaagtcactgtgaataactgaatatattaaaaatgaaataatacaggccaggtgcagtggcttacgcctataattccagcactttgggaagctgaggtgggtggatcacgaggtcaggagatcgagaccttcctggctaacacggtgaaaccccgtctctactaaaaatacaaaaaaaattagccaggcatggtggcgggctagtcccagctactcgggagactgaagcaggagaatcgcttgaacccgggaggcagaacttgcagtgagccaagatcatgccactgcactccagcctgggcaacagagcaagactccatctcaaaaaaaggaaaaagaaataatacaaatgctcatcagcctgaagaacagtcttacctcttcaatatcctggtgaagtccacattcattacgaacacctgaatcaaggagttaaggcagcaggtctgtccaatgttgtgtaaaccaaccaggcctataaggggaagagaaaaaaatgctgagggcaaggcctagggtaaagaagttgacaaggctgggcatggtggctcatgcctgtaattccagtactttgggaggccgaggtgggcggatcacctgaggtcgggagttcgagaccagcctggccaacatggtaaaaccatgtctctacaaaaaaaatccaaaaatcagccgggtgcggtggctcacgcctgtaatcccagtactttgggaggccgaggcgggcagatcacgaggtcaggagatcgagaccatcctggctaacacggtgaaaccccgtctctactaaaaatgcaaaaaaaattagccgggcgtggtggtgggcgcctgtagtcccagctactcaggaggctgaggcaggagaatggtgtgaacccaggaggcggagcttgcagtgagccaagatcacgccactgcactccagcctgggcaacagagcgagactccatctcaaaaaaaaaaaaaaaaaaaaatccaaaaatcagccaggtgtcatgacaggtgcctgtagtcccagctccttgggaggctgaggcaggagaattgcttgaacccaggaggcagaggttgcagtgagccaagatcatgccactgcactccagcctgggcaacaagagtggaattctgtctcaaaaaaaaaaaaaaagttgacaaaaatctaatgtttttcttaaagctactaaggacatgaagtcctgtaaagtctctcaagtacgaagtgttcattcagcttgcaaacaaatcggagagaagatatcaaacatgaatctttaaaaagctctatcacaagggccaagcacagtggctcacacctgtaatcccagcactttgggaggccgaggcgggaagaccacctgaggtcaggagttcaataccagcctggcctacatggtaaaacctcatatttactaaaaatacaaaaattagccgggtgtggtggtgcatgcctgtaatcccagctactcgggaggctgaggaaggagaactgcttgaacctggcaggcagatgttgcagtgagccaagatcgtgccactgcactccagcctaggcgacaaagcaaaactccatctcacacacacacacacaaaaagttcgataacaagaaaagttttaatatagtccattaggaaaagtgagatgtcaccaaaagtatatattactcactgccaaatgagtagtatgagcaattgttgggagagaaaaaaaaacattagagaaagcataactgagaatatggcttcctttcattcaaatcgttctccacggagctaagtccaaatgtgcatctgtggggctcagggataagagggactccccagtatgtctatgttggagtccagcggagaggtctctgcccagttcccactacagggaggcaggaaataaatcagaaggttactttggggaagattcacctaatccagtgtcaccctgagaggctgaaaggcagaaggaacttataagaatacgagaaaaacaaaagataacatttgtctgacccctagcaaccaacctcctcttttccaacccaaccttaggctcagcagaccccacaagggaagtaccactaatctcaggattcttggggaaagggctttggcttacaagataggacagtaagaaagtaacaacctggggtcacaggtgagcacagatttctactcccagactatcaggagcacattgcttccagacagacccatacaaaggtagcagtaaagatgggaactaatgctaagtgcctctagaatcccagcactggcttaaagcagtttccacagatgaccccatttaatcctcccaacaaccctatgtgcttggtactattattacccccatttgtttgtttgtttgtttgagacagagtctcactctgtcacccaggctggagtgcagtggcgtgatctcagctcactgcaacctctgccgcccaggttcaagcaattctcctgcctcagccacctaagtagctgggattacaggcacctgccactgcgcccagctaatttttgtatttttagtagagacggggtttcaccattttggccaggctggtcttaaactcccgacctcatgatccacttgccacggcctcccaaactgctgggattacaggcatgagccaccgcgcccgaccttgtttttgttttttacagatagggtttcactatggcccaggctgtatccccatctaaaagatgcagaaactcaggcacaggaaagcatgagccgtcgaatacaaagctctgcggcttcagagcggagggggtgagccgaacatttacatgcagtcaagaagaggaaaacgggaggggtctaatgaccatgagggtagtcccaggccctgggacgctctctgggctgctctctcttcatgttgctgtcttcttccttcttttcttcaagatctgccggggactgcgaggactcagccaggatggactgacagatttgcctcaggagcccaaacgccttgctcattcgtgatcactccaaaacccccaggccgcagctgcctggcccgcgttcaggacagcacgacttcacttccaggaagcgcttatgtgagccaggcacgatggaatctctgtgaaaatacaatgcgggtaggcaagaattagagaaggaggaatgtgtattcatgtaatccgttctgatgccaaagagcaggtcttagagggagataaatgtttggggagactgactcatagagctctaggctggaaatgacagctaggctacacatcccctaacctgggtcccaggcgtttccattcatcctcagagccgactgccaaatcctaaccgggagcgccctcttgggaaaggacagggaagcgcgcataggactttgctttacaacccaggaccaggcccacttcagtaaaaagccagcactaagcaagaactctcagcccctgatgccaggctggcatacaggggaagcctctcaacccgcccaacacccaaggggacctgcggccctggcagaacagcctcgtgttctggcccgcaacactgccggccagctgcagcagtcagataaaccttagctgcaggcaggctgtagctacctgtcggccttaggcacatcctggtgctgggctggtctcatggcatgaattctgggggtgtgactcaatattgtctcagcctcagtggccataggggtacccgtgtaccctcccccaacccagcacagctgtgtgaagagagacactgtttgcttgggggaagaagaggtaagtggagtacttcgccttggaacccagtgtgtccggaattggtgggtgcttggtctcactgacttcaagaatgaagccgtggaccctcgcagtgagtgttacagttcttaaagggggcatgtccgcagtttattccttctgatgttcggatgtgttcggagtttcttccttctggtgggtttgtggtctcgctagctcaggagtgaagctgcagaccttcgcggtgagtgttacagctcctaatacggcgcatctggagatgtccgttcctcccggtgggttcgtggtgtcgctggcttcaggagcgaagctgcggaccttcacggtgagtgttacagctcttaaggcagcgcgtctggagttgttagtccctcctggttggtttgtggtcttgctggcttcaggagtgaagctacagaccttcgcggtgagtgttacagttcataaaggcagtgtggacccaaagagtgagcagtagcaagacttactgcaaagaatgaaacaacaaagcttccacagcatggaaggaaacctgaccaggttgccactgctggctcgggcagcctgcttttattctcttatctggccccacccacatcctgctgattggtccattttatagacagccaattggtctgttttacagagagctgattggtccgttttgacagggtgctgatgggtgtgtttacaatccctgagctagacacaaaacgtctccacgtccccactagattagctagatacagagtgtggacacaaaggttctccaagtccccaccagagtagctagattcagagggtcgactggtgcattcacaaaccctgagctagacacagggtgctgattggtgtgtttacaaaccttgagctagatacagagtgccgattggtatatttacaatcccttagctagacataaagattctccaagtccccaccagactcaggagcccagctggcttcacccagtggatcccacacctgggccgcaggtggagctgcctgccagtcccgcgccgtgcgcccgcactcctcagcccttgggtggtcggtgggactcggcggcgtggagccgggagcggcgctggtcggggaggcttggtccgcacaggagcccatggctgcggggtggggaggctcaggcatggcgggctacaggtcccgagccctgccctgccaggaggcagctaaggcccggcgagaaatcgagcacagcagctgctggcccaagtgctaagccccttactgcctggggcttgcaggccggccggctggccgctccgagtgcgggcccgccgagcccacgcccactcggaactcgcgctggcccacaagcaccgcgtgcagccccagttcccgcccctgcctctccctccacacctccccgcaagctaagggagcccactccagcctcggccagcccaggaaggggctcccacagtgcagcggtgggctgaagggctcctcaagcgtggccagagtgggcgccaaggccgaggaggcaccgagagcgagcgagggctgtgatggctgccagcacgctgtcacctgtcaccaggactaggctcactacagtaaaacccagtactgggcagagcctcatcaccctgatactagaccagtacccacaggcagatctcaccccaccctagtgccagatgagaacccacagccccagtaacagggactggcgatctggcccacatcactacctgacaactacagtggccctgggccctgaataacttcagcagcagcaagcacgccatcacagctgtgggtcttgggcgtgccccagtgctgtgccagtctcggcagctatggccttcaggcataacccagggctgtgtcagcctcagtggccaaagaattccaaccacagtgatgctgggcttagagcaccccccagcactacaacagctgaagcagtcatgggcttagggtcctgaccaatcagcctctccctaatctcctatgggtttcctgatgaaagacgagcccaaacaaagccaggcaatgaagactggcttaggtacctatgtcaatgcacagacattgacacacagccataaggatcaaggtcaatcagagaaacatgacatcaccaaatgaacaaattaaggtgccagtgactaaccctaaagatatagagatgaggcctggcatggtggctcaggcctgtaatcccagcagtttgggaggctgaggtgggaggatcacttgagcccaggagttcaagactagcccgggcaacatactgagaccccatctctaaaaaaaaatttagatggtcatagtggtgcacgcctgtggccccaaatactgagaagggtgaaggaggaggatcacttgaggccaggagtttgaggctgcactgaactatgattgtgccactacactccagcctgggcaacaaatgagaccttgtatctaaataaataaataagatgaaataaaataataataatgggtaacatcgaagcactatttcttataaaaggtgaaagccttttatatgtactgtcttatttatccttacacagccatgtgaattaattactgttatatttccatttgacagatgagaaaactgagatacaaagaagtaagtgcctttcccactggcaagtgatgggccagatgtagacaagctggacggggtttaagtccagctaacatgctgctcagagtgaggaataaactcaaccaaatcattggtgggaatgtaaattagtagagccattatggaaaacagtatggagattccttaaaaacctaaaaatagatataccacatgatctagtaatgccactgctgaatatatatccaaaggaaagggaatcagtatgttgaagagatatttgcactctcatgtttactgcagcactgctcataatacccgagatacggaatcaacctaagtgtctatcaaaagaggaatggataaagaacatgtggactatatacacaaaatgggatgttattcagccattacaagagaatgaaatcctgtaattcccatcaacatggatgagcctggagtacattacgttaagtggaataacctaggcacagaaagataaataccacatgttcacactcatatgtgaaagctcaaaaagcttatctcctagaaatagagaatagaaagccaggcatggcagttcacacctgcaatcccagcactttggttggctgaggcaagaggatagcttgaagccaggagttcaagaccagtctaggcaacatagcatgttgcctaaataaaataaaaaatattttattttctaaaaataaaaataaaattagcctagcatggtggcatgtacttgtggtcccagctacttgggagactgaggcaggagaatcagttgagcccaggaatttgaggccacagtgagttatgatcgtgccacggcactccagcctgggcaacagggcaagaccctgtctccttttttttttttgagatggaatttcactctttttacccaggctggagtgcagtggtacaatctcagctcactgcaacctctgcctcccgagttcaagcacttcccctgccttagtgtcccaaatagttggaactacaggcatgtgccaccacgcatggctaatttttgtatttttagtagagacggggtttcaccatgttggccaggctggtcttgaactcctgacctcaggtgatccacccatctcggcctcccaaagtgctgggattacaggcatgagccaccgcgcccagcctggaatatattcttaaattcatgttggatggctcagataacaacaacctctttttcttagtaaatattgactttcaatagttataaacagttgttcttcttacaaggcccagcctaggaggactcaactgaaatgatgacagcagacaattccatcagcaagaaagaggattttgagctcatcattgagggaaagctgatgaaagagagcagagaggttccaggctgcattttccaagatgttgtcctcttctccgccaagacctcccagatacttcagtaggatatagcagtaaaacctcatggagcagatcatttgagcaggctcggtcccaaagggaaacaaaatacagcagcctttcagggtagatcacactggggagacagggaggcggggcagcaaggaaaggaaagtgaagcttaaaaggtctaaggaggatggggagggcaaggcgagcagagagaccgcagctgaagttagcaggggcaataagcatccaccagagaaaacagcctgggcggattccaaggaaggggattttcaaactcaactgctgactcaaaaaaagacccccaggccaggcgcggggtctttgtttgagactctgtctcaaacaaaacaaaacaaaaatcccaaatactaaactaacttagctcccaccctacctgaatttttttttttttttttggttcacgttctctcatgatcttcccgaaatgttatccttaagcttcggggagaggtgagcaacggaaggaactggcccaggcccaccactaaagaagccccaggaccaatcggggtcctcagagaagccccagaagagccaggaacaagctgcagaaaacctggggagggtggggcctccacccaatactccactcacaactggactctctgccaggaaagccaactccaacatttagatgccctaaaaggaacaaaattaacctgccaggaacatgattcaagcagcctcggtgtcttccgacccaccccatcatggcaaccacaattgtagaccgcagtctcgatgacgtgttcacattattttgcatttcttttttctttttttatttttatttttatttttgagacggagtctccctctgtcgcccaggctggagtgcagtggccggatcttggctcactgcaagctccgcctcccaggttcacgccattctcctgcctcagcctcccgagtagttgggactacaggcgcctgccgccacgcccagctaatattttttatttttagtagatgggtttgcaccgtgttagctaggatggtcttgatctcctgacctcgtgatccacctgcctcggcctcccaaattgctgggattacaggcgtgagccaccgcgcccggcctattttgcatttcttgagtaatcgtaatatgcgggttagaacacacggattacaacactttggatgaaaaaccacataatagggaaattttgggactactctctctcaaaaaaaaaaacagctcgtggaaaaactaggacttaccttctttgaaactatgtttatgttaagcattttcccctttgtaagctcatcattgtgtaaaagtgtcagaactgtgcaacacattttttaacagtccaaaagcaagttctttgataaatcaatatgaagccgtgcacctgtgttactctccctcccgttttgttcctgcgaacacatcggtaacctgcattcactctccatccaactctgttcaataccagaaagaaacttcagatgaaatgcttttcagtatttgccttgttttctggaacaactttaaagtacaaattatacctaaataagtacaaattaaagcctctgctttaattttcaaacactttgaacccagattttcaggggtctcaaaatggagttttgtgtttaaaagtctaaatttagctttcttccaaggaaaagggtgtgaagaagagaggttaagactaaaatactctgatttgcagagtttgacaacatccttccaatttctcaatatgaatgcccactgacccagccattccacttctaggaattttccaccgatatatttgtatgaatgtatacataaaattatattcattgccgtatctgtgccagtaaaaactggaaacaacctaaatctccatgcattgtttaaacaatgtacttcccataccatgtatcaggtttttttgtttgtttgtttgagacagtttcgctctgtcgcccaggctggagtgcaacggtgcgatctcggctcaccgcaacctccgctcccgggttcaagcgattctcctgcctcagcctcccgagtagctgggattacaggcatgcgccaccacgccaggctaattttgtatttttagtagagacggggtttctccatgtctgtaactcctgacctcaggtgatcctccctcctcgatctcccaaagtgctgggattacaggcgtgagccaccgtacccggccgaatcagttttttgttttatttttaatgccattaacacatctatatgtcctgccatgaaaagatgtccataatatactcagtggacaaagcaagttcgaaatgattttaaagacttgtacatagaaacatttctgataaggtacaaacaaaaatgatactgagtggaagactgcgagacacatttgtctgcattgtttgaatttttttacaagcttacaacacttctgcaatttctttttttgttttaattaaacacaaagtcatgtcaaaagtccaaataactatattagcttagaaaaaaattcactggcccaaaatatatgcacgtagtaaatacagatcactatcataatttgcagagcacaattattacttaattccttaattatctgactggcataggagcagagttggatgtctgtgctagaaagaaaacttccaaaatgagccccgaacttgcctcaagcgccatgcaagcgtccagcctccgctgctgagttccacgtcgggactgagccggggaccgagctgggaccgaagttccgctccgggcccgccttggtctggccccgcgctcgtggcaccccgcccagctttcgttttccactgaatggaaagcgaaacttacagcggcctccgcgccgggagctgggcgccagcgtgcggggaaaccctgccggcccgagcttcccgcggctgccgttgcagccgcgcacctgctccagacttccagccctcgctttttttttttttttttttttttgagacggagtctcattctgtcgtccaggctggagtgcggttgcgctgtctcggttcactgcaaactccgcctcctgggttcaagcgattctcctgcctcaggctccggagtagctgggattacaggcatgcgccaccactcctggctaatttttgtattttagtagcgatggggttccgccatgctggccaggctggtctcaggtgatccgcccgcctcctaaagtgctgggattacaggtgtgggccaccgcgcccgacctacaggcgcctttttatttgcgattttaaggtccttgcaattagcctacgtgttagagtcatttggcgtttggtagtatccatggcagcattttttctttcttaatgctattgtatttcttggatcgggtgtcttcacatcaccggcctgtggcttggatgcggcacatggtgtaattaggagctcccctgtgggcatgcagatacagatatttctccacttaagaaggggtcagggggcgcggtggctcacacctgtaatcccagcactttgggatgctgaggcaggcggatcacctgaggtcaggagttcgagaccagcctgaccaacatagtgaaaccccatctctactaaaagtacaaaaattagctcggcgtggtggcgcttaatcccagctacttaagaggctgaggcaggagaataacttgaacccaagaagcggaggttgcagtgagcagagatcgacaagagcaagactccgtctaaaaaaaaaaaaaaaaaatggggtcaagtcccagtgaacccatcatgaagtcgaaacatcgtaagtgaaaccacggtaagtgatggaccatctgtgtatatataaggttaagagatctgtaacatgcacaccggaaaggcttattacctctttagagatgtatttcttgtatgtagactcatgggggtaggggcagaagggttatctgctaggggcctcaaactccagccgctggaatttgcgcaggaaagcagggtacaattcccccaaagcgatcattctttctgaaagccgtccccgcagcaacagacaaatagcctccaaaaacccaaagctgccagaacctcactgaagcgttggtagggtctgcagtaaggtacaaaataccatggcatgaagatgtataaacgtgtccataatagggtggatgtgtgttagaagcatgagcacagatatacacatacaggctatccacacgtccatcgtcagcccagactccgcttacattgctgctggaacggaggcagtgtcgcccacagtgcagcatgttctccctggaaggctggtggactttgcgcagtatggtgtttacacaggtacacggtggtgggcgcagggtccgtcctcattatatttgctgaccaatcagttatataaccagcttcatacatctggtaagtcttgtccacaaacaggaacctcaaaaactcaagtgagggcaatgaggagaggaggttgcaaaatttgataaaatatgctaaatacagcaagtcagtagaaggctaaggagcaagctgcagttgcttgcagcaactatcagcagaaaactattaatagtcaatccaatgattctatctgaatcttggtaggtcggtggagcaaagtaattggtgttgctgccccagtgcagaatggacaagggtgaaccttgggttggaggctggactatataatgtaaggatccattacacttctatggggctcttccttccgtccttcatggtaccctcctgaacaattccgtgctaaggccatcaggtgtgtcaagcaaagtgggcgtttgtgtagtatgttccacagtggcccaagcagggtgctggactggagcaggttgaggagggtggcagcacagtggggctgcccagcacaatgtcagacacaaatgggtgctggtgcagcccggcccagggtcacagcccaagcaatttgaagatgtggcacatcccggtattggagtggcccagtgtgtggtgtccagggagggcagggtgctggtggagatgacagattagttacatacagggggatgaccaggtaactgaatgtattaaggataattggagccagagttgaaactctcagagataggagttacaaataaggaaagggagaatgagcccactagtgttgaactggaattggacttagcagtgtggatccatgattttcagtatgtatacacagatagataaagaagtacaaggcgggtggatcacgaggtcaggagattgagaccaccgtggctaacacggtgaaaccccgtctttactaaaaatacaaaaaattagctgggtgtggtggcacacgcctgtagtcccagctactcggaaggctgaggcaggataatcatttgaacccgggaggcagaggttgcagtgagccaagattgcatcattgcactccagcctggcgacacagcgagatcccctatccaaaaaaaaaaaaaaaaaaaaaaaaaaaaagaagtacatgtggaggtaaacatgtgtatacatgcatacatcccctgacttggtctgtagggggcctgggaacagtgacaccccaacagtacatcttgcacccagatcttggtttctaattcccattctctagtaaaaggaaccaatgttgcttggagaaatggctgtttctggggttaaggcagagaaagtacaagatgagcctaggacatcttgttctgccagcaagtaagggaatgctccaagaatgatggggatgtttcaaaacgatgcagaagccagctccaagaccatgctcccactggccaaatttggaacaacttgagcattaaaagaaatgatgatttgttttgttttgtttttgtttttgagacggagtctcgctctgttgcccaggctggagtgcagtggcactatcttggctcactgcaagctccgcctcctgggttcacaccattctcctgcctcagcctcccgagtagctgggactacaggcacccgccaccacgcccagctaattttttgtatttttagtagagacggggtttcaccgtgttagccaggatggtctcgatctcctgaccttgtgatcctcctgcctcggcctcccaaagtgctgggattacaggcatgagccaccgcgcctggcctgaaatgatgatagtaacatttcgacctgttaaataaaatgggaagccacacttcataccaataaaagtagatactgaataaattaaaagtttgatgagaaacaggatatttacacagtttcaaagtactctcccacaaaatacatattattaattaccattattacatacatgtgatacaggttcattctgcccgcatgccataaatccatcactgtgacaggttttgtaaaagagaaaagatttattcgcaaggcagcccagtgaggaggcaggagaacagctctcaaatcttcctccccaaagataagtcttagggatatttaccggtgagagaagcagggtggtgtaaggtatgggcaaaggtgattggcagtgggggaaaatgaggcagtcggtgaccactgcaagcatagtcagggttcgtggcacttcacagggcacatgttcaaaaaatgacagccttagcgtgatctgagggtgtcgcttggggcctctgatgtcaaaaggccacttcttttgtttgcacaagcctacttgaaagctcacggtctcaactggtttgaactaggcaggagctgccccaagttcctgaaaaacaatttgaacgatcatgacagtagtgacatacatgttatctgtaaggaagccggcaaggttaagttacagcgctcagtggcgcggccttcagcttcacagaaaaaaaataacaaaagcaagtgacccaaagcaagcagggcaggctaaattgggcagacctaatcagatgaaccccatggtctcatatgtaatattacattataactataaagaatgtaattaatgtaaatattcggtacaagaaagtcatcagtgcggggaacactggaattgcgtgccaccagaggacagagtggagccagcgcggtatcacttctgtgctgttcccatcgaaggtcagtaaccggaaccccttcgccaggacgcgggtcctggccaacccaaatcgaggggcattctgcagatcagctggtctgccatcttcaaacgattcatgaaaatcaaagacagctttgaggaacggctccagactggcagagaccaaagaggtcatagatgaacaggagatccccaactggatcctttggctgtaaaggacaatattggcacaacgggtgaagcttgaatggggtctgaggattaggtggtagtaacttcacaggcggggatttgggagaaatgcaatgtcacgtggaaaactgactctcaaatagttcaagaaggaagttctttggactatacttgcaacttttctgtaggcttaatactgtttcacaattttaaaatgtaaaataatagtaccaggtagtagttttttattaagacagattgtgctttttgaaagcattggtggaaagatttctcaaaatcatgcgcgaaagagtttataatgaaattgtgtaatatttgtttcaaaagaaagtgtgggccctgagaagcattttctgtagtttacacagtatttctgccaatttgggatactttcagtgtccctggaattctcatcatctgaatttcttactctttttccctttaaaaaaaaataaaataaagaagtatgaggcaaaaggccacacctacctacctcactttaaaattctgtctaaaaacctggtcacagaggaagatgttggctaactttaatgcgataatctagttcccctcaaaatggaaagctatttagaaaaaagctatttgcccaacgtgaggaacaatttatagaaactgacaagaatttttgtcctggggaaaggacagggtttgttgcatgggataaggggaagtgatgtggccgggcatgatggctcacgcctgtaatcccagcactttgggaggccgaggcaggtggatcgtgaggtcaagagatcgagaccatcctggccaacatagtgaaacctcgtctctactaaaaatacaaaaattagctagatatggtggtgtgtgcacctgtagaaccagctactcgggaggctgaggcaggagaatcgcttgaacctgggaggcggaggttgcagtgaaccgagatcgctccactgctctccagtctggcgacagagcaagagtctgtctcaaaaaaaaaaaagcaagtgattttttttaaaaaaagaaaacagaaccgatgtctgaaaaagtagtactcctttacaaaacacattctctacaaacgcgtggtttcatgtgacctctgctcagtccctttccacaactttctcctgcctattttcttctctgcattttgtcaggatgctttttattgtaaattttactgtgttttgcatgcttccaaatataaaaaataatttttaagatgaattaaacattgaacctccctctcagtattgttttgggaacatgcattctcctgaggagagggagctgttgagtggaagcagtcaaacagaactccacatttcattttcctggcatgggtttcagggtgcaactcaaacagaatgtgacttggcatctgtcacctttcccaggcactccctatcctctggcaatttgttgccttaatggagaaccattcaaaattaaatattttatattagaaaagaaatgttaaacataaagaaaagttatacaaatattataacaacctagtgagccttccttcactaattttctctctcatacacacacatctatgtgtatgtgtgagtacacagtatatatgtgtatatatttacacaatcactttttttcttttgctggactacttgagagtaaattgaagagattgacattcttcagctctaaataattcaatatgaacctcataggatcaaagatgttttcatacataaccccagtgcaattattaccaaattcagataatttcatatccgtacaattttcccatatataatatattcaatatttaaattttgacagttatcccagtattgtttatacagcaactgttttcctttgtttcttatttttatagatacatagtaattgtacatatttatgtgttacatgtgatactttgatacatgcatacaatgtgcaatgatcaaatcagggtaatgaaggtattcatcacctcaaacgtttattatttctttgtactgggaacattccaaatcttctcttctagctattttgaaatatacaataaattattgttaactattatcactgtacagtactatcattccctctatctaactatctttgtacccataaccaacacttttcatccttccctccctcctattgcttgccagcctctggtagtcatcattctactctccacctccctgaaatcaacgtttttagctcccacataggagtgagaaggtgggatatgtatctttctgtgcctagcttatttcacttaacgtaatgtcctctggtttcatccatgttgctacaaccgacgggatttcattctttttatgactaaatagtattccactgtgtatatgtagtacatttttttttttttgagacaaagtctcgctctgtcacccaggctggagtgcagtagcgtgatcttggctcactgcaagctccgcctcccgggttcacgccattctcctgcctcagcctcccgagtagctgggactacaggcacccgccaccacgcccggctaattttttgtatttttagtagagacaggttttcaccgtgttagccaggatggtctcgatctcctgacctcatgattcgcctgcctcggcctcccaaagtgctgggattacaggcgtgagccaccgcgcccggccttatctagcatgttttttatccattcatctgttgatggacacttggattgattccatatcttggctattgtgactagtcctgcagtaaacatgggagtgcagatatctcttcaatatactgatttgctttcttttgggtgtatacccagcagtgggattgctagatcatatggtagttctagtttcaattttttgagaaacctccatactgttttccacaatggttgtacgaattttcatttccaccaacagtgtacgagggtttccttttctccacatcctccccaaaatttgttattttctgtcttttgataatagccattttaactgaggtgagatgatacctattaatgtggtttcagttgcatttctctgatgcttagtgatgttgagcatttacttatatacctgatggccattagtatgtcttcttttgagaaaatgaaaatctttttcagattatttgccctatttttgttttgttttgtttttgagatggagtcttgctctgtcacccaggctggagtgcagtgggacgtctcggctcactgcaacctctgcctcctggttcacgccattctcctgcctcagcctcccgagtagctgcaactacaggcgaccaccaccacacccggctaattttttgtatttttagtagagatggggtttcaccgtgttagctaggatggtatcgatctcctgacctcgtgatccgcccgcctcagcctcccagagtgctgggattacatgcctgagccaccacacccggcccatttgcccatttttaatcagattgtttccttactattgagttatttgaggttcttatacagtttatatataggtaactaatcctttgtcagatgcaagttcgcaaatattttcccattctgtaggttgtcccttccctgttatttcctttgctgtaaagaagcgtagacgattcttttttttcccctcccccttcccagcttagaagatttctgacaagtgtagtgaaatcaacaactgctctgcaagaatcagattccagggcaggcacagtggcccatgcccataatcccggcactttgggaggccaaggcgggtggagcacctgaggtcaggagttcaagatcaacctggccaacatggtgaaatcccatctctactaaaaatacaaaaaaaaaaaaaattagctgggcacagtggtgaatgcctgtaatcctagccacttgggaagctgaggcaagagaatcgcttgaacccaggaggcagaggttgcagtaagctgagattgtactgtgtctggaattggttccttctggtgggttcctggtctcgctgacttcaagaatgaagctgggaccctcgcagtgagtgttgcagttcttaaagctggtgtgtctggcgtttgttccttcagatgttcacaggtacctggagtttcttccttctggtgggttcgtggtctcactgacttcaggagtaaagtcgcagaccttcgcagtgagtgttacagctcttaaaggtggcacgttgggagttgtttgttcctccggggggttcgtggtattgctgacttgaggagtgaagctgcagaccttcacgctgagtgttacagctcataaaggtagtacagacccaaaaaatgagcaacagcaagatttactgcaaagagcaaaagaacaaagcctccacagcatgtaagagtaccccagcgggttgcccccgctggcgcaggtggccagcttttattcccttatttggccccacccacatcctgctgattggtccattttacagagcgctgattggtccatttttacagagtgctgattggtgcctttacaaacctttagctaacacagagtgctgattggtgtgtttttacagagtgctgattggtgtgtttacaaacctttagctagacacagagcactgattggtgcatttacaatcctttagctagacagaaaagttctccaggtccccacctgattagctagacacagagcgccgattggtgcgtttttacagagtgctgattggtgtgtttacaaacctttagctagtcacagagcgctgattggtgcatttacaatcctttttagctagacagaaaagttctccaagtccccacccgacccagaagcccagctggctttgcctctcagtaccactgctctccagcctgggcgacagagcaagactccgtctcaaaaaaaaaaaaatagcactaaaagaaacttattaaaaaagaaaaacattgtcaggtcaggctaaaggttaaagaggaaaaaaaatcacagggtagggtcaaagagtggcgataacagagaagagagtcatgagacttgaaattaaataatagaaattactcaatattaactgcagagagaaaatagactgaaaaaaattagcagagcctcagtaacctgtgggactgtgatgaaagatttaacatcatgtcatcaaagtccccccaaaaaagagaaaaaagcatgaagctgaaaaatattcaaagatatgatggctcaagattttccaaaaattgcaaaagacatagcctaaaccgaataaactcctaacaagtctgaggcaatctatatcaatatatatatcataatcaaacgcctgaaaactaaaggcaaagaaaaaagtattaaaaacagcaagacagaaattctaccatatttataagggaaaagcaattttttttttttttgagatggagtctcgctcttttgtcaggctggagtgcagtggtgcaatctcggctcactgccacctctgcctcccgagttcaagcgattctcctccctcagcctccagagtagctgggactacaggcgcgcaccaccatgcccagctaatttttgtatttttagtagagacagggtttcactgcgttggccaggatggtctcaatctcttgatctcatgatccgcccacctcggcctcccaaagtgctgggattacaggcgtgagccaccgcgccctgccaggaaaagcaatttttaaatgacggcatatttctcctccgaaatcacagagaccagaaggaagtgacacagtattttccaagtgctgaaagaaaagcagtgtcaatcgagaattctattatccagtgaaaacagccttcaaaaatggaagggatatcagggcaatctcagatgaagaactactaagaatttgtcaccagcagacctaccattaaaaaaatggctaaaggaaattcttgaaatagaaaggaaatgataagtcttagaacatcagggaggaacacagaacaacagaaagagtaaaaatatagataaatacactagacatttcttctgctgagttttcgagagtatctttgtccaagcaaaaattttaacattgtctaacatggttattgaagtatgtagaagaatcattaagataattgtaagtgagagagggtaaaatgacttaaaagaattgtaaggtttctatgcttcagtcaaactggtaaaatgtcaacactagtagactgagatatcaatataatgtaatatgtagagcagctattaaataatttacacaaagagatacacactaaatcactagacatatcaaaatggaattctaaaaaggtgctagtaaccccaaggaaagtacgaaaaagaaaacagagaaaccaagaacagaggaaacaaagataacaaaaaaattctatggaagacctaagacttaatatacaggtaattacattaaatataaacagtctaaatacactaataaaaagatagattagtgagtgaaacaagccaggcacacaaagtcaaatatcacctgttttcactcataagtgggtgctaaaaaatgtgtacacatgaagacagagattggggtgacagacaatgaagacttggaagggtgaaggagtatgagggggtcatatgataggtaattcctaattgggtacaatgcgcattatttgggtaatggataccctaaaagccctgacttgaccactatgtaatctatgcatataacaaaactgcatacggccgggctcagtggctcacgcctgtaatcccagcactttgggaggctgaggtgtgtagatcacttgaggtccagagttcaagaccaggtgggccaacatggtgaaaccccatctctactaaaaatacaaaaattagctgggcatcgtggcaggtggctgtaatcccagctactcaggaggctgaggcaggagaatcacttgaacccaggaggtgaaggttgtagtgagctgagattgctccactgcactccagcctgggtgacagagtgagactccatctctaaataaataaatcagcaggtatttataaacataggccagataatgtcacttctctgctcacaaccttccactggtaccacatctcacagcaaatggaagccaaaggccttacaatattagcaacagccccagctttcaggccacaaaattcatcttgaaactgtagcctactgagtattcttaacgtaaacatttccttaatataaagcagtatatattcgctgtagaaaaactgaaaaatataaaacatgtaaagggggaaattacttataattccacagtctaaaatagccactacactggtttttttaatatatatatctttttgtaaatctagtttttacaatttaatgatactgaggcaaacaaatttgccacatccataaaaattttgaaatcaaatagaaataaaataataaaaagacagattggcagagtaggtgttttttgtttgtttgtttctgtttgtttttttaaaaaatagaaccaacagcaagcatagtggctcacactggacgctgaggtaggagggagcccaggagttggagaccaacttgggcaaccatagcaatgtagcaggacgagccgcagacaaaactcagacaccgagttaaataaggaaggggtttattcggcggggggcattggcaagactcctgtctcaagagcagagctctccgagtgagcaattcctgtaccttttaagcgctcacaactctacgggggtgcgcgtgagagggtcttgatcgattgagcaagcagggggtacgtgactgggggctgcatgcaccggtaattagatgggaacaaaacaggatagggatttccacactgcttttctatacaatgtctgtaatctatagataatataaccgattaggtcaggggtcgatctttaactaccaggcccagggtgtgatgccgggctgtctgcttgtggatttcatttctgccttttagtttttactttttctttctttggaggcagaaattgggcataagacaatatgaggggtggtctcctcccttagcaagacttggtccctacacattttttttttttttttttttttttttttttttgagacggagtctcgctctgtcgcccaggctggagtgcagtggcaccatcccggctcactgcaagctccgcctcctgggttcacgcctttctcctgcctcagcctcccgagtagctgggactacaggcgcccgccaccatgcccggctaattttttgtatttttagtagagacggggtttcactgtgttagccaggatggtctcgatctcctgacctcgtgatctgcccacctcggcctcccaaagtgctgggattacaggcttgagccaccgtgcccggcctgcattttttaagtaaataatttttcctctttaggcctcatctggtttattttttattttttgtaagatttaaactcagacttaaacatttaattttatccatgtgtgcatatgaacctcttccattacttccaacaggtcagcattgtgtaaactacacttcagttataaaccttgttttgagcagccaggttgcagcccatacaatgttcccagtgaggacttcctcctacctatttccctccatctctgagcgagcgtggacttgctgcacgggggggtgcacacttcatgctctatgtgctgagggacttccctccggatccgaccttgttaatatcccagttgtgagtgagagcttctgaagctccacaggttaactggaaattaaattgcagcgttagttgtctcctcagaactcactggtttcatgcctcactcagaagtaactgcacaattccagggcgtccacaggaacctacaggttttgcctacccctgcccgcgactggctgatctccaaaccctctccctggcttcccgctggctgctcctgccactcccgtcgtgttccgccccaagcccctttgctttgctctctgctcctccaggcggttcctcccacacagacgtgctgggctccacaggggcgccttttgcctcaggtggatcagaacatgtgttcgtgtgactctttttttttgttttgttttgtttttgtttttgtttttgttttttgagacaagtctcgctctgtcgcccaggctagagtgcagtggcgcgatctccgctcactgcaagctccgcctcccgggttcacgccattctcctgcctcagcctcccgagtagctgggactacaggcgcccgccaccacgcccggctaattttttgtattttttagtagagacggggtttcaccgtgttagcccggattgtctcgatctcctgacctcgtgatctgcccgcctcggcctcccaaagtgctgggattacaggggtgagccaccgcacctggccaatttttttttttaatttagccaggtgtggtggcagacacctgtagccccagctacttaggaaaatgaggcaggaggattgcttgaggccaggagctcaaggcttcagtgatctgattgtgccactgcactccaggc

SEQ ID NO: 830 - DNA, 315 bp, Homo sapiens
ttgtttttgttttttttgttttttttttaacagagtcttgctctgtcgcccaggctggagtgcagtggcgcaatctcggctcactgcaagctccgcctcctgggttcatgccattctcctgcctcagcctcccgagtagctgggactacaggtgcccgccaccacgcctggctaattttttgtttgtattttttagtagagacggggtttcaccatgttagccaggatggtctcaatctcctgaccttgtgatccgcccacctcggcctcccaaagtgctgggattacaggcgtgagccaccgcgcctggcccaa

SEQ ID NO: 831 - DNA, 299 bp, Homo sapiens
tttttttttagatggagtctcgctctgtcgcccaggctggagtgcagtggcgcgatctcggcgcactgaaagctccgcctcccgggttcgcgccattctcctgcctcggcctccctagtagctgggactacaggcgcccgccaccacgcccggctaaattttttttgtattttttagtagagacggggtttcaccgtgttagccaggatggtctcgatctcctgacctcgtgatccgcccgcctcggcctcccaaagtgctgggattacaggcgtgagccaccgcgcccggccccacat

SEQ ID NO: 832 - DNA, 211 bp, Homo sapiens
ggttcacgccattctcctgcctcagcctcccgcgtagctgggactacaggcgcccaccacctcgcccagctaattttttgtatttttagtagagatggggtttcaccgtgttagccaggatggtctcgatctcctgacctcgtgatccgcccgcctcggcctcccaaagtgctgggattaccggcgtgagccaccgcgcccggccaaacat

SEQ ID NO: 833 - DNA, 299 bp, Homo sapiens
gtttttgtttttgagacggagtctcgctctgttgcccaggctggagtgcagtggcactatcttggctcactgcaagctccgcctcctgggttcacaccattctcctgcctcagcctcccgagtagctgggactacaggcacccgccaccacgcccagctaattttttgtatttttagtagagacggggtttcaccgtgttagccaggatggtctcgatctcctgaccttgtgatcctcctgcctcggcctcccaaagtgctgggattacaggcatgagccaccgcgcctggcctgaaat

SEQ ID NO: 834 - DNA, 174 bp, Homo sapiens
tgggactacaggcgcccgccaccactcccagctaattttttttttgtatttttagtagagacggggtttcactgtgttagccaggatggtctcgatctcctgacctcgtgatccacccgcctcggcctcccaaagtgctgggattacaggcgtgagccaccgcgccccgccaaa

SEQ ID NO: 835 - DNA, 308 bp, Homo sapiens
ctttcttttttttttttttggagacggagtctcgctctgttgcccaggctggagtgcagtggcgcgatctcagctcactgtaagctccacctcccgggttcatgccattctcctgcctcagcctcccaagtggctgggactacaggcgcctgccaccacgcccggctaattttttttgtattttttagtagagacggggtttcaccgtgttagccaggatggtctcgatctcctgacctcgtgatccacccgcctcggcctcccaaagtgctgggattacaggcgtgagccaccgcacctggcctaaa

SEQ ID NO: 836 - DNA, 308 bp, Homo sapiens; identical to SEQ ID NO: 835

SEQ ID NO: 837 - DNA, 465 bp, Homo sapiens
ttttttctttttttttgtttgagatggagtctcgctgtgtcacccaggctggagtgcagtagtgcaatctcggctcactgcaagctctgcctcccaggttcatgccattctcctgcctcagcctcccgagtagctgggactacaggcacctgccaccacacctggctaattttttgtatttttagtagagacggggtttcaccatgttagccaggatggtctcaatctcctgacctcgtgatccacccacctcagcctcccaaagtgctgggattacaggcgtgagccaccgtgcccggccgaaaatctgtcctctcttacacaatacctcgagtgcactcaatttgaaatccatctgggttcacaaaccgctctagaaggaaggctggttcctgtcacttacccacttggaggtgtggagatatctgggcaccttgttttccttctaacctcaagctgtgctcg

SEQ ID NO: 838 - DNA, 318 bp, Homo sapiens
caatgtgtactttctttttttttttttttttgagatggagtctcgctctgtcacccaggctggagtgcagtggcacgatctcagctcactgcaagctccgcctcctgggttcacgccattctcctgcctcagcctcctgagtagctgggactacaggcgtcctccaccacgcccggctaattttttgtatttttagtagagacggggtttcaccgtgttagccaagatggtctcgatctcctgacctggtgatccacccgcctcggcctcccaaagtgctgggattacaggtgtgagccaccgcgcctggccaacaat

SEQ ID NO: 839 - DNA, 22428 bp, Homo sapiens
acatgtttccaactggaatcgtttaatgtgtctacttcttccacgcataattataaaagaataagaatcgacaaaaatattttctttccataatatgtagaggtggtttgtttcttttttttttttttcttttctttttacttttttttttgcccgcccctggcagagctcttggcggggagggaaggggagagggaaatataaccctgaggtggggatggttcagctcccaaccccggaacccctggtgtgtacgggtcaggcagacacatgtggctgggcggctgggctggggaggggacagccgccactgaccagcagagcgtggaagttcggtgcgtttcagtgcctgcctgaaagcttggggacaggagggctgtccacaggtggtgccccccgcgggccctggccgcttctcctgtggggcccgcatgaccctctgctcgggcttgggaagaaatggagcctaccaggtgctgggttgcaaccccgctgcccggtgtggaccccaagtctagatttaggcaccccttgctttctgtcttttattttttatttattttgagacagagtttcgctcttgttgcccaggctggagtgcaatggtgcgatcttggctcaccgcaacctccacctcccgggttcaagcgattctcctgcctcagcctcccgagtagctgggattataggcacgcgccaccacacccggctaattttttgtatttttagtagagacggggtttccccatgttggccaggctggtcttgaactcccaacctcaggtgatccgcccgcctcagcctcccaaagtgctgggattacagacgtgagccaccgcgcccggcctgtcttttaaataattatgaaaaatatccccccaaacaaaacacaaacatcaagttggggaggctggccgggggggacaggcaattgcatgcttgggtgctggggacggtggctggccgggccaggggactgagaggtcacagggagccccaggcggaaggcagcccgctcctctgagtctcttctggcctctccagtgcccatcagcgtgtgacctcctcctcccagaaggcggggagaggaggggctggcccgagaccaccatctctctgtctcggcaaccaagaagcagcggacataaaacccaagagcgtttaaaaaaggataaaaggcgtcggggcggtgaaggcagcggctcctcggggctggccagcgctgggcgggacaaagtgcctcactggggcccgcgggccactcagtccctcccgcctggttccccgcggaggctgcagccacttgtgctgtgatgtggcggctcccggtgggcaggctcagaggtattcctgtagaaagtgcagcaacgtgacttcatagtgctcgcccgactcggggcagcgaatactgtgtctctcgttggggtagatctgcggggagacaggaggcagggctggggggcgtggccggaccacccccgtgtcctaggctcctcccttattctggctcagggcatccgggaaggcgcaggtgctctgaggcccagtgatctgggtttgaatcccacctcggctgttgacttgcagtgtaactctgggcctctctaaaaaatggggtgaatccggacctcacagtctttgggaggatttggtaagacaaagtttacaaaacgccttgcggtgtgcacgcgcttgcacagaggaaagatttaggaagaaaccgtttgcctctttcccccaaaccggctgacgggcgaccaactcatctctgtggaggtggctgaggcttcaagcctcagggacatctggtgccctggtctcgagccatttccactttaccaaaaggcatgtgactagctctgggccttaggacagctgcctgtgaggatttgtgaagcattttctgggtcctcttagcgcccaagggggatcaagccaagaggcaggcagtaacatggaactccccaggctcctgagacctggaccagccaacgccaggcctgggggtggatccacacggggatgcaggtcctgcctctggccacgaaggagggctctcgaggcactgacggacaacccctatagctccccactgccccctaggggttggtaggaccaaggcatgaaaataaccctacgttctccacaaagaaccccggggctggccggcagcaggggcaggtggcccatctacgccacctcctgccagtgagatgggtttctgaatcatcccctcctctccaggctcctggtccccactgttgcccatcaccctgggaatgcaccaagccacccactggtttcccctcctctactcttgccttctttaatccatccctggatgaatcacgagtttgatgacaccgtccccagcctagacctctgcaaggacttgccagtctgacatcaagaccagcttccaggtcctgctgccccaggcacttcaagggcccactccttccccagcccgggcagtggcactccctggggcagactctgctgcccttgacaccagccatatgcacatgttgtgcccatgcctttatgccactctgggtcccagctgcctggttactttttcctcttggctaagagggcagatagagggtctgtctggctccccaatgagcttccagaccaagcccaaggcccggcatgtgacaaatgtgatttgtgtataaagagggcctggggccgccagctgcctggcccagatgttttggggtctttgaaacagaaggagaggtgcactctatctgtcccacacaatgccatgttcccaccccacagcctatctcatctcacgttctacttcctgtggggaggcagtgagacaggaccctgggcccaccctgtgtgctgaatgcttttcttttttctttcttttcttttttttttttcttttgagacggagtctccctctgccgcccaggctggagtgcagtggcacaatctcggttcactggaacctccgcctcccaggttcaagcgattctcctgcctcagcctcccgagtagctgggactacaggcgtgtgccaccacactcggctaatttttgtatttttagtagagacggagctttgccatgttagccaggctggtctcaaactcctggcctcaagtgatccacccgcctcagcctcccaaagtgctggggttacaggcgtgagccaccacgcccggcctgaatgcttttctgaagaccttgtttggccccagcagccttcaaggaggccgagttatcatgaccgtttcaaagacggagaaacgaggtgcaagggtgaatgctgtcccagctacctggcccctgggaaggcagtgggctcgggtctcaggctgggaagagacatctgaagttccattccagccctgcctgatatcactccctgggctgcttgggatgtggggtgtcggtggggggcaccgccaagagatcagctcatcaccgcacaaggtggctctgcctccctcctgctctgcggccccatttccctgctctgttgaaaggcaacaggacgctccccacaggacagagcatgccgaggcgcccaggaagcagaaattgtctgcagtccacaggtaataaaacctggccctcttgcctccaagatacctcctgaatctcccgccggtacaactatggaccacgtcccactgtcccccacaggccatccacaaagcagccagagaaatgtgggtcaaatggcaagccgcccaactctatgctctgctcacaagcccgagtcacctcccaccaccctcagttgaaaatccagccgaagccccgcccccgctgaggccccacccctctatagcagaagctccaccctgcttactgagggccccccctcctctacagcagaagccccaccctcctcaccgctgaggcgctgctcccacaccgagccccaccctctccactaccgaggcccttccccacaccgaggccaaccatttactgcggaagccccacccaccgtaacactgaagccccgtccctctgcagaagtcccaccctcctcgccattgaggccccgcccataaccatgcccaccccttagcgcagaagccccgcccacctagactgagccccacgttgctgccaaggctccacccactcccccactctcctcccgctcggtcccccaagcctggctggctccactcactctagcacccttcactgctgcctcctcagggaatgcttggccccagcgccttaggaaggagcctgctagggccttcagcactcagcggtttcttctacgcaatttctcagtttcaaataaagcccgtctgcggggcaatttcggtaagggttcctccctccattaggcccggagcaggggtgggtgtggcagcccccgatcccgtgcttccagcaccgaaggcaggcggaaccctgagctgtcaagacaggactgatacatcaatggccctgggagctgggagggcggggacacagggctgtggggtggggggctgggagccccagatcccccagggagcccctggtcacagtgggaagccaccccgcctcgtcccaccccccactcccagggatctgtcggctcgcggaggggccgaagcccccaacagccacccacctggagctggtaaggtttccctgctcggatcagttgggagacgaggaagtttgtgtggaaaaagtgcacgttttcgtccaggaagccgtggaggataagcaagcggttgggcctggaaaacagatggggaagggtctgaggccagggattgtccgtggggtaggaggggagcagatcacaaggtcaggagtttgagaccagcctggccaacatggtgaaaccctgtctctactaaaaatatatttaaaaaaaattagccaggcatggtggcaggtgcctgaaatcgcagctacttgggaggctgaggcaggagaactgcttgagcctcagaggcagaggttgcagtgcgctgagatcgcgccactcactccagcctgggcgacagatggagacagcatctcaaaaaaaaaaaaaaaaaaaagatcagctgagtgtagtggtgcgcctgtaagtccagctactgtgcaggctgaggcgggaggatcacttgagcccaggaggtggaggctacagtgagctatgatcataccactgcactccagcctgggtgacagagcaagaccccatctctaaattagaaaaacaaaaacaaaaacccaggccgggtgcagtgcctcatgcctgtaatcccagtactttgggaggccaagctgggtggattgagtccagttgtttgagaccagcctgggcaacatggcaaaacctcatctctacaaaaatatttaaaagttagccaggcgtggtggtgcacacctgtggtcccagctgagcctgaggcaggaggatcacctaaaccctgggagggtgcagtgagctatgattaaaaaaaaaaaaaaaaaatgctgagcatggtggcttacacctgtaatcccagcactttgggaggccaaggcaggtggatcacttgaggccaggagttcaagaccagcctgggcaacatggtgaaaccccatctctattaaagatacaaaaattagctgggtgtggtagtgcatgcctgtaattccagctactgaggaggctgaggcacgagaattgctttaacctgggaggtggaggttgcagtgagctgagattaagccactgcactccagccgggaccacagagtgagactctctcaacaaaacaaaacaaaaacccacctaggtctgctgctgtctgtggtctggagtgtggcatgggctactggtgaggccaacacgcagcctcaccagaatcggctgccctagcccttcctgtccgatacgggagccagtggccacacgtcgccgttgaaattccagtttacattcatccaaattaacggaacttataaacccattgagacagagcacagatcggtggctgccccgggacagggagtgactgctaaggaatgggaacagggtttgacgctggagtgctggaaaggttctggaaccactgcaaatgcaccgagggctgctttaaggtgactgttaggttctgtgaatttcaccacaataaattattattttttgagacagagtctcgctctgttgcccaggctggagtgcagtggtgcgatctcagctcactgcgacctcacccttccaggttcaagcaattctcctgcctcggcctccttgagtagccgggattacaggtgtgtgtcaccacacctggctaatttttatatttttagtagacatggggtttcaccgtgttggctaggctggtcttgaactcctgaagccaccgttcctggcctattattattattattgttttgagacagtttctctctgttgcccaggctagagtgcagtggcacgatgttcgctcactaccaactccacctcctgggttcaagcgattctcctgcctcagccttccaagtagctggcattacaggcatgcaccaccatgcccagcttattttttgtatttttttgtagagacggggtttcaccatgttggccaggctggtctcgaactcctaccttaagcaatcctcctgccttggcctcccaaagtgcccaggcagacttttttttttttttttttttttgaattggagtctggctctgtcgcccagactgtagtgcagtggcgcacgatctcggctcactgcaagctccgcctcccgggttcacgccattctcctgcctcagcctcccatatagctgggactacaggcacccgccaccacacccggctaattttttgtatttttagtagagacggggtttcatcttgttagccaggatggtctcaatctcctgacctcacgatccgcccgcctcagcctcccagagtgctgggattacaggagtgagccaccgcgcccggcccatgcccaggcagatttttaaccccctaggtgactgcatgggattccggggaacattttctggagacgtgccagaaaatgggaacactgttttctctccatcagagaataagacccatgtcaaaagcataaaatgggacatctgagctggtccctggccctgtggacatctatgtcctgaagcacaagacagaggctgtgatggggcctccagcaggatgcaggggagtgggggaggcttgcctgtgaaaagcagtgactcgaattccctcatctttcccagggcagggctgtgagcctccttccccagacaagcatccctgggtgccccttcctgcaaggtgcagtgaggagggagggtgggctggaggggactgtgaggcacatgcaggcagacgccaccacaggagcacagcggggaggctccacatggcctgaggctccctgggcagggccagctggggcaggagggcaccctcatagagacagctggtgccggggtgcaggagaagccccggggaggagcgcagggcagggcagtggccttactcattgggcagcttctccacgtgcagggccacggaacccgcctcatagccgtgctggttgttctcagggacgtccatgtagcgctcagtgtaccctgtgtcgtaggccatccagacggtgaccggggcacccgcgatggccacctgagggacacagcagacagatgggggcagagagagagagagaaacaggcgtcgggtcctacagccagcatcagccgctgtcccggggccgccctggagcccgtgaggagcgctcatgcacatggggccggcaaggaaggggccctcagaccgcgtggcccccgtggacggtgcgtggcatgggggtgggcagggcgccacaggcgggcaggtgcggcccctccccgccgccgcagagggccgggtcccactgcccgtctgcctcctcctcctcctcatcgccgccgccccgcagtgccctgactgccgccggcctggggcccccccgccgctctgcacaccatgccccacctctgcccatccgaggccggggtcccgggctcagcctcccacagagagctgctggcggggttttgtgcagccggatgccatcctgcggtcggcggtggcgggcaatgaggaggggggctcggccccgtggggctgctgcagggagaaacagccacgtggcaaggcccctgccgaggcgcctccccggtaggtgggctccgggtggcgcgggcggtgggcaaacgcggcgtagatggggaagggggcagggaggggcgtggctgaggccggccaggggtgggacccaccttgaacacctggggcttgtggattagccccatgagcgagaggaagcccccgtaggaccagccatggatggcaactcggctcaggtcgatgaagccatacttctcggccacgaactgcaggccctccacctggtcctcgatctccacctggccctgagggatgaagccgggcacctctcagtggcctcctcccggtatgtccctcccctgcagtgacacctctgctcctttcagggcgtctctccctcttggatgaaaagtggctcgctggaagccccctgtccttccaggccctgctaaccctgcctgctatctggggatggctggacagatccagcagccatcttgctctgccacctcccaggtgagtggctctgggagccacgtcccctctgagggcgtcagtttgcccatccctaataaagggacattaacaggaagaggacccattttctagagggcacaaggaagaaaaagacgggtgcccaggcatgtgcaagggcacaaagaatggctggtgccatcgccgttgtcactaccagccacatccccaccaccgccactgccacgatttcaatgctggtgtcccctctgaagtccgtgctgagatcactactgcggccttcaagcgactgatccatggggcccactcatgtgaatgggatgaggggcccttataaaagggcctgatggagggaggccacggcttttccgctccttgcaacccctctgccgtgtaggaagcagcacagggcctctctggagggttgctgaccaggcaacctcgtgggaacagagagcagccctccccgacacagccctgccttggccttggacctcccagcctccagaactgtgagagattttcgttctttataaatccccaggctgtggggttttgttccagcagtgcaaaggggccgagatgatcgccatcaccaccgtcgtcatcaccagtgtcagcacaacttgtctctgtccctgcagggcgcagcccagagctgagcagcaaagcatacatccccttttgttctaaaagggcgcctcattgagcctgcgtcaccccagccagaagtgcccttctgcgggtggtattccagagccgctcccatgccctgcacccacacggcccagggctcccttcccgagacccaaaggacccagagcaacagggaggagttgttaccatttggtttttcagggccccttcgaaccgaagccctcgctgacaggagcccctgccgtcaatcacaaccacggcgtagcccagggaggccagtgtgttgagccgcaagtacttgatgcctttgaaggagttattcaccagctgcacctgtggggaggtgagggccagcagtccagcacgagatgccgggcaggacgggcctggcaggggagatgccggtgggctggggaccgggccgggctggggcctcagagcctaatgaaagcacctgtgccccggaggctctggatggacacctgggagtggcaaggcgggaggggcccatactcgggaccctgctagggagggggaagggccactgtcaggctctttctcagctgggccactgccccagtcctgcctggaacaactactctggcatgatggacattggggtggctccttctcgggtggggccatctgggcactgcggggtgctgagaagccactccaggccaggagaactcgcagtggtgatgaaccacaaagtacccagacatcgccccgtatcctctgtggggacagagctgctctgggtaagatgtgcgcctaagatggtccaactgccaatctgctgcctgcttttgacccctgctccaggaattgggcccagggcccatggccacctccataccaacctggagactaggggacttcctagaggaacaagggagagtcagcaggcggagggggaaggggaggccatccaggaagggcggggagcgtgcaaacgggcacagagaaaggagggtgaggggccccgaggaccctgtgtagtcagggcaggcggggtgggctggggcaccaggcaggtagccggggagcctcctctggttgactgttctacagctggcacttgagtggggatggggagtcctcgggtggatggtggggtgggggcctggggagcaggtgtgcactcacctgggggcctccatatacaaagaggacggtggggtgcttcttccctggctgcaaggcgtggggcttgtagatcatgccgtagagccgcacatccgagcgcgtgtggaaatggaagatctctggaggaacataatccggggggcagcctgcgggagacagggcggctatctggctgcccggggaagccacatccagctgacacccttgttctcctgcccaccccaagccttggagggtggaccaaagcaccccctcttttcctgggcttcccgagagttgataattgaaaaaaacgtttttttttcattaaataagatttgtacagtttttgtagagatggggtcttgtctccctgttgcccaggctggtctcgacttcctggcctcaagcgatcctcccacctcggcctcctgtgtagggtcactgctatttttgcaaagcaacagttgttgtccaattaggatggtgggggtttttctgttttttttctttttcttctttttttttttcaagacaaagtcttgtgatcttggctcactgcaacctccgccttcctgggttcaagcgattatcctgcctcagcctcctgagtagctaggattataggtgcacggcaccacgcccggctaatgtttttgtatttttagtagagacggggtttcaccatgttggccaaacttgtctcgaactgtatttttttttttttttttttgagacggagtctcactctgtcacccaggctgcaatgcagtggcacgatcttggttcacggcaacttgcacctcctgggtttgagcaattctcctgcctcatcttcccaagtagctgggattacaggtgcgcgccaccacatttggctaatttttgtacttttagtagagatggggtttcaccatattggccaggctggtctcgaactcctgtccttaggtgatccacccacctatgtctcccaaagtgctgggattacagacgtgagccaccacacccagccatcgaactcctgaccttgggtgacccgcacaccttggcctcccaatgtgctgggattacaggcgtgaggcactgcacctggcccaaagttttttctttaaataaatgtatgtaggtaaattttggtggggcaatttataggaaggtgagtaaagggtactacaggtctaggggtagcagaagtttactgtggagggccagatagcaaatatattgggctctgggaattgggcgtggcgggacacgctccgtgctgtgtctctgtgtcatctgctgcggtagcgctaatgtggccacagaccacagagggactgcacgtggctggatttggcagcagttggcctgctcctaatgcaggcagtcttcaaacgtggcacagattgggagtttcgggaaacagtgcctcgttccccagggcactgaggttctggtctctgcccccactgctaggctgggtgccctgctgagccccttcccctccctgacccatctcctcatctgaagccagggctccagctcctggcggtgtcggtgcggacaggagagtgaggactgggctctagagggaggcctgggatctgtttctgctcaggggtgagggcatcacaaaatgctttccagcccacggaataccccgcatatgctggaaattcgttgtgtttagaatgttctggaaacccaccaacatggcagagacagggccagggtgggttgtccttgtactgagtgatgcctgggagcccagcagtgtgctgacccgctggttttcatcccacactctgtatatacagtttcgttgataaagaaacacttcatggtgatacgctgatgtgtgtgacggagccagcactggaacccggagtcaccaatgcagggtcctggccaacttccaggttctgggcaaggtgtcaggttgcctcatttcctgaggcccccctgtgactgaccctttgctccttttcctgataaaggcctcggagtgtcggctctgagcaggtgctgctgtgggcggcagcctctgggcacaggacaccataaagggccctctgcatgccgctgtggccaggactgcagggtcctggagaaggtgagtggaaagcctgataaccacggcgggtttcaaaccagtgtgggtggactctgacatcccggccacccctgcatggaccaccactgttcaaaaggttttttttttttgagacggagtctcgctctgtcgcccaggctaaagtacagtggtgcgatctcagctcactgcaacctctgtgtcctgggctcaggccattctcttgcctcagcctcccgagtagtgggactacaggcgcccgccaccatgctcggctaattttttgtatttttagtagagatggtgtttcaccgtgttagccaggatggtctcgatctcctgaccttgtgatccacccgcctcagcctcccaaagtgctgggattacaggcatgagccaccgcgcctggcccaaaatgtttttaatttttaatttttttttagagtcagggtcttgctctgttgcccaggctgaagtgcagtggtacaatcacacttcactgcagcctccgacttctgggcacaaatgatcccccccatctcagtctctggagtagctaggactacatgtgcacactactacacccggctaatttttaacatttttgtagagggagttcttactatgttgctcaggctggtctcaaactcctacgtgcaagcaatcctcctgccttggcctcccaaagcattgggattacaggcagaagccactgtgcccgctgatgaaaatgtttacttgtcacctgcccactaccctgggagctcccagtgacagggtctgtgtctcactggttaccattttggcagggggttggcacggagctgcatccctgccgggttctgtgcagtccggccctttactgcagctcgaacccaggaccgtctcggacggcaggggctgtggcttatgtcctatgacgagttcccagatgcttggaggggcctgggtgctgtgggaggccaggcaggccagctccaggcctctgcctctttccccagcatggggccctcgtcccgttttacagccgggcgggcggaggcctccgtggggcggggcaggggctactcactggctgcctccatcatgctagcccagaagcggggctgcttgtgcagggggtcgtcgtcggggccgctcagcttgtagacgtgcacgcagggcggcgtgctcacgctgctgtagtggctgacgaacatgtcgaagttctgggggtggaatggggtgatgagctccacgggatgccgctgcgccctttccactgggtgccgaccgcagatccagggtagcttccctcccgcccgcccccatccctctgcccctgcctgtcatgaaacctcaaagctccacccgctgctgcaaggggggcaccactgccatcgccccattctgcagagcaggaaactgaggccaggacgagtctgtcccccagccaggggcctatggacagtcaccgaccgctggatctgccgagggctctgccactgcacaggcctgcaagcttgctggctccacagctggcaaactgcagctgactcgtgccctggactaggggtggccctctgcatggccaccgcctgacattctagaatgttctgagaggctaagggccacatcccaccgcacacagagcggcggagccccagctcagcggacgggcactggggggctccaccacttactaccctgggattggtggtgggcaattcactcccttccctgccctacccaggaggcaggggtgggcactgcctgccccaaggcagctatgagaatgcgagaccatgagaatgaccctgagtgctgtgccgggccatgagggactgctctggctgggagctgttggacgggcacagggcggtgccgtgaggctgggcggtcccacctggctcatggagcagctatgggagaagccgggcgtggtgaggcgtacgatctcgccggccgcctcatagctgaccacgtagaggtggtgctccagcggcgtgtccttggtgccctggaagtacaccagcttggtctcctcattgacccagatctgcagggggacaggggatcctcgtgatgcgtcccagatgcccctgggcccacacccctctccacgccccacaggagtgggccccatgttcctcggactggggacgcatgctgtcctcgcccaagtctggctttagggctggagatgaaccatccctgagagatgcgcttatctggccccgtgggctgggagcagcccctggtcgagctgggaactgcgtgtcctcaggcgggacctggggcctgcattccacccccagacagctctttcctagcttgaattgggagggcccaccagagccaggtgggaaggccagggagggcaccgtgcccgaaacagaggctcagggaaacccggcagtccccagcctggtcagccgttcctccgacccaggtgcttgggttcagaagtggcagggccctaccttcctgtgggaagccccagtaggccccgaagtggtgtctcctggaggagtgggagggcagcctgcactgcgtggagcagcggggcccctccttcacctgtgctgggatgctaatggtctcgaaacaactgctgctgcccaggagcgagcaggctttggctgatgcctggaaaggagccgggaggcctcagagccccgagggaggagagggcattgcccctgtgcccagggcctgagaggccggtggaggcagctggagcgtggggtgaccagggaccctaagacgtgaagaaactgaggataagtggtctcctgggacagcggggcacaagcttccagtcgggggagcatcatgccccacaacaaggcagctggacgcatggccccagacggcctgcagaggacacacttcctctttcatgatttctaaaaggcttccaatgttttccttaatttcagggtgaaaggataaagcacgtgaatggcacaacgttcaagatgagacggggaggtgatgaaatgattggcttgtgtgtatggtagacaccgtgctgaggcctgcgaactgctgtaaagcagggtcctcacaggtgtgtgtgcgtgtgtgtatgtgtgagaatgagtatgtgtgtgagtgtatgtgtgtgtatgcgcgtgcgtgtgtgtgtgagtgtatgtgtgtaaaacacacatgcatggagcaggggaaggctgcaaggagaccctggtaccttggagccgtgcctcgccaaaacctcccattcaccgctggtcagagcaatctcttccttaatggggcacttaaattcatctggaaagaaagaaagaagggaggtgaaggggcctgggaggtgatgcaggcgcccaaaggcacccaggccaaattccacccgagcagactcaccatggagccactgaaaccccggcttgctgtgaactcagacgccagcacaggccactgcgtcagacctgccacatgggcaaggaagcctgcggggcctgttcctgccatgtggatggcaggcccagtgtttcccacgataaaccaggagacccgtggctcactcctgaaatcccagcactttgggaggccgaggcaggaggattgcttgaggccaggagtttgagaccagcccgggcaacatagggagaccctgtctctccaaaaaaaaaagaaaaattagccaggcgtggtggcgtgtgcctgtggtccaagctacttgggagattgagctgggaggactgcttgagccaggaggttgaggctgcggtgagctatggttacaccactgccactccagcctgggcgacaacaagaacccgtctcaaaaaaaaaaaacaaaaaacaaaaaacaggaagagaaaccaggaatctggattttcattggaatttcccaattttagaaccctccaaaggccacatgacatctgtgtgtggcacgggaaggggggcggggagtgtgggggaggagccaactgggcccatgacctcttaggacacattaggactttgtaaaaccagactttttttttttttttttttttttgaagacggagtcttgctcttgtcgcccaggctggagtgcaatggcgtgattttggctcactgcaacctccgtctcctgggttcaagtgattctcctgcctcagcctcccgagtaactgggattacaggcacctgccaccatgcccggctggattttgtatttttagtagagacggggtttcaccatgttggtcaggctggtctccaactcctgacctcaggtgatccacctgcctcagcctcccaaattgctgggattacaggcacgagccactgcgcctggccgactttttttgtgggggcgagggggtagagacagggtcttactatgttgcccaggctggtcttaaactcctgggctcaagtgatcctcccacctcggcctcccaaagtgctgggattccaggtgtgagccacatccccggctggaacaagatgctggtgaaagcgctagggctagagaccaaggctctgctggttttatgattgtttttttggggggtaggagggttgacttcatgtttgaattttcaccaggtaaagaatgacagtgcggggtgcatcatggcacacagcagaaacacactgagatggtttgtaactgagggctcactgtcctttcctaaccttttaggtctaaacaagctacggcaaacgtgtctgtcaggagcacgggagggcagatgtggtttccctggcgtagaggtctgggtgtggttacttgtggcatcggggcctggggaggagagcggttcccacccagccccaagacccaggctcctgcccgcgtcccgacgtgttccttctgatgcaatgtcacttggggtcacctcctcgccatgcagctgctgtctaggagatgcatggtgtgtgctgggggctgagcagggtgctgggaaatctggtgtgcccacctcacaggccgggggtccctgggggcactgcagcagcctggagggtctgtgcccctggagagtggcagctgcagctggctccacttgagaccacatttgaaacgtgagcactcgggctggcccattttcccacagggggcaaaatgagcatttacatgaaatcccaatgccagatggcggtggctgagccagccagacagaaagtgaaacaccaatgagccgaagacagctcccctttgagacgcttagccagtaagtctgcactggccgcatcccacccaggaggaccccgatgctggcctgaggcagctgtcaccccgccggtccgcatcatactcagctccgtggcagcctacagcatcacctgtccctggctcattcgcccttcagctcctgcagtcccggatgcctcgctccctggggtctctgtcccctgtgttgggggacgccttggctgctgtgtgggctctgcccccagagggcaccggaccacatctagggacatctgtggttgtcacaactggaggtgctcctggcatggagtgggtggaggccagggatgccacttggtgcacaggatggccccgccccagagaaccacccggccctggcgtccatggtgtccctgctctaactttgaagagcctgggccgggctcccggaccaccccacctctctatccagaagtgacccttgggagctctgtcccatcccgaggctgacactgtcagtgtgcaaggacacctgcaatcccaccaggagtctcggttccctgagctccaggcacgggaactggcccatacagcatctccactaccgggcacctcaacttgaacacatccaaacccgactctggattttttctctcctagaacagtccctctctgagtctgtcttagactggacctgcggagccctccgggcatccatgccgcctccctcctctctgatcccccaccctttccactgcaaacggtgtgggctcagctgtccaagcacatccagaatcagacccaccaggacagctcagccactgccatgacagcaagcctgtcgcctctcccggcccctgggcctgtgtgcaagctgcaaccagaggagtcatctgaaactgaggtgagggtgacgacttcctatttctctcggggtcaaagcccaagtcctcctggagccccagcaggccctgcaccatctgctttttctctccccaccctctcctccctctctccccctcctccctgtgctccagccacaggggcctcctccctattcctccaacatgccaggaacagtcctgcctgccccagggcctttgtacgggctgtggctctgcccagagccgtggtgtggacccctcacctccacagcatgctctccagagacgtcctcatgccctcccgttgtagaaagaaggcccctcaccctcaagcctctcgcccgactgcatttccttccaccacgcacatcacaccagaggcagcacctctaactgtttctggaatactgcctcctccactagaaggtcccaagagcagggattttcctttttctttatttacagtgaacaattccatcacagctacctacagcaggagctggcaaatgtttctacaaagggctagacagtaaatcttggccttgcacaacagtttctgctgggactacccagttctgctgctgcagcacaaaagcgaccacagacagtctctgtaaacaagtggctgtggctcagtgccaataaaactttatttatgaacacaggtggtgggccggatttgacctgtgggccgtaggtggccaacccctggttgtgctaagggcctggcacaggggaggtgctcagtaaatctgctgcctgaataagccaacagttgggtgctctaagccctgccagatcatgcagtcactggggaaggctggcttcctgccgatccctgttccttctcccgcagggtgtgctggctgagtgggggggccgaccaatgaacaaacagcatattgaaccacacgtgactaacgcgatgagtcgacagcattcgtcaggctctgctcaccttccccggggctgaagggctcactccaatcgtagccctgggattttaaaacggcggtgactttgtacaaatggcagaagccggtcttgcattcattggcgcggagaaagcagagctcgtcctctccctctgattgggggaagggatagaagatgtcatgaacctgtccggaaagcagatagaagatgcgtcagaaggtgtgggtggccgggcatggtggctcacaccagtaatcccagtagtttgggaggctggggcaggagacttgcttgagcccaggaatttcagagaccagcctggacaacatagtaagaccccacctctaaaaataaataaataaattagccaggcatggtggtgcaggcttgtggtcctagctactctggaggctgaggtgggaggatcacttaggcccaggaggtcaaggctgcagtgagctatgaccacaccactgcactctagtctgggcaacagagcaaccctgtctctaattaaagaaaaaaatagatgaggggagaggctccaatggctgccagactcaccaacccccctagaccctcttccctgccagccagggatggccaaggcctgagctcacttctccacacaagggcaaacaccacctgccattggcgctcagccttctaggacgtgggggtggggacagtgtgactccagggcccaggcgggcatacagccagcgcttgccccgcttacattgatccagacgttggtgacctcctcgtacaccacatacggctggacattcctggggacagctctggcagaggctagccgctgctcctcattctctgtgctcgggatgaacagggccggggggaggaggacgagctggagccactgctggggccggtccaggaacatggcccaggcgctaagggggaagatgcgggggaagatgagagggaagctgggagcctcagtggcctgcacagagaagctggggacgcagcgtccaaacccgtgtggaatcagggctgggcttcctgcgctggcttcacctgcacttggccaagtaaccctgcagcacccacaggcttccttcctggcacatgcttaggggaggacaggatgggtgacaagatttcatgatccaagtgttccggaaacaatggcctaagtctcacagcggcaagctctaatagtttctcctcttcactgactcttcggcccacagtcgctatcctttatttcgtagtttgctttattttatttatttatttctttatttaattttttgagacagagtttcactcttgtccaggctgaagtatagtggcacaatctcagctcactgcaacctccacatcccaggttcaagcgattctcctgcctcagcctcctgagtagctgggattataggtgcctgccaccatgcccggctaatttttgtatttttagtagagacaaggtttcatcatgttggccaggctagtctcgaactcctgacctcagatgatccgccagccccagcctcccaaagtgctgggtttacagacgtgagccaccgcacctggcctaaatgaacaatttttaaacttgaatttattttaagaggagatgttagtattctacgtggaaaagcagcacctccacacacagaacaacgaaaaccaaaccaaagggaagcatcacagggacataaaatactaactagagtgggtgcctgggctcaggcctgcaatcccagcactttaagaggctgaggtgggcgggtcgcttgagcccagaagttcaagacctgcctgggcctgggcaacatggcaagaccttgtctctacaaaaaaaaaaaaaaaagtccaggcacagtggctcacgcttgtaatcccagcactttgggaagccgaggggggcggatcacaaggtcacgagtttgagactgtcctggccaacatggtgaaaccccatctctactaaaaatacaaaaattggctgggcatggtggcacgtgcctgtactcgggaggctgaggcaggagaattgcttgaacctgggagtcagaggttgcagtgagccaagatcataccactgcactccagcctggtgacagggcaagactccgtctcaaaaaaaaaaattaaaatattagctgggagtggtgactcacacccacagtcctagcaaatgtacatatggcagcagcacataatagaattcattgttaacattccattggaggcattaaccaatgcaattagaaaagtgaacaggctaagaggcataggaatgcaaaagcaagaccctcatatctataaaaaatacaaaacattggccaggcatagtggcgagtacctatagtcccctctactcaggaggctgaggtgggaggattgcttgagcctgggaattcggggctgcagtgagttatgatcgcaccactgcactccagcttgggcgacagagcgagactccatctcaaaaaaaaaaaacaggcagaggctgaatttgcccactggggtttggggcccccgtttagggaggtggtagagttctctcctcgacatgggtgggaggctggggagtgagtacaggggagcacctctactttgtgactcagtttttctgagcctgaggtctggggacacctgaaatcccctctgtaggtctcctccacactctgggtaactggatcagcatgtcctagtggcactaacactgggactcataagtccagtgtttcatcctcagactggctgaggtcaggagggccctttggacactggtctgaggcctgtcctggcggttgcactgcgggaagacgtgagcagatggaaggaatggcacggaaggccaggaggcagcttcggtggctgcccagggcccagggccctgcaggtgaattccttgggttccagccagagacactcactatttgccatcccgggtccacccggccctggcgatgtactccaccttcgggaacagcgagctgaagggctgcaccagctccttctcctgggtcgagacgatct

SEQ ID NO: 840 - DNA, 210 bp, Homo sapiens
ttcacgccattctcctacctcagcctcccaagtagctgggactacaggcgccctccaccatgcccggataatttttttgtatttttagtagagacggggtttcaccgtgttagccaggatggtctcgatctgctgacctcgtgatccgcccgcctcagcctcacaaagtgctgggattacaggcgtgagccactgcacctggcccaacat

SEQ ID NO: 841 - DNA, 737 bp, Homo sapiens
aaatctatttttttttttttttttttttttttttttgagacggagtctcgctctgtcgcccaggccggactgcggactgcagtggcacaatctcggctcactgcaagctccacttcccgggttcacgccattctcctgcctcagcctcccgagtagctgggactacaggcgcccgccaccgcgcccggctaattttttgtattttttagtagagacggggtttcaccttgttagccagatggtctcgatctcctgacctcatgatccacccgcctcagcctcccaaagtgctgggattacaggcgtgagccaccgcgcccggccgcaaaatctattttttaaagtgaggtgcccagaatgaagaaaagatggatggggacccttccctccctcaagcaggtcagattgctgggaatgatggtccaggctcctggcccccatcctttcctgtcaaggctacacctaagtgagggtaaaaaatcctggagaaaaccactgcaggaggcagaagcctccccagtgtgtcctacttctgaattctgttattggaccaaaagagccctctgctcttctcctccatatttttcactgttgctctctgggtaatcagaggcagagggaaaaaaaagtaacctttcctgatactcttgcccttgtattttgttcaaaactctctgttaccaaaggaatgattaggaacctcagttggaggttctgaaatcaaaatcattgcgttg

SEQ ID NO: 842 - DNA, 138 bp, Homo sapiens
tttttttgtatttttagtagagacggggtttcaccgtgttagccaggatggtctcaatctcctgacctcatgatccacctgcctcggcctcccaaagtgctgggattacaggcgtgagccaccgcgcctggcctagaa

SEQ ID NO: 843 - DNA, 4702 bp, Homo sapiens
tttgtttgtttgagacggagtctcgctcttttgcccaggccggagtgcagtggcgtgatctcggctcactgcaagctccacctcctgggttcacgccattctcctgcctcagcctcccgagtagctgggactacaggcgcccgccaccatgcccagataattttttgtatttttggtagagacggggtttcactgtgttatccaggatggtctggatctcctgacctcgtgatccgcccgccttggcctcccaaagtgctgggattacaggcgtgagccaccgtgcccggcctgttctttaaaaagaatattagattatattttctaaatgtgccaagtatctaagaatatattctttcacctcctgctgataagagttatacatttaaccttaagcaaatctgccaagattctatgtcatttatgctttgatttatgtgagtattaatgtagtttctgtgactattgtatggttatatataccctccacctagtaaaacagttccatattcctggaaatggtcttttacatcccacaaatgtagctggaaaggaataatataaatactaatggtttgagagacaactagtcttgacatgtcttggttgaatagtgttctataagcaacaatatatgaaatactagacacacccattaaaagtagaaaatacccactactgttctaaaattattctgcaagatctcaccaatgcaatgagacataaaacagaaataatgggtgtaattattgaaaattggagataaaatttttattacttgcaaacaaaattctctgtgtcaaaaacctgataaattaaacaatacaattaatatgtttaatagaactaattacatatgagaggcatccaaaatccattttttctatacaaacatggtttgatatacacagtcttgttttatctgtgtattaattggttgatgaaataataaatggaaaaatcaagtatgcattatcaggttaaagaagcaggagagacagagccataaaaacaaagagagaagaatgttgtaaggagggcttaacgaccaggataaatgttgtagagagatcaattaaagtgatggcctagagatcacaggcttcctttggcagagccatgttggtgaagtgaaggaagtggaagccagaccacaatggttgaagaatgaatgtaatgtaagagccaagacatttatttgagtttgatagtaatgaaaaaggacgagaattttcttcttgctgttgtttttgtcatttcatgttcaaaaccctttatctcccatgtgggactgaaaactccaagatgggatctctgtttctgtgaggcctgtagtgcttagtacatccttgaatgtgtgaggctctcattggtataagtttaattcctgactgtggatgaaagctttaaaactttgtgggcaaaatacagaatgaatttcagtgagttcccatgtattaaacaaggtggcgctggctggagacatgctgtccctgtgcccacaggagtagcagtgctgtgctcatcttcctgacccgctcttcacagtcttcaccgcctttcttcaggagtctcccctttggcttttccacagctatgaaacccacgtagtcggacaccctgatgcttctcctgcagggcgtgtgatgaggaggtgagcttggctttggagtgctgggaacctgaggaattgccaaggacccagagcccagccctgaccacccagagagcccaaaacacaatgaacaaattgaatttccacaacagagtcatgcaagaccgccgcagcgtgtgcattttccttcccaatgatgaatctctgaacatcatcataaatgtgagtagatctcaatataattctgatagctggaggatagtgtattttcaggtttgctggaggaaaaaaactggactttaaataattaagacaaaatgattgtattaattgacttctatgcttaatcactaatttcactttttatatttcccttgacttttgggggagaaatagtctttgtctcaaaagtgggcttcagtgacctatgggtctgatgaagcaaccagggataatgagacaaggatatttaatggcaacatgccagcaattattattagttaattgaaagcgtttatgattttggcctggggccaatgctttccccctctgctgggctaacatgtgggtaagggagaggaaaagctttgtttcactttttaaataaaagtattacgtaactttgaaatttgtataaaattaaaagatagtaaaaacaactattctaacagaattcaaaacctgttatgcttcagtggagagattattcaagataagtctgtgggaaattgggagtacatttctactggcaaagttagtgataactatgcacttctgacaaaatgtgaaatggggggtatgggcgtgtcatatcatcatggtgcagatacgtggatgtgtgcttccaaacaatggcaacctaactgactgctggaaccatacaaaatacctgaaactactcagaaagaaggtgaaaattgcatgcaaaaattatttgaaaaatattgagctaacacaacatgaattttgaattataagtgaggtattgtaactcacctacagatgtgttttttgtaatcaatattcatggactcagactacacagtaaaagcttacatagaaatcattctatctaaactttctggatatgaaagtaacttactatgtgttttgctactatatctttatatgaatttaaatcacatttccaagtggcttacagtaatcaaggttaatttgtcacaaggaagatgcaaattaaaaccacattgcaatatcactgcacacccactagtacggtttaaaagaaaaaaaaacaaaatatcaagtattggtgaaaatgtggagcaaacagaactctttttcaataatggcgggtatgtaaagtggcacaaacactttggaaacctgtttggcattataccatactaaacctgaacacatgcattgtttatgacccaggaatgcccctcctgggaaccaacaacaacgcatatatgtgttgcatatgttcaccaaaagacatttacaagaatgttcatagcagcactatttgaaatcgcccccaagtagaagatgcacaaatatttaacagtagttagataaagtgtggtacgtttatgcaatataataccatatagaaacgagagtgagggatctgcaaactaatatgcaactgtacaaatgaatcccacaaatataatgttgggtggcagaagccagatgcaaatgaatacatgctgtagatttcattcttttacattaaaaaagctagtcacacaaagttatgctgttagaagagagtgatttggtcgggcgcaggggtagttacaggaagggagtacacggagatttctggttgttagttatgttcagtgtcaatctaggtgctaaacaggtacaataaagattttagaattcatcaatttgcacacttatgatagatgcactttcctgtatgtatatttcaatacaatcttttaaaaagtaaaatgacaaaaagacactattaacaaaaatgacatattacattaactgttatactaaggaaaatataaaaatgagttctataacaggggctctgcaggtcatgtggtcatgccaaggaccatatgtgctcaagattctcatgacattttggaaggaggttgggctttctttatctttcctttcttctctcccttcccttcccttccctatttttaaacctaggtttggtattttcctggggtgatggtgactttggaaaattgggccggggcggaagtgaaggctgcaacattccccagaacattgagagactaaatggacagggggtgtgccagattgagtgtggagctcagttcctactggcgctcaccaagtctggagtggtgtggacatggtacgtaaacgtcctccccatcacagtgtgcgtgcttgtgccggtgcgtgcagggaacttgggcctcgccccaggaccaccccggcgtgattgtgacctgtcatatttttacttatgcatgcatctttgtcctttaaaggatattgagtcgggattagtgacaatagtacaagaagaaatttcctattgtaactgggtcattttgaaaatactagaaaaattttaggccacttacctttcctgtttgggcgagatttataggaagtgtttcttctgctgaagcctaaggataaaatgagagcaaaatagccttctgaatcctttgatcctgagaaagttaacatgtatttcttgttaaagcttattatattaatgtgcaaaagagcaggtgcccagactggccttggatgctgtgtcaggccttgctgcctctggtcataacattggcactatttatttatttatttatttgagatggagtctcgctctatcgcccaggctggaatgcagtggcacaatctcagctcattgcaagctccgcctccggggttcacaccattctcctgcctcagcctcccgagtagctgggactacaggtgtctgccaccatgcccggctaatttttttgtatttttagtagagatggggtttcaccgtgttagccaggatggtctcaatctcctgacctcgtgatccacccacctcagcctcccaaagtgctgggattacaggcgtgaaccaccgcgactggccaacattggcac

SEQ ID NO: 844 - DNA, 299 bp, Homo sapiens; identical to SEQ ID NO: 831

SEQ ID NO: 845 - DNA, 295 bp, Homo sapiens
tttttgagacggagtcttgctctctgtcacccaggctggagtgcagtggcgcgatctcggctcactgcaagctccgcctcccaggttcacaccattctcctgcctcagactccagagtagctgggactacaggcacccgccaccacgcccggctaattttttttttgtattttttagtagagacggggtttcatcgtgttagccaggatggtctcaatctcctgacctcatgatccgcctgcatcggcctcccaaagtgctgggattacaggcgtgagccaccgcgcccggccca

SEQ ID NO: 846 - DNA, 4364 bp, Homo sapiens
tttttgtttttgagacggagtctcgctccgtcacccaggctggagtacagtggcacaatctcggcttactgcagcccatgcctcccaggttcaagcaattctcctgcctcagcctcccgagtagctgggattacaggcgcgttaccaccacgcccagctaatttttttatttttagtagagacggggtatcaccatgttggccaggctggtctcaaactcctgacctacagtgatctacctgcctcagcctcccaaagtgctgggattacaagcatgagccactgcgcccggccgagaaagaagtttaatggtaggataattaaagagatgggaggaaacctcaaatctatctccccaaggaatttgaggttagggttttaaagggttttggagtgggccaaagtgtggagattgttgattggttgaagagtgcaggatgaagtcataggacttggagatgaagaaactgtattcttggccaggttgatgcctataatcccaacactttgggagcccaaggcaggaggattgcttgagggaagtagttcaagaccagcctggctaacatagggagaccccatctctacaaaaaattttttaaaattagctgggtgtagtggtatctacctgtagccccagctactaaggaggctgaggctggaggattacttaagcccaggagtttgaggctttagtgagctatgattgtgccacttcactccagcctggctgaggagcaagactctatcttaaaaaaagaaacaagtatattcttgtgctgatttggttcctctctgagggtcttgaaactggttggcttcagcctttccactagaattcaggatcctgagaatatcttaagcagtctttaaacgaaagccttataattccaatgtcagagatcctatctataggaacaatgggaatgcaaatagtcagtatctagtactacatgactttcagcaaaaggaaagtgggccaaagggcagcctgattaatttttaactatatttctgtccagaacctggcatgcaattcatgtcaccccactggggatattttcagagttatatttatcgagtgacttgaccaaaaccaataagcccttaatggcttaactgtgggtataaggggtgtcttcatagagggtgcaaagatacagccctccccccaactgccaagatccagaaccactcccagagatagccaaaagacagagaatcctctgagagctggcaacagttggtaggaccctagatacaagtagggtgcaacccccatttctgtccggccatattattgggggctgccaacctttcagttggctgcctgcaaatacaggcttgataacctgtgtgcccggacaggtagaaagccaagctaagctttcaggacacgagaccaacaggaaagcaaaagctgtctctgagagggaaaggatcaagccagagtcataatccaaaaaaatcaattggtacagatgttttcctcctgctaatcaaagttagaaagtaaggagcaaagaaaagtgtttgccttcctcttctctactaggtgctacagacagatccaggagagttgactttggtaagaattcttacccttagccagcttctgtcagtttccccgggatctcattggcaggttccagagtgagcagggtaccccagagatcctatcctcatcaccagaaactctaggggaggaaagataattttctctctacccttcatagttgttaattgtgatggactcctgtaacaaaagatagattcacaagagaaaaacagtttaatagcttgtacagcagtccccccttatctgaggagagtatgttccaagacccctggtagatgcctgaaatcacggatagtaccagaccctatatatacattttttcctatacatacctatacttcatttataaattagacacagtaggagattaacaacaataaaataggacaattgtaacaatttgctagcattactactcttgtgctttggggccattgttaattaaaacaaagattacttgaacagaagcactgcagtactgcaacagttgatctgataaccaagatggctactaagtgactaatgggtggtatatacagtatggatgtgctgggcaaaggaatgatttgcatcttgggtgggatggagcaggacggcatgagattccatcatgctattcagaatggcatgcaatttgaaagttaggaattgtttatttctggaattttccatgtaatattcttggaccatgttgaccacaggtaactgtacccagggaaaacaaaactgcttataaggggggactattatatgcctcatgtatacatccaaccagggaaggatgagtaaatctccccttctgttgtatttgattgatttttttttgtagtataccgttttgattctcttctcatttccttttatgcatatcttttttttaaatagaagcaaagtatcactgtgttacccaggctagactagagctcctgggttcaagtgatcctccctcctcagcctcctgagtagctgggagtataggtgcacgccacctcgcctggcttattttcatatatatatcttttagggtttttttcttagtggttaccctggggattatgatgggcatcttaagtttacaactaactagtatgaattaatactaatttagcttcaatagtatatataaaaactgcttctatacagctctacctctcctcctttatgtagttattgtcccaaagtacatctttatatattgtgtgcctatttagagatgaaatctttctcagatttcttagtctgaaatagccaatgagacattcttaagttgaaagcaatataaatattggcacgagttgcttttagatattcaattgttttgtgttaatttaaaaatcccttctgtgcataaacgcattttcttttcattaactatatgtcagaagtttgtttcgttggtttgtttttgtttgagacagagtttcactctgtcacccaggctggagtgaagtggcgtgatcttgcctcactgcaacctccatctcctggattcaagctattctcctgtctcagtcacccgagtagctgggattacaggcatgcgccaccacgcctggctaatttttgtatttttggtagagacggtttcaccatgttgaccaggctggtctcgaactactgacctcaagtgatctgcccgcctcggcctccaaaagtgatgggattataggcgtgagccaccgcgcccagcctatgtgtcagaagttatttttttaaacatttggcagatagaattttttattaagtacaaagaaatttttcctttgttgatttgtttaaatcattggtgtgtgaatatcttgtgaaagcattttaaaaagtggtcataagattcttcaggccgggcgcggtggctcacgcctgtaatcccagcagtttaggaggccgaggtgggcggatcaccaggtcaggagttcaagaccagccttgccaacatagtgaaaccccgtctctactaaaaatacaaaaattagctaggcatggtggcgtgtgcctatagtcccagctactcgggagactgaggcaggagaatcgcttgaatccgggaggcggaggttgcagtaagctgagatcatgccactgcattccagcttgggtgacagtgtgagacttcttattaaaaaaaaaattatttgtaatggttaacattatacctaaaagggcagtatggaatttgctggatttttaaaagataacacaagtgagaagcaaagacaaattttcttagaatcaggcctacataatgaattagacttctgtcctaaaacacaagcagcaattcagactatggaattagcatctttcaaaggtttatttctaattcctctttgagttaaggattatgaggcagaaagataactgtataagcattttcctctttatctttcaaacatattaaatttttaacataatttatataatgttcaggaatttcaagtatcctacttaatatggttttttttttttttttttttttgagacggagtctcgctctgtcgcccaggctggagtgcagtggcgcgatctcggctcactgcaagctctgcctcccgggttcacgccattctcctgcctcagcctcccaagtagctgggactacaggcgcccgccactacgcccggctaattttttgtatttttagtagagacggggtttcaccgttttagccgggatggtctcgatctcctgacctcgtgatccacccgcctcggcctcccaaagtgctgggattacaggcgtgagccaccgcgcccggcccttaatatggttttgcatgtgattgttt

SEQ ID NO: 847 - DNA, 4721 bp, Homo sapiens
ttatttatttatttgtttgtttgtttgtttgagacggagtctcgctcttttgcccaggccggagtgcagtggcgtgatctcggctcactgcaagctccacctcctgggttcacgccattctcctgcctcagcctcccgagtagctgggactacaggcgcccgccaccatgcccagataattttttgtatttttggtagagacggggtttcactgtgttatccaggatggtctggatctcctgacctcgtgatccgcccgccttggcctcccaaagtgctgggattacaggcgtgagccaccgtgcccggcctgttctttaaaaagaatattagattatattttctaaatgtgccaagtatctaagaatatattctttcacctcctgctgataagagttatacatttaaccttaagcaaatctgccaagattctatgtcatttatgctttgatttatgtgagtattaatgtagtttctgtgactattgtatggttatatataccctccacctagtaaaacagttccatattcctggaaatggtcttttacatcccacaaatgtagctggaaaggaataatataaatactaatggtttgagagacaactagtcttgacatgtcttggttgaatagtgttctataagcaacaatatatgaaatactagacacacccattaaaagtagaaaatacccactactgttctaaaattattctgcaagatctcaccaatgcaatgagacataaaacagaaataatgggtgtaattattgaaaattggagataaaatttttattacttgcaaacaaaattctctgtgtcaaaaacctgataaattaaacaatacaattaatatgtttaatagaactaattacatatgagaggcatccaaaatccattttttctatacaaacatggtttgatatacacagtcttgttttatctgtgtattaattggttgatgaaataataaatggaaaaatcaagtatgcattatcaggttaaagaagcaggagagacagagccataaaaacaaagagagaagaatgttgtaaggagggcttaacgaccaggataaatgttgtagagagatcaattaaagtgatggcctagagatcacaggcttcctttggcagagccatgttggtgaagtgaaggaagtggaagccagaccacaatggttgaagaatgaatgtaatgtaagagccaagacatttatttgagtttgatagtaatgaaaaaggacgagaattttcttcttgctgttgtttttgtcatttcatgttcaaaaccctttatctcccatgtgggactgaaaactccaagatgggatctctgtttctgtgaggcctgtagtgcttagtacatccttgaatgtgtgaggctctcattggtataagtttaattcctgactgtggatgaaagctttaaaactttgcgggcaaaatacagaatgaatttcagtgagttcccatgtattaaacaaggtggcgctggctggagacatgctgtccctgtgcccacaggagtagcagtgctgtgctcatcttcctgacccgctcttcacagtcttcaccgcctttcttcaggagtctcccctttggcttttccacagctatgaaacccacgtagtcggacaccctgatgcttctcctgcagggcgtgtgatgaggaggtgagcttggctttggagtgctgggaacctgaggaattgccaaggacccagagcccagccctgaccacccagagagcccaaaacacaatgaacaaattgaatttccacaacagagtcatgcaagaccgccgcagcgtgtgcattttccttcccaatgatgaatctctgaacatcatcataaatgtgagtagatctcaatataattctgatagctggaggatagtgtattttcaggtttgctggaggaaaaaaactggactttaaataattaagacaaaatgattgtattaattgacttctatgcttaatcactaatttcactttttatatttcccttgacttttgggggagaaatagtctttgtctcaaaagtgggcttcagtgacctatgggtctgatgaagcaaccagggataatgagacaaggatatttaatggcaacatgccagcaattattattagttaattgaaagcgtttatgattttggcctggggccaatgctttccccctctgctgggctaacatgtgggtaagggagaggaaaagctttgtttcactttttaaataaaagtattacgtaactttgaaatttgtataaaattaaaagatagtaaaaacaactattctaacagaattcaaaacctgttatgcttcagtggagagattattcaagataagtccgtgggaaattgggagtacatttctactggcaaagttagtgataactatgcacttctgacaaaatgtgaaatggggggtatgggcgtgtcatatcatcatggtgcagatacgtggatgtgtgcttccaaacaatggcaacctaactgactgctggaaccatacaaaatacctgaaactactcagaaagaaggtgaaaattgcatgcaaaaattatttgaaaaatattgagctaacacaacatgaattttgaattataagtgaggtattgtaactcacctacagatgtgttttttgtaatcaatattcatggactcagactacacagtaaaagcttacatagaaatcattctatctaaactttctggatatgaaagtaacttactatgtgttttgctactatatctttatatgaatttaaatcacatttccaagtggcttacagtaatcaaggttaatttgtcacaaggaagatgcaaattaaaaccacattgcaatatcactgcacacccactagtacggtttaaaagaaaaaaaaacaaaatatcaagtattggtgaaaatgtggagcaaacagaactctttttcaataatggcgggtatgtaaagtggcacaaacactttggaaacctgtttggcattataccatactaaacctgaacacatgcattgtttatgacccaggaatgcccctcctgggaaccaacaacaacgcatatatgtgttgcatatgttcaccaaaagacatttacaagaatgttcatagcagcactatttgaaattgcccccaagtagaagatgcacaaatatttaacagtagttagataaagtgtggtacgtttatgcaatataataccatatagaaacgagagtgagggatctgcaaactaatatgcaactgtacaaatgaatcccacaaatataatgttgggtggcagaagccagatgcaaatgaatacatgctgtagatttcattcttttacattaaaaaagctagtcacacaaagttatgctgttagaagagagtgatttggtcgggcgcaggggtagttacaggaagggagtacacggagatttctggttgttagttatgttcagtgtcaatctaggtgctaaacaggtacaataaagattttagaattcatcaatttgcacacttatgatagatgcactttcctgtatgtatatttcaatacaatcttttaaaaagtaaaatgacaaaaagacactattaacaaaaatgacatattacattaactgttatactaaggaaaatataaaaatgagttctataacaggggctctgcaggtcatgtggtcatgccaaggaccatatgtgctcaagattctcatgacattttggaaggaggttgggctttctttatctttcctttcttctctcccttcccttcccttccctatttttaaacctaggtttggtattttcctggggtgatggtgactttggaaaattgggccggggcggaagtgaaggctgcaacattccccagaacattgagagactaaatggacagggggtgtgccagattgagtgtggagctcagttcctactggcgctcaccaagtctggagtggtgtggacatggtacgtaaacgtcctccccatcacagtgtgcgtgcttgtgccggtgcgtgcagggaacttgggcctcgccccaggaccaccccggcgtgattgtgacctgtcatatttttacttatgcatgcatctttgtcctttaaaggatattgagtcgggattagtgacaatagtacaagaagaaatttcctattgtaactgggtcattttgaaaatactagaaaaattttaggccacttacctttcctgtttgggcgagatttataggaagtgtttcttctgctgaagcctaaggataaaatgagagcaaaatagccttctgaatcctttgatcctgagaaagttaacatgtatttcttgttaaagcttattatattaatgtgcaaaagagcaggtgcccagactggccttggatgctgtgtcaggccttgctgcctctggtcataacattggcactatttatttatttatttatttgagatggagtctcgctctatcgcccaggctggaatgcagtggcacaatctcagctcattgcaagctccgcctccggggttcacaccattctcctgcctcagcctcccgagtagctgggactacaggtgtctgccaccatgcccggctaatttttttgtatttttagtagagatggggtttcaccgtgttagccaggatggtctcaatctcctgacctcgtgatccacccacctcagcctcccaaagtgctgggattacaggcgtgaaccaccgcgactggccaacattggcac

SEQ ID NO: 848 - DNA, 5635 bp, Homo sapiens
taacattttaaaaattgctgtattcaaaattaataataaactttggggtaaataagctttaaaacaaaagtacataagcaaaaataaataatttacaccaacccactaacctaattttcagagtaaagccatttccaattacagtactgttatcccgggcaccagcctgtggttaaactttgatgattcattatttttaaaaaacagtaataaaaattgaatactaagcaaaatctttaacaaaaccactggatttaactttttaattttaaataaccaaattttataattttgtacataattcaatgtaatgccaatataattagcatttcagcttgaagagctggtttttaacagggatgggaaactataaattattcaaacagtctgcaaaccatgagatacaaataaaaatggacaagcatatagtagaacaaaaaccgcagacactctactaactggggaaatatctgaaggctttacaccctttattatccataatggcttttggaattacgattgtgtgacatatagaacctttgatattttagatacagcctttatttttttttccacgggaagttaaaaatccatcataagactccataagactttactagtcttgcatgtagactctaggagtttgtgatctgataaaagagtaacatgaaaatttactgtattgccctaatttcatacttccttgtacacaatgaatcactctgagaatctattccaagggttatatacacaaaagtgtcaagaataaaatgttctccactctcgcataaaaatgtgtacagtgtatcaggaatggaaaacttctaattttcctgggcccgggcttcatggatttctgctgccagaagatgaaagactccttctgctttattgctccattgttctgaggattaatcatccaaccctggcgtttctccttgttggattctagacgctattctgatggcttcttccagagatggctgttctccaagctgaaacaggaacacacacatcaaacgctaacaattcaaaagccacagtcaagaaaatgccaaagaaatgttatatgccagaagtgaaacttctctctgtaattctgacacttgggattgttaaaatactactgctaactcaaacattaagagaacaaaacaatttcctgcaggggagaataatgcaatgcaatttctttttcttttttgaatttcaaatcctatgtgcagccaggcctggtgatatgatgaggtctcagcggggcatggtggcccatgcctgtaatcccaacactttgggaggtggaggcaggcagattgcttgagcccaggagttcgagaccagcctgagcaacatggcaaaacgccccatctctactaaaaaaatacaaaaattggctgggcgcggtggctcacgcctgtaatctcagcacttcgggaggccgaggcgggcagatcacgaggtcaggagattgagaccatcctggctaacacagtgaaaccccatttcatttctactaaaaaatacaaaaaaaaaattgctgggcgtggtgatgggtgcctgtagtcccagctactggggaggctgagggaggagaatggcatgaacccaggaggcggagcttgcagtgagccaagatggtgccactgcactccagcctgggtgacagagcgagactccgtctcaaaaaacaaaaattagctgcgcatggcagcgtgcacctgtactcccagcctgccgtgcctggcctgcaatttacttgggattttgataaaatcttcatacagtctggccatggtggctcatgactataatcgtagcactttgggaggctgaggcaggaggatcacttgagcccaggagttcaagaccagcctgagcaacatagtgagaccccatctctatttatttttacataaataaaaactaaaaaaaaaaaaaattcatacatgcaagagacaaaagatgcttacctcagccaacaaaagagagcttcttgagcctttagcttctatacccataaactacataaagccaacagctgacatttcctggagtgtgttctaactctttatcaagtaaacacgtgggcggaaaaaaaatctccctaaggacaggtaatctgcacctagcccctaggattctattttactttacattctaattttttttttgagacagggtctcgctctgttgcccaggctggagtacagtggtgcgatcttggctcactgcagcctcaacctcccttgctcaagtgatccttccacctcagccacctgagtagctgggactacaggtgcacaccaccacacctggctaatttttgtatttttgtagagatggggtttcgtcatgttgcctgggctggtctcttattttttgagatggggtctcatttgttacccaggcgggagtgcagtggcacaatcttggctcactgcagcctcaaatctcctgggtacaagtaatcctcctgcctcagcaccccccaagtagctgggcactacaggcagccgtcaccacacccagctaatttttgtgttttttgtagtgatggttttcaccatgttgcccaggctggtctctaattcctaagctcaagctacctacctgtctcagcctcccaaagtgctaggattatagggatgagccaccatgcccggctgcacctaagattctaaattctctgcttcccagagaatgattccttctaagtcttctgacattccccactttaaaatgggggctgtgcaaggattctcagaggacttatttaggatttgtgtttccactaggtttttctctaaggagtagctcttaagtgctttacagacccctgcctaattagacttttattttgagagtaaagatgcctgggtgggtgcacacagggatatatacctgaaggttttttttcttgctataaattcccctagaatatgcaaagatgggtagagaacaaagtgctggtctttttgagtccacctcaaatacaccgatttccttaaagtaggctaggtgatagagattattctacaccttgcctcctgtaaaggttatacacgaagcacagtgtacaaagttgaaagctatgagcagcactgctgtcgactgaggacagtatgccttggtactcacctgaactgcaatctgggtgccattggatgttgctactaaggtcagaggtctggtttctgtggttactaagtgatggctatgctgctggtgccccatttctgatgaggcagtatggaatgctgccaagtcttgagctacaattgcaaccttaagcaaaacaaaacaaaccatacacataaagaattaaacctgcgatttaaataggttaaagtccacttaatacaatggatttcttcaaattgaaaaggaaaaactcctctgaccatagacttgtcaaagcctatattgaaaggaggtttatttgaggaagttgaggctcattatctaaggttatgaagtgagccaacggcaaaatagggtagagaacactggagaaatggatctgctatgccaggccccattagccagggagatgtggctgtacctagattctattacccctaagtgactgcttgggaagttatgtatgtggactaatttgcacctcaaatgtccatttttttttcctgagattggctcataggagaaaataaatgatttttttcctctttacttgtcgtatttaaaattagatttccatttaactaggaaaactgaaaggaccagtggtactactgacaaacagcatctcatctcatactcatttcccattttagactccatggaatcttcccatactcctcttgcagcatctagccaggaggattaaaagggcttttgtggctcttataccacaagtacaactttttaaaaaaatgcagataacatggaaaatggcaattaactatttctgttagatgatattctaaaattttactcagccaaattcagagaaagaatagattaaaaatgaaaactgctgttttacttggctattcatccactaaaaatgctacattttaagctaatagatatttagcttggatcaatcccaataatgttccctaattctataagaaaaacagatttcattccagcaatgtctaagtagcttatattgggctaaccttcctgcagataacaattataaacccttgacaaaaatatgaaaaagcaactatatgaaggctttgaggagcaatgacaagcaggaagaaactagaggggattctcaaaagaagggagtcacactgtgttatatctgtgtttaaatagatttcacactgagggcactacccagtttgagcagcctggggcaacttaaggttaaagataatggagtccagggctgccagaatagcagtacagagaagaatagcccagaaagcaaagaatttgagtgggaagcccccaaatctttgtataaactgtcctcaaatcctttttttttttttttttttttgaggtagtctcgctctgtcgcccaagctggaatgcaatggcttgatctcagctcactgcaaactctgcctcccaggttcaagcgattcttctgcctcagcctcccgagtagctgggattacaggcatgcggcacctcactcggctaatttttgtatttttagtagaaacagggtttctccaagttggtcaggctggtctcgaactcctgacctcaggcgatccacccgcctcggcctcccaaagcgctgggattacagacgtgagcccccgcgcccagccagaataataattattattattatatattttttgagacggagtctcactttgtcgcccaggctggagtgcagtggcgccgtcttggctcactgcaagctccgcctcccgggttcacgccattctcctgcctcagcctcccgagtagctgggattacaggcgcccgccatcacgcccagctaattttttgtattttttagtagagacggggtttcaccgtgttagccaggatggtctcgatctcctgacctcgtgatccgcccgcctcagcctcccaaagtgctgggattacaggcgtgagccaccgcgcccggcctcaaatccttaagacccctcaacacaaatatttccggtttccgacaacattccaacaagactggcaaagcagcatctagaaggctgagaaactaaggagagctttcagtgcaactcaccaaagagagacggaatttgaagtttcaatcttaccaagttaggaggtaagattacgtcccaggactaaatattcaccctaagaccttatagcaacactgaaacagacctgccttaacaaagtacaaaacccagccacaacacgtaatttaactagctaatagaaaaaaaaaatcaatattctccagagaaagataacaaaattcagaatctctataatgtgtcatccacaaggtccagaatgcaattttaaaattacaattgcttagccaggcatgatggctcacgcttgtaatcctagcactttgggaggccgaggtgggtggatcacctgaggtcaggagttcgagatcagcctggccaacatggtgaaagcccacctctactaaaaaaaaaaatacaaaaaattagctgggcatggtggcgggtgcctgtagtcccagct

SEQ ID NO: 849 - DNA, 209 bp, Homo sapiens
ttcacgccattctcctgcttcagcctcccaagtagctgggactacaggcgtccgacaccatgcccagctaatttttttgtatttcttagtagagacgggtttcaccgtgttagccaggatggtctcgatctcctgacctcgtgatccgcccgcctcagcctcccaaagtcctgggattacaggcatgagccaccgtgcccggcccaaaa

SEQ ID NO: 850 - DNA, 139 bp, Homo sapiens
ttttttttgtatttttagtaggcacggggtttcaccatgttagccaggatggtctcgatctcctgaccttgtgatccacccgcctcagcctcccgaagtactgggattacaggcgtgagccaccgcgcccggcctaaaa

SEQ ID NO: 851 - DNA, 108 bp, Homo sapiens
gggtttcactgtgttagccaggatggtctcaatctcctgacctcgtgttccactcacctcagcctcccaaagtactgggattacaagcgtgagccaccgcgcctggcc

SEQ ID NO: 852 - DNA, 138 bp, Homo sapiens
tttttttttgtatttttagtagagacggtgtttcaccgtgttagccaggatggtctcaatctcctgaccttgtgaaccaccctcctcagcctcccaacgtgctggaattacaggcgtgagccaccgtgcctggcccaa

SEQ ID NO: 853 - DNA, 323 bp, Homo sapiens
attttttttttcttttttttggagacggggtctcattctgtcacccaggctggggtgcagtggcacaatctcggctcacggcaagctctgcctcccgggttcacgccattctcctgcctcagcctcccgagtagctgggactacaggcgcccgccaccacgcccggctaattttttgtatttttagtagagacggggtttcaccgtgttagccaggatggtctcaatctcctgacctcgtgatccgcctgcctcggcctcccaaagtgctgggattacaggcgtgagccaccgcgcctggccaacaatttttttttttttttt

SEQ ID NO: 854 - DNA, 358 bp, Homo sapiens
ttttttttttttttttttttttttttttgagacagagtctcgctctgttgcccaggctggagtgcagtggcatgatcttggctcactgcaagctccgcctcctgggttcacgccaggagttcacatgggttcacaccaggagttcacacctgggttcacgcctacctcagcctcccgagtagctgggactacaggtggccgccaccacgcccggctaattttttgtatttttagtagagacggggtttcaccgtgttagccaggatggtctcgatctcctgacctcgtgatccacccgcctcggcctcccaaagtgctgggattacaggcgatgagccaccgtgcccggccaggaatc

SEQ ID NO: 855 - DNA, 427 bp, Homo sapiens
gaatttgtctaattcctttttttttttttttttgagacggagtctcgctctgtggcccaggcgggagtgcagtggcgcaatctcggctcactgcaagctccgcctccagggttcacgccattctcctgcctcagcctcccgagtagctgggactacaggtgcccaccatcacgcccggctaattttttttgtatttttagtagagacggggtttcaccgtgttagccaggatggtctcgatctcctgacctcgtgatccgcccgcctcggcctcccaaagtgctgggattacaagcgtgagccaccgcgcccggccgagaatttgtctaattcagatactcccaaataagcagatcattttgtatgtaaaatggaaatatgtccattctgttctgtgacataatataacttgatgaatctgagtctt

SEQ ID NO: 856 - DNA, 549 bp, Homo sapiens
gctcactgcaagctccgcctcccaggttcacgccattctcctgcctcagcctctggagtagctgggactacaggtgcccgccaccacgcccagataatttttttttttttgtattttttagtagagatggggtttcaccgtgttagccaggatggtctcaatctcctgaccttgtgatccacccgcctcagcctcccaaagtgctgggattacaggcgagagccaccgcgcctggcccaaaataagaattttttttttttttttgagatggagtcttgctctgttgcccaggctggagtgcagtggtgcgatctcggctcactgcaagctccacctcccaggttcacgccattctcctgcctcagcctcccgagttgctgggactacaggcgcccaccaccatgcctggctaattttttgtatttttagtagagatgtggtttcaccatgttagccaggatggtctcgatctcctgacccgtgatctgcccgcctcggcctcccaaagtgctgggattacaggcgtgagccaccacacctggcccaaaa

SEQ ID NO: 857 - DNA, 5059 bp, Homo sapiens
gagaatctttttctttttttttctttttttgagacggagtctcgctctgtcgccgaggctggagtgcagtggcgcaatctcggctcactgcaagctccgcctcccaggctcccgccattctcatgcctcaggctcccgaatagctgggactacaggcacccaccaccacacccggctaattttttgtatttttagtagagacggggtttcaccgtgttagccaggatggtctcaatctcctgacctcgtgatccgcccgcctccgcctcccaaagtgctgggattacaggcatgagccaccgcgcccggccgagagtctttaattttctactttgtatatttctatattaactttgaaagaacacccatttattaccttttaactagtaaaagcaataaaaataagaaaagttaatactatcatagtaatactattgttgtcattccaagaaaaaaatatattaaaaatatttatttgaaaaaataaataaataaaaataaaaatgagattgaaaggaatggccagagaagtaagacaaagaagaggcatgatgggtcacagaagtcaatgtatcgaagtatttcaaggagtatttcttgtcatattttgcttgacaggtcaagtgagatgaggactaaaagtatccattggatttagtgatttgatagtcattggtgaccttatcaccacaaactgaggaagtcagattagagtgtgttatattaataagggagtaagaagaaggaaatggaaaaagaatagttatgtcaagaagtttggctacaacagatagaagggtgttaggtggtagctagagagggatgtgaactcaagggaaattatttttgtaagactggagaaactagagcatatttaaatgtcaataaaaacatgtcaatgaggccagatgcagtggctcacgcctgtaatcccagcactttgggcgggtggatcacctgaggtcaggagttcaagaacagcctggccaacgtggtgaaacctcgtctctactaaaaatacaaaaattagctgggtatggtggcgggcacctgtaatcccagctactcgggaggctgaggcaggagaatcgcttgaacccaggaggtggaggttgcagtgagccaagatcctgccattgcactccagcctgggcaacaagagaaaaactccgtctcaaaaaaaaaaaaaaaaaaaaaaaactcaatgagcgggaattgttgaataaacaggagagagaagggataattaatagtggaaggtttctgggaaggtgtgaggggatagcatacagtaggaagaaatgagaagtataaaaggaggtagggagaggatttgttctaatgtgagcaaatatgtagatttgatggtgggaaatgggggattaaatgagataatgcatgcaaagcacttagcatagtgcctggcacagttagtttgtatcagaaatggtaactatggctattgttgtttttcatgtcatacacctgcttgaaaatttctcaccttttaggctttgtccatgtgaaatgagctagtaccctactttattaatgctataaatttcaatttttatttttttgagacagagtctagctctgttgcccaggctggagtgcagtggcatgatcttggctcactgcaacctccacttcccggtttcaggtgattctcctgcctcagcctcctgagtagctgggattacaggtgcccaccattatgcccggctaaattttgtatttttactagaggagaggtttcaccacgttggccaggctggtctcgaactcctggcctcaagtgatctgcccaccttggcctcccaaagtgctgggattacaggtgagagccaccgcacttgactttcaaattttctatattgaatttatatacaacgagggttacttgaacttttgttttgttttgttttatttttatttttatttttggagacggagtctcactctgtcgcccaggctggagtgcagtggcatgatctcggctcactgcaagctccgcctcccaggttcacgccattctcctgcctcagcctccccgagtagctgggactacaggtacccaccaccacgcccaactaatttttgtttttgtatttttagtagagatggggtttcaccgtgttagccaggatggtcacgatttcctgacctcgtgatccacctgcctcagcctcccaaagtgctgggattataggcgtgagtcaccacacctggccgagggttacttgaacttttgattcctcacctctgttctcttcagaacttctggatatttgctggttccctgattttgataagaagaaaaaagttgtacatttaagattaatgggctgggtgcagtgggtcacacatgtaaccccagcactttgggaggccaaggcaggcgaattacttgaggtcaggagttcaagaccagtctggccaacatggtgaaacttcatctctactaaaaatacaaaaattagccggtcgttgttgcgtgtgtctgtaacccagcactttgggatgctgaggcgggcagatcgcttgagtccaggagttcaagaccagtctggccaacatggcaaaaccccatctctacaaaaaatacaaaaattaggcagttgtggtggcgtgtgcctgtggtcccagctactcgggaggctgaggtgagaggatcacttgagtctgggagatgaatgttgcagtgagccaagatggcaccactgcactccagactggatgatagagcaagacaccatttcaacaacaacaacaacaaaaaaaaaaaaaaaaaaaaaaagagagagagagatcactcctcactcctccctcctcctctgattaagaatctacatttgaggctgggtgctgtggctcacacttgtaatcccagcactttagggggccaaggcgggtggatcacaaggtcaggagttcaagagcagtccggccaagctggtgaaaccccgtctctactaaaaatacaaaaaattactcgggtttggtggcgggtgcctgtaatcccagctactcgggagactgaggtaggagaatcacttgaacccgggaggcagaggttgcggtgagctgagattgcaccattgcactccagcctgggcaacaagagtgaaactccgtctcatagatagatagatagttagatagatagataaatagatagatagatagatagatagatagatagatagatagatagaatctacatttggccgggtgcaatggctcacacctgtaatcccaacactttgggaggctgagctgggaggattgcttgaggccagaagtttgagaccagcctgggaaacagcaaaatccggcctctactaaaaatacaaaaaattagccaggcatggtggcgcacgcctgtagtcccagcttctcaggaggctgaggtgggaggattgcttgagccggggaggtcacagctgcagtgagccatgatcatgctactgcactccagcctgggtgacagagtaaaactctgcttcaaaaaaaaaaaaaaaaaaaaagaattggctgggcatggtggctcacacctataatcccaacactttgggagaccgaggtgggcagatcacttgaggctaggagtttgagactagcctgaccaacatggcaaaaccccgtctctactaaaaatataaaaattagccgggcatggtggtgcatgcctgtagtcccagctaatcgtgagggtaaggcagagaatcgcttgaacctgggagacagaggttgcagtgagccaagactgcggccgctgtgtgcctgggagacagagcgagaccctgtctttaaaaaaaaaacaaaaaagagaatctacattctttttttttttatttaaaggcctataatgcccttttaactctctttttaaatcattttcaaaatccttgacctagaattttaggttcctgttaatctagccacactccatttaactttttcatcttctttcttcaacataacctctgacatgttaccactgcttacaaatagaaagaggactaagcttggagagactctgaagagaagcatttactttttactctacatacttctgcatttaatttttttacagtgataatgtactacatttggaatttaaaatgaaacacaataaataaattaaaacaacttttgccctagtatcactctccctaatctttcatacccatcaaaattaatttctcattattcagatttccattcaaatgtacaggtgacacttgaacaagggttttaactgcatgggtccacttatatgtggattttcttctgcctctgctacccctgagatagcaagaccaacccctcatcttcctcctcctcctcctcagcctactcaatatgaagacagtgatgaagaactttatgataatccacttccgcttaatgaataatgcatatattttcccttccttattttattttattttatttttagacaaggtctcactctgttgcctaggctggagtgcattgcgacaatcatggcttactgcagcttcgatctcctgggctcaggtgatcctcccaccttaccttcccaagtagctgggactacaggtgtgcgctactatgactggctaatttttttgtatgtttttgtagagagggggttttgtcatgttgtacaggctggtcttgaactggacacaagtaatctgcccacctcggccacccaaagtgctaggattacacgcatgagccacctcacccagccccttatgattttcctttttttttttttttttgagacgcagtcttgttctgtcgcccaggctggagtgcagtggcacaatctcggctcactgcaagctccgcctcccgggttcacaccattctcctgcctcagcctcccgagtagctgggactacaggcgcctgccactacgcccagctaatttgtgttttttttgtatttttagtagagacggggtttcaccgtgttagccaggatggtctcgatctcctgacctcgtgatccgcccgtcttggcctcccaaagtgctgggattacaggcgtgagcaaccatgcc

SEQ ID NO: 858 - DNA, 129 bp, Homo sapiens
tttttttttgtatttttagtagagacagggtttcaccgtgttagccaggatggtctcgatctcctgaccttgtgatccgccagccttggcctcccaaagtgctgggattacaggcgtgagccaccgcac

SEQ ID NO: 859 - DNA, 1939 bp, Homo sapiens
ccaagtaggttcccctgtaacctcctacaaagcaatattccaaaggaacattttaactgtaaaggctggagacaagaaaaaataagtagatcgttttaataacaattatttaattgcctataagtttgctgtttcagaggctagcccaaaggcatcaaatttaataaagttaaacaaattgatttacttcagagcaaatatgatcctattaaaataatatagggtaaataccctacctcttagaaagggcaaaaatgcaaagaagctttctttaaaactaaaagggttttttggggggggagttggcggggaggaaataaggctaacagaggttgacctaaaattagccttacaaaggagaaaggaccacattgcttacttgaaacagacaatgaaaacaaccaaagtgatatataaaatagttgatgagaactagacttatgactgtagtttactagagtttagttttcagttgctgaagtagctcattttctcttactaatgtttggttcctcagggaagaatctcacttgactagagaggaggtgggaacagaagagagaaggaggcagggagatgtatttcttagggctcaccccttcacagactgacagaatggttttgttttgttttgttttgttttgttttgtttttgagatggactctagctctgtcacccaggctggagtgcagtggtgcgatctcggctcactgcaagctccgcctcccgggttctcaccattctcctgcctcagcctcccgagtagctgggactacaggcgcccaccaccacgcccggctaattttttgtattttttagtagagacggggtttcaccatgttagccaggatggtctcgatctcctgacctcgtgatccgcccgcctcggcctcccaaagtgctgggattacaggcgtgagccaccgtgcctgccccagaatggtttttaaagccacagttgagaggccacccattgcccggcgcctggacagtgatcatcttgttcatcttgttcagtcctttcttgtgtgattggaattattcatcccctttgaaagatgagaaggttgagatgcaaagagtctacctttccaagttctcactgctggaaagagctagaagcacagttcaaagttctggcttctggactctgcagtccaggtctcccttctcccacttgcctaccctcaatgccacactgtttttgaagtggcccataacttgaaggaaaagtttaaagacagttcaatttaatcatcagaatgcattcttttttttttcggagacggagtttcactcttgctgcccaggctggagtgcaatggtgcaatgacctcggctcactgcaacctctgcctcctgggttcaagtgattctccagcctcagcctcccgagtagctgggattatgggcgcccaccaccatgcccagctaatttttgtattttttttttttagtagagatggggtttcgccaggttggccaggctggtcttgtgaactcctggcctcaggtgatctgcccacctcatcctccaaaagtgctgggattacaggcatgagccactgcgcctggcctcagaatgcattcttacacatctatcctagacatttataagcactctaatggataacaatccaagaataaatgattgtaaaagatgatgccgaagagttgatgtcaatctttttttcctaagaaaaaaagtccgcgagtattaaatatttagatcaatgtttataaaatgattactttgtatatctcattattcctattttggaataaaaactgaccttctttaatcatatacttgtcttttgtaaatagcagcttttgtgtcattctccccactttattagttaatttaaattggaaaaaaccctcaaactaatattcttgtctgttccagtcttataaataaaacttataatgcatgta

SEQ ID NO: 860 - DNA, 139 bp, Homo sapiens
ttttttttgtgtatttttagtagagacggggtttcaccgtgttagccaggatggtctcgatctcctgacctcgtgatcacccgcctcggcgtcccaaagtgctgggattacaggcgtgagccaccgtgcctggccgaaa

SEQ ID NO: 861 - DNA, 47567 bp, Homo sapiens; identical to SEQ ID NO: 816

SEQ ID NO: 862 - DNA, 141 bp, Homo sapiens
ttttttttttgtatttttttagtagagatggggtttcatcctgttagccaggatggtcttgatctcctgaccttgtgatccacccgcctcagcctcccaaagtgctgggattacaggcatagccaccgcgcctggccctaa

SEQ ID NO: 863 - DNA, 54877 bp, Homo sapiens
acaaatgagaaagtttcatttacctcaaaaaaatccaggctatacaaacagacaactgaaagccacataggaaatttccgaaacacaaaagaaaaagtctcacctacaagattatttacatgtttagggccagtattattaaaagacgtcatcccctaggtctagtagaaacatatagagaagtctatgctaacacacttggaaagaggactattgtccttccttgcacatgacaaaaaccaaatgaaccaaacccctagaaggtattaatgcacaaaggttttaataccttggctttaatgatttttcaaggttaagaaacaaattcaaattggttggagcttcaactcagtaattacaatcacaatgcatctctgaaaggccctgcatttggaggcagagtaatctgcaaagatgatagtttttacatatgtcctgttacctacaccaatataattactacattatcttataaagacaaacagttgcttcaaactctttaaaaaatatatatataatgagtttcccaaagactcgagtctatattcaaagatgagtaaaaaaaaatccattacttccctagggtcactttcttcctttactcctgcttaaatgcaaaagctgatagtttctgatttgtagaaaaatctaaaggtttctgctttttagacaaattcaggttctcttttgctttttcttcctggttttctgtttcatcactttcatcaaccacacgttttcgcttctttgcttcagttccttcacttgccgtttctcctttggctttgttagcccacacctttgtaaaatggcaggagtgaaaaggaaagatttttagaaaataacaaataagaagtaaatgatttatttacttttccaggtaatatttttatatataaagcagaataattagcacttgaattaagtgttctcattgttaacaaatcttttattacttaaatgcagagcacattaaagatttacactacttttatatctcaatctaagctttgcttatattaatcatattagttgcaaaatactataattgcagtactatttaaaaatgaaacttttggccaggcacggtggctcatgtctgtaatcccagcactttgggaggccgaggtgggtggatcacggggtcaggagactgagaccatcctggctaacacagtgaaaccccgtctctactaaaaatacaaaaaaattagccgggcatggtagcgggcgcctgtagtcccagctacttgggaggctgaggcaggagactagagtgaacccgggaggtggagcctgcagtgagctgagatcacgccactgcactccagcctgggcgagagcaagactccgtctcaaaaaataaataaataaataaataaataaataataaaaatgaaactttttattctaagataattgcagtttcacatgcagttgtatgaaataatacagaaagatcctgtgtagccttcacccagttttccccagtggtaacattttgcaaaactatagcccaacaatcacaactatagggaactgacattgaaacaatcccattttacttctactcatttgagcgtatgtatgtatttacttttattgtgggttggtttgtttaccaccacagtcaaaatacagaacctcttccccaagccccaactccgactccaacccctggcaaccactactctattctccatcttgatcatgttgtcatttcaggaatgttatataaatgagtatatattctttggggtttggtttttattcactcagcaagagccagacaaggtccattcatttcatctgtctctaaaatctcttttaatctataatagttccccactcctactttatttccctggccatttcaagggctcttcaagctgtagaatttctcacattaacaaactggatttaagtaaatgtttagggtttaccttaaaaatactgattacatttttaagtattcaaaaacacaatcacagactttgccaagtctcttcctcttttgcagtgtaaagtcttatttatttagacgccattttattgaacaacaaatgagaaacataaaattgtaaatgaggttctaaatgacgctaaaggtgtttaaaccagtttctggcttcctcattatgcaacacctttttcataaaacccaatttaccaaagcaagtatctacgttactaggtgcctgtgctgcgccctgccattcctggggaagtgaaacctgaggatttaactggtacaccacacacattccttccacttctaactgagagattgtgccttccttccttcacatggcagaagtttatcagaagcaagccagccacctgtcctaatttccatgtgaaaggctggaacagaacaccagtctttttcccaaaaggaatagtctcatgtagtatttaatgtgtaagtagatacaatttttaaaaattctgcttgcaagaaccctaaagtagtattcaaaaaatgtgaattcatttttacttattaatttttttccccctagagacccggtctcactctgtcacccatgctggagtacagtgacacaatcacggctcactgcagccttgacctcctgggctcaagtaagtgatcttcccacctcaacctcctgagtaactgggactacaggtgtgtgccaccatgccaggctaatttttaaatttttgtagagatggtgtatcactatgttgtctaggctggtctcaaactcctgggctcaagagatcctcctgccttggcctcccaaagtgctaggattacaggcttgagccaacgaactcagcttgacacttttgatttttaacaaatgcatcttttcttggggtattctcctaacttaaaacatacaggaacttatagagattaaaacagtaaaccgtcaaaaaattaaccatccagcctgggcaacacagtgagaggttgtctctataaaaaaaaaaaagaggacaattgcttgtgcccaggaggtcgaggtggcagtgagccatgatcacaccacgacactcctgcctgggtgaaagaacaagacctgcctcaaacaaaaacaaaacaaaaaacccatcaccattacataataattactacatatccatattaccatatatccgcacttactttcctctttaaaaagtttggtggatgtattcaatttccaaaaacagaaaaaggcttttccttttttttttagttgtcatgatcgttattatctttgttgttgttattattattattagagacgatgtctcactatgttgcccaggctggtcacgaactcctgagctcaagtgatccgcctcgacctcccaatgtgctaggattacaggcataagacaccatacccagccaaaaggcatttctataagaattttttaaatctgggaattcactaagatctcaatctcggcacaattatccttacctttctttcttcagttgacaatactctaaatcgaatcattccttcttttattatgtctgcttcatctgaaaagtcaggattgtcagacaaaatattacttctattttcttctaaccacatctggaacccggtctttggcctaaaatcacaattatgtgaaaacattttatacttaagacagagtttaaagtgcctcatgattttaagttagtaatcaaccataagtctctgacatctattatataaagtaaggaagacacagttacacttgttaattcatgttactttttttttttttttttttttgagacagagtctcactctgtcacccagcctggagtgcaatggcgcgatctcagctcactgcaacctccgcctcctgggttcaagcgattctcctgcctcagcctcccaagtagctgggattacaggcatgcgccaccacacctggctaattttttgcatggggtttcaccatgttggtcaggctggtctcaaactcctgacctcacgtgatctgcccgcctcggcttcccaaactgctgggattacaggcataagccaccgtgcctggcctcatattactttaaactgcctggagactgcaggatcaatgaactggaaaatcctttgtaaggtcaattcaaaaggatcactcacgtttgtattttccaagtgcagcaaccatgaactctgtactttcaactttttaatgaatgttgacaggctcaaggtctccaacctcacttagcccttgtggcctaccacatgtccttggtaggctctttttctatttccccaaaccagctatttgaattcctcacgacttttctcaagcccctttgccatcgcctcacccttgctctcagagctgacctgcatcagcattaggtgaagcacggacacagcacatttgtacatttcattagattccactcacaatacaaattgtctttaagtcacacaagtgaaggtttaatgcaaatatttaacatttactgatcacttactatctaccaggcactactctaaaagctttatgtatagtacctcatttaaatgacaataacactatgagatggatacagttattatctccattccataagtgagaaaagggaggctcagagatgtgaaataacctatcccaggttacacaaacagtaaaactcagacctgggatccaacaaccaggcaatttgactccaaagtctatgtttttttgtagagatggagtctagctctttcccctatgctggagtacagtggctctgtattggcttactgcaacctccaccttccaggttcaagtgattctcctgcctcagcctcccaaacagctgggactacaggtacgcgccaccacacccagctaatttttgtatttttagtaaagacagggtttcaccatattggccaggtgggtctcgaactcctgacctcatgatccactcgcctcggcctcccaaagtgctgggattacaggcgtgagccactgtgcctggcccagagtctcttatgtttaacccagcagctatacgcccctcactaggctgaacctaaatgaatcctaaataaaaagtctaaactttttaaggttaaaaaaatttttattaaaaaattactagtatgaccataaccatttgcccaatttctgaaaatatgcaaattttaagtaatcttaacgtaaaccgatttccagaaaaataacagaacaaatcaaaacaagtaaaaatcaaggtataacaaaggttcctgaatttccaaaaattaatgaagacccattttaatgaaacttggggcaatgtcacaagtctacttagtggcctgcaatcatctacttctaaacagctatttttaaaaagaaaaccaaaattgaacatttctttctttgttttttaaagagacgtgagtctcactatgttgcctaggctggcctcaaacttctgggcttaagcaacccttctgactcaaccttctgagtggctaggactacaagagtgcacagccacctggctaaaactggacatttctgattaagtatatcaacatctgtgacaaaatattagtttcaatagtggtaattccttaaaatttcaaaagtaagttttttgtataaccaactgatagtatgaaaaattaaattatcaatcttctttgttgttgttttaagagaaagggtcttgctttgtcgcccaggctggagtgcagtggtataatcagctcactgccacctcaaattcctgggctcaagcaatcctcctgcctcagactctcaagcagttgggactacaggcatgtgccaccacacacacctggctgattttaaaacttttggtagagatggggtctccctacattgcccaggctggttccaatctcctgggctgaagctaactgatcatgttggccttccaaagtgttaggcttggccaggtgtggtggctcacacctgtaaccccagcactttgggaagccgagatgggcaaatcgcttgaggccaagagtttgagaccagcctggccaacgtggcaaactccatctctaccaaaaaataacaaaattagtgggcatggtggcacacacctgtaatcccagctactcaggaggctgaggcatgagaattgcttgaacccagaaggtggaggttgcagtgagctgagattgcaccagtggactccagccttggtgacagggcaagactgtctcaaaaaaagtgttaggcgggccaggcatggtggctcacacctgtaatccctgcactttgggaggccaaggcgggtggatcacctgaggtcaggagttcaagaccagcctgaccaacatggagaaacctcatctctactaaaaatacaaaattagtcgggcatggttgcgcatgcctgtaatcacagctactcaggaggctgagacaggagaatcacttgaacccagaggcagaggttgcagtgagccgagattgtgccattgcattgcagtctgggcaacaagagcaaaaagaaaaaagtgttaagcggaaaaaaaaccatgagccactatgcccggcctatcaattttcttaaataaaattttcactgtttaagacctaaattaaattcagaacaaaacaggaaatgtgaaaaccacagccactccctcaaactggttaacataaagtcattaagaaaataagatatactttattattatttttctccctggactgttcagcatgagaaaaatgagatatattatggtaaaaatgaaattgtgactgttcttttctttttgttttttctgagatggagtctcactctgttgcccaggctggagtgcagtggcacaatcttggctcattgcagcctccgtctcctgtgttcaagcgattctcctgcctcagcctcccaagtagctgggattacaggcatgagccaccatacctggcaaacttttgtatttttaatagagatggggtttcaccatgttggccaggctggtctcgaactcttgacctcaagtgatccgcccacctcagcctcccaaagtgctgggattacaggcgtgagccactgtgccaggccaaaattgtgacttttcaaatttaacggatatattaaaaataaggccaggagtggtggctcacacctgtaattccagcactttgggaggccaaggtgggcagatcacctgaggtcaggagtttgagaccagcctgaccaacatggagaaacctcgtctctactaaagatacaaaattaagcggttccaagatggtcgaataggaagagcttcagcctacagctcccagcatgagcgatgcagaagacgggtgatttctgcacttccaactgaggtaccaggttcatctcactagggcttgtcggacagtgggcgcagaacagggggtgtggcacaccgagtgtgagctgaagcagggcaaggcatcacctcacccgggaagcgcaaggggtcagaaaattccctttcctagccaagcaaagctgtgacacacagcacctggaaaattgggtcacccccaccctaatactgtgcttttccaatggtcttagcaaacggcacaccaggagattatatcccactcctggctcagagggtcccatgcccatggagcctcactcattgctagcacagcagtctgagattgaactacaaggcggcagcctcagccaggaaactcgaactgggtggagcccactgaagctcaaggagtcctgcctgcctctgtggactccacctctgggggcagggcatagccgaacaaaggcagcagaaacctctacagatttaaatgtccctgtctgacagctttgaagagagtagtggttctcccagcacagagtttgagatctgagaatggacagactgcctcctcagtgacaggtgggtccatgatccacaagtagcctaactgggaggcaccccccagtaggggcagactgacacctcacacggccgggtacccctctgagacgaggcttccagaggaatgaccaggcagcaacatttgctgttcaccaatatttgctgttctgcagcctccgctgctgatacccaggcagagtctggagtgggcctccagcaaactccaacagacctgcagctgagggtcctgactgttagaaggaaaactaacaaacaaaaaggacatccataccaaaaccccatgtgtacgtcaccatcatcaaagaccaaagatagatgaaaccataaagattggggaaaaaacagagcaaaaaagctgaaaattctaaaaatcagagcacctctccccccccaaaggaacgcagctcctcaccagcaacggaacaaagctggacggagaatgactttgacgagttgagagaagaaggcttcagacgatcaaacctctccgagctaaaggaggaagttcgaacgcatcgcaaaggagctaaaaaccttgaaaaaagattagacgaatggctaactagaataaccagtgtagagaactcctcaaatgacctgatggagctgaaaaccatggcacgagaactacgtgacgaatgcacaagcctcagtagccaattcaatcaactggaagaaagggtatcagtgatcaaagatcaaatgaatgaaatgaagcgagaagaaaagtttagagaaaaaagagtaaaaagaaacaaacaaagcctccaagaaatatgggactatgtgaaaagaccaaatctacgtttgtttggtgtacctgaaagtgacagggagaatggaaccaagttggaaaacactctgcaggatactatccaggagaacttccccaacctagcaaggcaggccaacattcaaattcaggaaatacagagaatgccacaaagatactcctcgagaagagcaactccaagacacataattgtcagattcaccaaagttgaaatgaaagaaaaaatgttcagagagaaaggttaggttacccacaaagggaagcccatcagactaacagctgatctctcggcagaaactctatgagccagaagagagtgggggccaatattcaacattcttaaagaaaagaattttcaactcagaatttcatatccagccaaactaagcttcataagtgaaggagaaataaaatcctttacagacaagcaaatgctgagagattttgtcaccaccacgcctgccctacaagagctcctgaaagaagcactaaacatggaaaggaacaaccggtaccagccactgaaaaaacatgccaaattgtaaagaccatcaaggctaggaagaaactgcatcaattaatgagcaaagtaaccagctaacatcataatgacaggatcaaattcacacataacaatattaaccttaaatgtaaatgggctaaatgctccaattaaaagacacagaatggcaaattggataaagagtcaagacccatcagtgtgctgtattcaggagacccatgtcatgtgcagagacacacataagctcaaaataaagggatggaggaagatctaccaagcaaatggaaaacaacaaaaggcaggggttgcaatcctagtctctgataaaacagactttaaaccaacaaagatcaaaagagacaaagaaggccattacataatggtaaagggatcaattcaattcaacaagaagagctaactatcctaaatatatatgcacccaatacaggagcacccagattcataaaccaagtccttagagacctacaaagagacttagactcccacgcaataataatgggagactttaacaccccactgtcaacattagacagatcaacgagacaaagttaacaaggatatccaggaattgaactcagctctgcaccaagcagacctaacagacatctacggaactctccaccccaaatcaacagaatatacattcttctgagcaccacatcgcacttattccaacactgaccacatagttggaagtaaagcactcctcagcaaatgtaaaagaacagaaattataacaaactgtctctcagaccacagtgcaatcaaactagaactcagcattaggaaactcacccaaaactgctcaaccacatggaaactgaacaacctgctcctgaatgactactgggtacataacgaaatgaaggcagaaataaagatgttctttgaaaccaacgagaacaaagacacagcataccagaatctctgggacacatttaaagcagtgtgtagagggaaatttatagcactaaatgcccacaagagaaagcagaaaatatctaaaattgacaccctaacatcacaattaaaagaactagagaagcaagagcaaacatattcaaaagctagcagaaggcaagaaataactgagatcagagcagaactgaaggagatagagacacaaaaaagccttcaaaaaatcaatgaatccaggagctggttttttgaaaagatcaataaaactgatagaccgctagcaagactaataaagaagaaaagagagaagaatcaaatagatgcaataaaaaatgataaaggggatatcaccactgatcccacagaaatacaaactaccatcaaagaatactataaacacctctatgcaaataaactagaaaatctagaagacatggataaattcctggacacacacaccctcccaagactaaacgaggaagaagttcaatctctgaatagaccaataacaggctctgaaattgaggcaataattaatagcctaccaaccaaataaaaagtccaggaccagatggattcacagccaaattctaccagaggtacaaggaggagctgttaccattccttctgaaactattccaatcaatagaaaaagagggaatcctccctaactcattttatgaggccagcatcatcctgataccaaagcctggcagacacacaacaaaaaaagagaattttagaccaatatccctgatgaacatcgatgcaaaaatcctcagtaaaatactggcaaaccaaatccagcagcacttcaaaaaacttatcaagtgggcttcatctctgggatgcaaggctagttcaacattcgcaaataaataaacgtaatccagcatataaacagaaccaaagactaaaaccacatggttatctcaatagatgcagaaaaggcctgtgacaaaattcaacaacgcttcatgctaaaaaactctcaataaattaggtattgatgggatgtatctcaaaataataagagctatttatgacaaacccacagccaatatcatactgaatgggcaaaaactggaagcattccctttgaaaactggcacaagacagggatgccctctctcaccacttctgttcaacatagtgttggaagttctggccagggcaatcaggcaggagaaagaaataaagggtattcaattaggaaaagaggaagtcaaattgtacctgtttgcagatgacatgattgtatatttagaaaaccccgtcgtctcagcccaaaatctccttaagctgatagggaacttcagcaaagtctcaggatacaaaatcaatgtgcaaaaatcgcaagcattcttatacaccaataacagacaaacagagagccaaatcatgagtgaactcccattcacaattgcttcaaagagaataaaatacctaggaatccaacttacaagggatgtgaaggacctcttcaaagagaactacaaaccactgctcaatgaaataaaagaggacacaaacaaacggaagaacattccacgctcatggataggaagaatcactatcgtgaaaacggccatcctgtccaaggcaatttatagattcaatgccatccccatcaagctatcaatgactttcttcacagaattggaaaaaactactttaaagttcatatggaaccaaaaaagagcccgcattgccaagtcactcataagccaaaggaacaaagctggaggcatcacgctacctgacttcaaactatacaaaacagcacagtactggtaccaaaacagagatacagaccaatggaacagaacagagccctcagaaataataccacacatctacaaccatctgatctttgacaaacatgacaaaaacaagaaatggggaaaggattccctatttaataaatggtgctgggaaaactgcctagccatatgtagaaagctgaaactggatccattcctcacatcttatacaaaaattaattccagatggattaaagacttaaatgttagatctaaaaccataaaaaccccagaagaaaacctaggcaataccattcaggatataggaatgtgcaaggacttcatgtctaaaacaccaaaagcaatggcaacaaaagccaaaattgacagatgggatctaattaaactaaagagcttctgcacagcaaaagaaactaccatcagagtgaacaggcaacctacagaacgggaaaaaattttgcaatctacccatctgacaaagggctaatatccagaatctacaaagaactcaaacaaatttacaagaaaaaaacaaacccaatcaaaaagtgggcgaaggatatgagcagacacttctcaaaagaagacatttatgcagccaacagacacatgaaaaaatgctcatcatcactggccatcagagaaatgcaaatcaaaaccacagtgagaaaccatctcacaccagttagaatggcaatcattaaaatgtcaggaaacaacaggtgctggagaggatgtggagaaataggaacacttttacactgttggtgggactgtaaactagttcaaccattgtggaaggcggtgtggcgattcctcaaggatctagaactagaaataccatttgacccagcaatcccattactgggtatatacccaaaggattataaatcatgctgctataaaaacacatgcacacgtatgtttattgtggcactattcacaatagcaaagacttggaaccaacctaaatgttcatcaatgatagactagattaagaaaatgtggcacatatacaccatggaatactatacagccataaaaaaggatgaattcatgtcctttgtagggacatggatgaaactgggaaccatcattctcagcaaactatctcaaggacaaaaaaccaaacaccgcatgttctcactcataggtgagaactgaacaatgagaacgcttggacacaggaaggggaacatcacacacttgggcctgttgtggggtgggggaagtagggagggatagcattaggagatatacctaatgtaaatgatgagcacagcacaccaacatggcacatgtgtacatatgtaacaaacctgaatgttgtgcacatgtaccctagagcttaaaagtatttaaaaaaaaaaaaaagatataaaattagccaggcatggtggcgtatgcctgcaatcccagctactcaggaggctgaggcaggagaatcgcttgaacctgggaggcggaggttgcagtgagccaagatcgtgccaatgcactccagcctgggcaacaagagcgaaactccgtctcagaaaaaataaataaatacaaagaaatccagcatagtagagatcaagaaaataggtaacatactgtgtttgtggacaaagaggatatgagcaaataggaatactcatattgctaaaggtgtataaaatgatacaacatcaatgcagaacaatctggcattggaattataagtgcagattaacttgaaccatacatgaatccatcttatagctatatatgcatctgtgagaaatgctattcatataaaattattcattgcagtactgtctgtactagcaaaagaccggtaaccatcttttgtccacaagtagagaactacatgaactatgacatgtctattcaatggatacacaaagattaaagctcttatttttctatctatccatccatttatgtatttactttttctgatagccttgctatagtataaagaagttctttttgtttttttggtttttttgagacagagtttcgcttttgttgcccaggctggagtgcagcggtgtgatctcagatgactgcaatctccgcgtcccgggttcaagtgattctcctgcctcagccttccgatttgctgggattacaggcatgtgccaccaagcctggctaattttgtatttttaatagagacagggtttctccatgttggtcaggctggtctcgaactcccatcctcagatgatccgcctgcttcggcttcccaaagtgctgagattataggcgtgagccaccatgcccagccagtataaagaagttctttatgtagtaatataaaataagctacaaaagctattgttaagttaaaaaagtaaggtacagaataatgtgtaaaacaaaaaatagacaaatatgtatttgcacataaatagaataattttggaaagttccacaagaaacttgttgcagtgattgtttttggagacagaaattagttggatgaaactacttattatcactcttctttttgtatcttttgctatttctccccattaaactatttaaaaacaaacaaaaaattaattacaaaatataatgtcccaataaaatatatccacaatttaaaaatatacaatttattaaagcatattttaataaatattataaatagacattaatatttgtggcttccttatagtcacaagtgtccagaatgcccactaccaatgccaatgtattatttgtattaaggaataacagcattgcataattttgtattgctgctactgtatactttttacttggtcactgcatgctaaatttctctatgtactgacctttggttttcagtgttttgaggaggacatatagctggggtttcagataatacatttttaagattttcttctttcacttcctcagttttattagtttgagaatttcttttctggaaataggatgctgcagatgcctataaaaacaaacatgaatactgcaataacatctagtataattttatatgttttataagcacgttctgaaaaatgtgaagaaacatctataattattgagaattcttatactaacatgtgaaatctggagttctcagttgtaaataaataggcaaacacatgcaaaaccaaaaaactacacttcagattccatgttttccttttttttttttttttttttgagacggagtctcactctgttgcccaggctggagtgcagtggcgctatctcggctcactgcaacctccaccctccgagttcaagtggttctcctgactcaccctcccaggtagctgggattacaggcacctgccaccgcggctggcctaaattccatgttttctaaatgaatacaattatattaaatagaaaagataagcaatagatctattttaccaatgactaatccgggatcaaatacttatcagagtggaaaaatcaggactcagaacaaggaaaaattagggccatgtacaatatcagccactattaaatacgaatatacatcagaactatctgggtgattttaataaaaatacagataaatgtctgagcttctggggtctgagtatatatatttttaaaaagtgatctgtaaaaacaaggagaggggcaggataggctgggtgcggtggctcatgcctgtaataccagcactttgggaggctgaggtgggtggatcacttgaggccaggagtttgagaccagcctggccatcatgctgaaaccccatctctactaaaaataccaaaattagctgggcgtgatgtcaggcctctgtaatcccaactcctcgggaggctgaggcatgagaattgcttgaacccaggagacagaggctgcagtgagctgagatcctgacactgcactccatccagcctgggtgacagagtgagcctctgtctcaaaaaagacagggggagcaggatagtgatcttggaagtcagaatctgctacaaagtgtgtaacaactcacgaggcagaatagggagtgattctgaaacaaaaaacacaactgttttggggtttgtttttttcagatggggtatctcttatgtttcccagactggactcaaactcctgggctcaagtgatcctcccacctcagcctcctgagtatctgggactacaggtatgtgccactgtgcctagctgcaaaaacagaattgaacccacttccctagcaagacaattgtaaacaatcagaacctcctatcctatatctgaaacagtgaacaaaactgaagacaaacagatcccatgctgcttactgcagatgagggtagctgaaacagtacctgcttaggcttcggctttggaatcagaggctttataatgggagacttttcattatttgtagttcgactaagtgcagtggatttcttggatgatttgcccatattgtctaaaatattagttgaacgtgctgaattcattgacatggctggttctttggaactggctgatacctaaagagcaaactagtgttagcactgtatgtttaaagaagaaaaataaaatcccaagagacttattttttcttgaaatttctgttaagtttgtattgccatctcatctttagaactaaatacatttggtacaatccaaattaagaatgatacgtatattcccaaataccacatccccaagaaagacagaggtatctttcaaaaccataggtacttagaaggtaagtagaaaagacaactctcagcccaagtgctgctttcttctgtttccacacagatcagtctttcatgcctccaagtctggggagagtcatctcatcatttggaaatatttctttgtatacaaatgtatttaaataatataaaacatcacttggaagagtttaccttaaagggatttactcgtccttggctgctaaaggtaactgcacctttcacaaaaaagaaacccttgcttaataatggtagaaaatagatgacttctgacatctataatactagacagagtattttaatccccattaaatgaaaacaaatgtattttgcaacttttcaaaactattaacaacagatatcctctttcctacttctaagccaaaataaaagctattaaatgtgaaccaccccaacgtgccactatgaaacatattcagtatgtacagatcttttatcttctgttactgcggaagagtggcagctcgtctgagctaaggttagtaatccctttacttgtgttctgcatcccatgccctcctgctttgtcagaaaacctgacctatcaagtttcttgacatcctacatctttgacttttccctatttattggcccctaaagtctcccaacttaaaaagaaacaaaaaacaaaccttctctaccccacattccttccagtcaccattttctctcgcctcctccatccagccatttttttttttttttgagacagagtctcgctcttgttgcccaagctggagggcaatggtgtgatctcggctcactgcaaagtccacctcccaggttcaggcgattctactgtctcagcctcccgaattgctgggattacaggcgcctgctaccacgcccggctaatttttgtatttttaatagagacagggtttcaccatgttggccaggctggtcttgaactcctgacctcaggtgatccgtctgccttggcctcccacagtgctgggattacaagcatgagccaccacgcccggtcatccagccaaatttttccaagaactgttgacactattatcatttcctcaccacccatacattcctccatacaatatagcacttccagctctaccaccctacagaatctcctcttgctaaggccctcagtgatctctacattgtcaaatctggtggatacctttcagtcaccttgtttgctctatcaatggcatcccacatagctgactgttccttacttcttgatactttgtcctctcttgacttctgagatactgcattccctgacttagttccttcctctctggacctgtggactcattgtgttccaatagttggttcctcctcttcctctacctgatgctcaaatgttggagattccctaggcttaagctcatttttctttttgctttacattctcccccaatgcttgcttacccatgctcatggtttaaattgctatacttatgccaatgattttcactttgtatctcttgaccagaatacttccctgagctcctgattcaaatatctgtcttcacgacattctactcaccttacagtaattcatcatcttcctctctaaatctgcttttctctagtgtttcctgacttaggaaatggcaccatcattcactcaagtactcaagccagtgttaacaaactaatctctaattaagagctttcctggcatggtggcttaagcctgtaatcccagcactttgggaggctgaggagggaggactgcttgagcccagtttaagactagcatgggtaacatagggagaccctgtctctacaaaaacaaaaaacaacaaaacaaaaaacccaaaccaaaacaaaactagccagacatggtgacacatgcctgtggtcctagttacttgggaggctgaggtggaaagatcgcttgggtctggggggttgaggctgcagtgagccataatcacgccactgcactctaacctggatgacagtcacaccctggcggggggaagaggagggagggagggagggaagaaggaagggagggagggaggcaggcaggcaggcaggcaggcaggcaggaaatttctagctgagcatggccacttgtgcctgtaatccgaaaattttgggaggctaaggcaggagggtcacttaagcccaggagttccagaccagcttcggcaacaaagcaagctcctctctctacaaaaagtacacacaaaaaattaaccaggcatggtgatgcacaactgtagtcatagctactcagtagggtgaggcaggaggatcacctgagcatacgagttcaaggctgtagcgagctaggactgcatcactgcactccaactctgctccagtctgagtgacaaagcaagataccctgtatccgcaccccccccaccaaacaaaaaaaacaaacaaaaaaacctttccatctagccaataaaaattgttttatttatctcgtttctgaaaatactttataaaagtttccccttttgtctctcctggcagagtgctagccccttgcggtttggtgcctccctgattcatgaatcactgaatgttcaaattaatccttcaagattcaaatgtgcttaagtttttcttctattacaagaaactgagaatcactctttacgccctgaactcctacactctcttcatcatcttcagaaatagctctccaactctgcccattctttctaacatcaccatcaccaccctagctcaggcccttattcaatctcatttggactgcctctgtagtttgtttgtttatttatttatttgagatggagtctcgctctgtcgcccaggctggagtgcggtggtatgatctcacctcactgcaagctctgcctcccgggttcacgccattctcctgcctcagcctcccaagtagctgggattacaggtgcctgtcaccatgcccggctaatttttatgtatttttagtagagacggggtttcactgtgttcttcaggatgctctcaatctcctgacctcgtgatccaccctcctcagcctcccaaagtgctgggattacaggtgtgagccaccacgcccagcttgtagtctctttattttttaatttttatttacttcttcttattattattttagatgaagtctcactctgtcacctaggctggagtgcagtggcgtgatctccacttactgcaactccccactcctggattcaagcaattctcctgcctcagcctcccgagtagctgggattacaggcatgagccaccatgcccggctaatttttttttttgtatttttagtggagatgtggtttcaccattttggccaggctggtcttgaactcctgacctcaagtgctccacctgcctcggcctcccaaagtgctggaattacaggcgtgagccaccacgcctggcctatttattttttgatacagggtcttgctctgtcacccaggctggagtgcagtggtgcaaccatagcctactgcaccctcgaactcctgggctcaagatatcctcctgtcccagcctcccaaatacctgggactaccggtgtgtactaccatgcctggctaatatttttattatttactttttgtagagatagggtttcattgtttccaaggctggtctcaaacgtctggtctcaagtgatccttccaccttggcctctcaaaatgctgaggttacagacatgagccatcacacctggccagtagtctattatctgttcttcttcagcacagtgtgccatgctatacctctgcttaaaacctacaacagtctctcagtgaccttagaataaagagcaaaatcctgaccgggtgtggtggctcacacctgcaggtccaacaactttgggatgtggaggtgaggaaattgcttgagtttgagaccagcctggacaacagagtgacaccccatctctattaaaaaaaataaaataaaataaaaaaaagaccaaaatccttaatatggcctacacagatctgcatgacttggctcctgcccatcactccgaaacccttcagcaccactttctctttgctctctgagcttttcacaccacccttttgcagccttcagttcacacatactgttccttaagcccaaatgcttctcttctgctcctgttcccatgcacctttgccttgctgactgttattcatccttcaggtctctgctgtaaacactccatgaggcctgccttgaagtccctacccatcctccaccactggctagatgacagctatgtgtcatacgctcttttcatattctacatgttttttaagttaatttttttaaatcaaagtaacatatgtccacagtttaaaaagtcaaatggtactataaggtttatgctccccaccaaaaaagggccagcagtgccttacttcaaccttctcttatcccccaggcccactccctgtacgcaaccattttcaactccttttttttttttttgagatggagtctcactccattgcccaggctggagtgcaatggcacgatctcggctcactgctacctccacctcctgagttcaagtgattctcctgcttcagcctcccgagtagctgggattacaggcacataccaccaccctcagctaatttttgtatttttagtagagatggggtttcaccgtgttggccaggctagtctagaactcctgacctcgttatccgcccactccggcctcccaaagtgctgggattacaggcgtgagccactgcgcccagccttcaattccttttaactgtttctccagtatcctgcatgcttcctcagtgatacccagatctgtcttcaacatctgtcttctcagctgggctaaaatagcattaaaacagagatcaaccacacatgtctgtttgacttctgtatccaccattaagtaaaatgcctgacactcaataggcattttataaacatctgttaaatgaccatagcttcacaaacaacatctgagattaaaaaaacaaaaacataaacacacacacaccaaaagtggccttaagagttaaggtgtatttgcgtagatgtgtcactttgcagatgacttgcaaaatttccttgatattacaaatttataaatatttctcacctgacttagctgaaacatcagaggaatttgtacttttggaaaacgagttctgtcctacagattaaaataaagcaatataatgtaaatggggaaaatatagtcatcctcaatatacaacaaccagatagcaaagaggtctgaaaaaaagtatgagtattcaatttccctcagttaagcaaaatgggaaaagccacatccatgatagttctcatgatttatgggcttgaaaatgtatctcaccaggcttatgtatttctggtttttcttcatcatcagcttctccactgtcctcagcatcttcttcaacttgatttctgaaccttggttggctccactctgtagcagtattgctgtaactaagagaaaataatattattcaataaagagctatgcaaagaccaacttaacattcaagacagtaaaggaaaattcaaacaactaaattatttcttacccagcattcagcttttttctgaaatcttcttcttcttcttcctcttccacctgggttgctgtcaattcggctgccttctctacagccagttcacttagtttttgagccagtattaatttccgagagcgagaagcatatttaatggctaaattcacagcattttgagtcattagatcagcaagttccacacaacggaattctcgctccagtttacaagaaagctaatccaaaaaggggggggggggggagatcaaataacatcaagtaaaactttttaaagatactgacactactagtaaaactgagacaatagttttctagctactctatctccctaattctaagatgcacatttttacaagttttaacatctctgaaattggaattacaattaattacaattaatggtgggtcagtttggcagcatttttatgtctccatggcttaaatgaataaagtaatggtgcactatgcaataaacagtggcttagatttgatgaaatattacataccactttaatctactaattgcaagaaaattaagaaatttgtttaaaaaattcaagggggaggctgggcacggtggctcacgcctgtaataccagtgctttgggaggcccagatgggtggatcatgaggtgaggagttcgagatcagcctggccaatatggcaaaaccccgtctctactaaaaacacaattagccaggcgtggtggcgtgcgcctgtaatcccagctactcgggaagctgaggcaggagaatcgcttgaacccgggaggtggaggttgcagtgagccaagattgcaccactgcactccagcctgggcgagaaagcgagactctgtctcaaaaaaaaaaaaaaaaaaaaaaatcaagggggccaggtgtgctggctcacacctgtaatcctagcactttggaaggccaaggcagagggactgctagaggccaggagtttgagactaacctgggcaacacagtgagaccctataactacaaaaaataaattagctgggcgtggtggcatgcacctgcagtcttatctactcaggagcctgagacaggaggttcactagagcccaggaggttgaggctgcagtgagttacaatcttgccactgtactctagcctgggtaacagagtgagaccctttctctaaaaaatacaaaaaagaaaaacaacaaactgagaaaagttggtattttgaagattactaagggtctcctaattcatagtgtattagaactattttcttacttagatattccatgtctgatccatcagcacaaaagctttagatattcacctggatgcccttttcaagatttttagtatcatttatctataatcagtacttcttaatcgggatggtacactgcctcagggggcatttagaaataaaaaggaagccgggcgcagtggctcacacctgtaatcctagcactttgggagactgagacaggtggatcacaaggtcaggagatcgagaccatactggctaacacggtgaaacacagtctctattaaaaatacaaaaaattagctggtgtggtggcagacaactgtagtcccagctactcgggaggctgaggcaggagaatggcgtgaacctgggaggcggagcttgcagtgagcagagatcgcgccactgcactccagcctgggcaacagagcgagacttcgtttcaaaaaaaaaaaaagaaataaaaaggaatagtctggtttccacagtgactattctgaactaaaggcatttgcccgggggtcaggaatgctaaagaagaactcaacaatccccttgaactcctgggctcaagatatcctcctgccctggcatctttgatatgagtcccctggtatttttgatatgagaaacactgccacagggaaaagctcctctaggctaaatagcaaatacatgaaatatgtttccttatatgtgttgtacaaataaaaaggctactagttcctggaccacaagtaacactttataaaaggaataaaactttttctacaataaactgagttttcttaataccaaacttaaggccatgttgcataaaggtgacagtagtgagtactaccttttggagacaagagtggcaatttgctctgtggtctcatataccacttttctctaagaaccttttttctccaattttaaaattaaaagtctggaccattcactcttgtcaacaaatatcgaggtctactatgtgttaagccaccatgtcagtgcctggcatacagcagtgagcaggtctctgccctctggggcataaagtctagtgtaagacaaataaagaagaaatgatactatactcctctccataaaccaaccttgagtggggacacaagcacaggaactttaagacaccctgctccaaagataaatgtacttaaatattctagacaccaaacctggccactggtcacaaataaattttcatcacacacagctgcctaactcaaagaggatgacaaaaggcaggcatatctaacagcccgatcaaagttcttaagattgcccagccctggagattaaaaaacagtatatactcaaactttgtaaaataataacagaaactagagcagtggttctcagttaccttgagagcccgttaaaacatagactgatgggcaaaagcaaaagggaagtagccctagagatgtttattcctgcacatgatcttagctacaaggtactgttttatttattttaggctgggcacggtggctcatgcctgtgatcccagcactttcggaggccgaggcaggtgaattacctgaggtcaggagttcaagaccagcctgaccaatgtggtgaaaccctgtttctactaaaaatacaaaaattagccaggcatggtggcacacgcctgtagtcccagctactcggaaggttgaggcaggagaatcacttgaacccgggaagtggaggttgcagtaagccaagactgcacaactgcacttcagcctgagaaacaagagcgaaactccgcctaaaaaaaaaaaaagaaaaaaattttaactgcaagaccaactagaagatagaactttacaagggaaaacaccaccagataaaacttaagaatggctgggtgtggtggctcacacctgtaatcccagcactttgggaggctgaggcgggcggatcacgaggtcaggagttcgagaccagtcgggccaacatagggaaaccccatctctactaaaaaaaaaaaaaaaaaaaaaaaattagctaggcgtggtggtgtgtgcctgtaatcctagctactcgggaggctgaggcagaattgcgtgaacccgggaggcagaggttgcagtgagccgagatcgcaccactgcactccagcctgggtgacagaacgagactccgtcgcacaaaaaacaacaacaacaacaaaaaaaaacttaagaatcttaggttgtgggacttagtcctaatgcacagacctttaagaaattcaacctatagaaaagcatttaactttaacgttttcagtatatttattttactcaccgcaagcattttcattaaaagttcctgttgctcttttgttgcttgatttttagtgctctcttcatattcataaccatttttagctaaataatcaaggtggttgtgaaatataactgaacgccaaaattgctcctataaaagcaaataaaattgcttaaggccaactatcaccttaatatgaggcaagcgttaaatatttatcttaagataccagtttttgaataaaatatgttctgaactcttcctttctataagtttattttacaatttaaattctagtgtgatactacagcttaactttttcccctatccttaaaaaaggcagctggggaggaatacagcatttaaaacagtttcctagctatcataattaatgctcagagaatttggtaaacaagatttttaaaagctaacttgtttcttatttagaataactaactgcaagatttcaaatgacttttgatgacacaaggctaggactagggtcaggcaagccaggtgttatggcacaaaatgtatggaggcacttcttctcagggacatgccccatcctgagagtaagtctttccccagtgggtctctgacagtcacacccatttactttgtagacaaagtccctggaagcagtgatggcaatcaggtggcctggtgatcccaagcagtcctcttccctccctgctacccctatttatgtaattatacagtaatgaatattcaatactggccatcaggataattttaaagtgtgtgtatcacaggtgctgtattatcaaattcaaagtgtcaaggtaagacttccacatacctccatttgtcctttctctgttgcaatctgacagtaaggaagcttaaaggataatatagcaacagcagggcgtggaagggttgggggaaaccgagaacctttacaaggaatgcacctgttagtaaagaaaagttccatcataaaaatttactaacatgtcataaaaactacaaaatttaaaaagttttcaaaagttagtaacttagaatagtaatattataatagctgccttaatcatatataacaaatatctctttttaaaaaagtgttttaggcttgactaggcataaagactatccctacatgcatttcaagaatagaaaaattccttctcacatctcacttgatttattttttttgagacagggtctcactgtgttgcccaggctaaagcacggtggtgtgatcacggctcactgaagccccaacctcccaagttcaagcaatcctcccacctcagcctcccaagtagctgggactacagatatatgccaccatgcctggctaacttttgtattttcagtagcgatggggttttgccatgttgcccaggctggactcgaactcctgggctaaagtgtgcctcccacctttgcctcccaaagtgttgggattacaggcgtgagctaccctgcccaacctcacatctcactttattaaatgacaaccactaaaagtgaaatcagctctcttcatattttccttagcaaactaccacttttaaaacataaaaattgtaccattaatacctgtcatggaatccatgttatcaccaagataaatgctgatgaagctgcacatggaacatactctaaggtcaaccacatgcttggccgtaaagcaagtctcaaaaattttttttaaattgaaatcataccaagcatatattctgagaccatagtaaaataaaaatagaaatcaatactgaggatctctcagaaccacacaaattacatggaaagtaaacaacatactccagaatgacttttgaataaacaatgaaattaagcagaaattgaaatattctttgaaataaatgaaaacagacacaacatatcaaaatatatgggatgcagcaaaagcaatgttaagaggaacgtttatagcactaaacacctatatcaagttagaaagatctcaaattaacaatctaacattgcatctagggaaactagataaacgagaacacactaaccccaaagctagcagaagaaaagaaataactaaaataacagcagaactaaacaaaattgagactaaagaatccatacaaaggatcaataaaacaaaaaaaattgattttttgaaaggataaacaagatcgataaactcctagctagattaacaaagaaaagaagagggaagctccatataagcacaatcagaaaatggcaaaggtgacactacaactgattccacagaaatacaaaagatcctcagagactattatgaacacttctatgtgcacaaaccagaaaatttagaggaaatgggctcacacctgtaatcccaatacttttggaggcaaaggtgggagaatcacttgaggtcagaagtttgacaccaccctgggcaacaaaatgagacccaattgctacaaaaatttttaaagattagccaggtgtggtggtgtgtatctgtagctccagctgctcagaagactgagatgggaagattaattgagcttgggaggttgaggctgcagtgagccatgatcatgccactgcactccagcctaggtaagaccttgtttctatttatttatttatttatttttgagacggagtctcgctttgttgcccaggctggagtgcagtggcacgatctcggctcactgcaagctccgccttccaggttcacgcaattctcctgcctcagcctcccaagtagctgagactacaggtgcccaccaccacgcccagctaatgttttgtatttttagtagagacggggtttcaccgtggtctcgatctcctgaccttgtgatccgcccgcctatgcctcccaaagtgctgggattacaggcgtgagccaccgcgcccagcattaagactccgtttcaagaaaaaaaaaaaaaaaagagagagagaaagagaaagtcctcaaaagcaattgcaacaaaaaccaaaactgacaagtgggacctaattagactaaagaacttctgcacagcaaagaaaatctagaggaaatggataaattcctggaaacataaaacttcccaagactgactcagaaaaaacagaaattctgaacaaaccaataatgagttccaaaattgaatcgtaataaataaaaaacctatcaaccaaaaaaagccctggaccagaaaaatcacagctgaattctagatgcacaaagaactggtaccagtcctactgaaaatattccaaaataccaactcctctccaaatcactctataaagccagcattatcctgataccaaaatctggcaaagacacatcaaaaagagaaactacaggccaatatccttgatgaacacagatataaaaatcctcaacaaaacactagcaaaccaaacccaacagtactttaggaagttaatacaccacaaccagtaggttttactcctgggatgtaaggttggttcaacatatgcaaatcaatatatgcaattcactgcatcaacagaattaaaaacaaaaaccacatgatcatctcaatagatgcagaaaaagctttcgataaaattcaacatcctttcataataaagacctccaacatactaggcattgaaggaacataactcaaaataaaaagagccatctatggcaaacccacagacaacaccatatgaatgggaaaaagctggaagcattacccttaagaattggaataagacaaggttggccactcttttcactcatatttaacagagtactgaaaatcttagccagaacaatcaagtaagataccaaaataggaaaagaagtcaaatatctctccactgactatattactctatacatagaattgctaaagggctcctagataaaagactttggtaaagtttcaggatacaaaatcaatatacaaaaatcagtagcatttttatacaccaataatgttcgagctgagagtcaaatcaagtatgcaatcccatttacaatagtcatacatgtacataaaatacctaggaatatatctaaccaaggaggtgaaagatctctacaagaactacaaaacactgttgaaagaaatcacagataacacaaacaaatggaaacacattccacactcatggattagaagaatcaatatcattaaaatgaccatactgtgtctgcagcaaccttggtttgcatcgaagtcacagcaccaaaaaaaaaaaaaaagaaagaaagaagaaagaaaaagaccatactccccaaagcaatctatagattcaacactattcctatcaaattaccaatgtcatttttcacagaattagaaaaaactattctaaaattcatatggaaccaaaaaagagcccaaatagccaaaggatctaaaacaaaaacaacaaagctggaggcatcacattacccaacatcaaactctacttcaaggctagtgaaaaagaacatggcactggtgcacaaacagaaacacagaccagtggaacacaatagggaacacagaaataaagccacacacctacaaccaactgatctttgagaaagctgacaaaaacaaggaactgggaaaggaatccctactcaataaatggtgctgagataactggctaaccacatgcagaatgaaactggacccttaactatcaccatgtgcaaaaattaactcaagatggattaaacacttaaatgtaagacctcagaatataaaaatcccagaagaaaccctagcaaatacccttcaggatattggccttggtaaatatttcatgactaagtccacaaaagcaattgcaacaaaaacaaaaattgacaagtgggacctaattaaaccaaagagcttctgcgcagcaaaagaaactaccaagagtaaacaggtcaggtgcaatggctcacatctgtaatcccagcactttgggaggccaaggcaggaggattacttgagcccaggagtttgagaccagcctgggcaacaaagggagacctgtctctacaaaaaaatttaaaaattatccaggtgtggtggcatgtgcctgtagtcttgtgcaatcccatttacaatagccatatgcacacacacaaaatacctaggatatatctaaccaaggaggtgaaagatctctacaagaactacaaaacactgttgaaagaaaccatagatgacacaaacaaatggaaagacatttgcagatcctgaggtggatcactgagcccagaaagtcgaggctgcagtgagccatgatctcatctcaccaccgcactgtagcctgggtgacagaatgagactctgcctcaaaaaaaaaaaaaaaaaaaaaaaagacatcccacagaatgcaagaaaatgttcgcaagctatgcatccaacaaagatctgatatccagagtctataaggaacttaaaaaaaaatcagcagcaaaaaacaaatatccccaataaaaagtgggcaaaggacatgaacagacacttttcaaaagaagacatacaaggctgggaacggtgggtcacacccataatcccagaactttgggaggctgaggtgggtggatcacttgaaaccagtagtttcagaccagcctgggcaacatggcaagacatgtaatcccagcactttgggaggccgaggcgggtggatcacgaggtcaggaaatcgagaccatcctggctaacacagtgaaaccctgtctctactaaaaatattttaaaaaattagccaggcgtggtgatgggcgcctgtagtcccagctactcaggaggctgaggcaggagaatggggtgaacccgggaggcggagcttgcggtgagccgagatcacaccactgcactccagcctgggagacagagtgagactcggtctcaccaaaaaaaaaaaaaaaagttggccagatatggtggctcatgtctgtaatcccagcactttgaggggtgaggcaggcagatcacttgaggccaggagctcgagaccagcctggccaatgtggtgaaaacccatctctactaaaaatacaaaaattagctgggtgtggtggtgaacgcctgtaatcccagctactcgggagggtaaagcacgagaatctcttgaacctgggaaattgcactactgcactccagcctgggcaataaagcaagactgtcacaaaaaaaaaaaaaaaaaaaaaaaaaaaaaaaaaaaaatgccaatgaggcatattcactttcatccatcagtttgggaattcttagtactgtcggtatgagttgtcaaaaaagagaaaaaaatcaggcatggtagtgggcacttgtaatcccagatattcaggaggctgagacagaagggtatcacttaagccaggagaccagcctgggcaacatagcaagactccattccaaaaaagagagacagaaagatggtgaaatgcctaatataggttaagtgtttattagatattggtcagagtgaagcagaacatcattagaaagactataatctatatctactctgataaatatggtaacaggtcaacggggcaaagactgtctaaacctgttctgagtagtctatataaggcattcaaacacgcccatcatgagtagtgctctcgcagctgatttattaaaaagcattaattaatcacagaatgatttatatatatatagaactctttcaacttatgtactccgatttatttattagaaaagcactggaaaaccatgactgcacactataaataccacaggcaaatttcatattttcataaagtcatttaaaaagacgaaatctctttttgaatgcttactaataatcatccacttaatttatagtatagccttttaatcaggacattcttgaagggagatactaagtagaagctagaccctagggtttaaaaattttataaatatcttccagtattatcaaatgcccactagagtaattagaaaacaagtaagtgacaatgtctagtattctttttcaaactactcaggcccctttcttgtgagattcaaataccctcccttcttttttttctgactatacaataaaaatacaaatgtttttagggttctaatttttttgaacatacaatttcatttatttcttccttctctccttttatgattttataaaaaatctagttttcaccacacagtatgaggtggcagtgtgaatacctcaagtttgaaagaatcttgtggcaattctgtcataaatctctatttacaagaatcactactttactagtcatgcaaaatgaaaaagagcatgtgcattcacaaaagatgagtccaggtacatatatatgtacattaacaaaattagaagaaacactgtgagaaatgttaattgcctaaacatttttttctaaaatgtcctgtttaaaaacattttacagctcactttattgatttacacatagtaagcaattatcacaaagaaaaaggaaatactgagtaggattttattaagttactttctaagccacatttacatcaaagcagagcaccaattcgcatttttttatcctttccttagctttagagacttcaactaaaaagatgttttctctgttaaatatccccgtcatagaagaattcaaggaaaaaacaaacacatttaaactgctaatttggtgggttttgatgacgacggagtttcctggaaactatgtgcataaaccacctggaagaggaatttaaaaaaaaaaaaacaatgaaaaacctggtttactaaaaagacaaaagtggctgggcacagtggctcatgcctgtaatcccagtacataaggaggctgaggtaggcagatcgcttgagctcaggagctcaagaccagctcgggctacatagcaaaacctcgtctctacaaaaaaatacaaaaaatacaaaaaatttgctaggcatggcagcatggacctgtagctttagctactcggaaggcggaggacggaggatcgcttgaggccaggaggcagaagttgcagtgagctgaggtcacgccactgcactccagtctgggcaacagagagagattctgtctcaaaaaaaaaaaaaattacttcaatttgttttcaaattgaccacaaaacctgttttgttttgttttttttttttttgttatattaaagaaagagtttaaaaatgccaaaataatcaggcgtggtggctcactcctgtaatatcccagcactttgggagccaaggccggcagatcacctgagctctggagatcgagaccagcctgggcaacctggcgaaacactgtctctactaaaaatacaaaaaattaactgggcatggtggcacatgcctgtaatctcagctacttgggaggctgaggcataagaatcacttgaacccggaaggaggaggttgcagtgagatgagattgtgccactgtactagcctggatgacagaatgagactctgtctcgaaaaaataaataaaaatgccaaactggagaaaactaggtcgtgtccagattaaccttgccccagccagcaagttttgctttttcttctgtgttggaccggactgtcttctgcatttgaggggactttgctcacatctcttttaaagcacttatttgggagtagcataatgactttacaagcctacctcttccaggccacagcctcatttatctttgtgtggtatagcacatctagtcggtactataataaatgctaattcagtgaacacaactaggaaaaatgtctagttttcaagcacattaaataactcttgttttgaaaaactaaacagaaaaagaaagaaggtctctgttggtagagagcaaattagactgtaacacagcaaaatttattaactctcagttatgtattaaccagtagtgtcatgaaaaaatctttagaagaaacaatacttggtaaactgaagttcagctcaaagggggcagggatgacattaatacagatcagtaatttctcatattcataatttttttttttttgagacagagtttccctctgttgcccaggctggagtacagtggcgcaatctcggctcactgcaacctctacctcccaggttgaagcgattctcttgcctcagcctcccaagtagctgggattacaggcatctgccaccaggcctggctaatttttgtatttttagtagagacagggtttcaccatgttggccaggatagtctcaaactcctgacctcagggtgatctgcctgccttgccctcccaaggtgctgggattacaggcgtgagccactgcacccaacctcatattcataattaaaggaaaataggaaaattttatattgacttaaattaatgcttttttttttaaagagacggggttttgctgttgcccaggctgtctgcaaactcctgggctccagtgatcctcctgcccctgtcttttaagtagctggtattcaggtgtgcaccgatgtgacacgctctcaaatgaatttttaaaaattatttttcacaaaatgtactttcttttaaaggatctctgaacaaaaagaaagcataaataccactgagttgggttagaaaatgcatttaaagttaaaagaataaagaaagaggtatcactaagtcacttcatcttcacagaaattctgtgaaatgggtacactgtggttttagagatgaggaaacagtggcacagagccagggctactgaacgaggatttcagccaggataccacaagcaggcagtgtcactcgagagctcgagctctggaccactaggccacattggctttccagagaagcatgtgatttgctatctttatcacaaacaatgagagcaaacagaggcattaaaaatgcaaataaatatgaagatgaatttctttatttcctttttattttagagacaaagtctccttctgtcacgcaggttggggtgcaggggctgtataaccttgaactcctgggttcaagtcatacccttacctcagcctcccgagcagctgggactacaggcatgtaccaccatgcctggcagggtctctctatgttgcccaggctagcctcaaactcctggcctcaagtgatccccatgctttggcctcccgatgtgttgggattacagctgtgagtcacaaagcctggccaaaaatgaatttcttgctagccaaaataggtaaggctctttaaacacaacagcaggctactaaaaaagtgattgcagaattttattccccgaacttccatgtaccgctatccacagaaaggaaatgaatcatctctaaatatgccaacatgttaagcaaaactggtgtgaaaagtacagtaagccatactgagaagtgttgcttccaatctttgaaaaatatttaaggctatataccaaaaaataaataataaataataaataaataaatgttctacaagggtgtaccaaaaaaaaagaaaaatattcttattcaagtttattattccagcataaagccaggaaaatatgaaaatatgaaaacagtctgcagttatcaatttatcacataatatacaaataaatacatttctatcaacagattttttagtgtatcttctcagtgcttcaaatgcctactgtataagattcccctcagtaattcaattattctacaacaagctggtctttataggagaagtatttattctttcaatctacttatcagctaactccctttgttcctatattttaatacaaaaaaataaggttgttttttttttgccaataaatagatgtgtactctctaccaaattactttaatctttttggaccttagttttctcatatgtaaaaattggggagaagtgctgggggtgaagagagacagcaaatagaccaaaagaacttggtagttcccattcttttattcctgtagggctgctgagctattataaagtgtctaggaatgcacacaagcaccatgaattgtctgtagaccaaatacaaaaatagtttccactttacatactaaaattttcacatgtatgcagataacgtgatttgtaaatacaattttatattaaaataaaattttcaggtctacagaagcttatgttatcatgcctgtaatcccagcactttgggaggccaaggtgggaggatcactcgaggttagttcaagaaaagcctagggaacatagcgagactgtgtctcaataaagaaatattctttattagctgatactaaatgtagagctactagagctactattatttggaggcatgaactgttcaacatttaaaaaaggactcttgttcaagtccagcctggataacgtaaggagaccctgtttctaaataaataaataaaaagggctcttatatttgaaaatgtcaggagctactagtatagacggtttctaaaatccttctaagtgtaaaagctgtaatttacagtccattatttctttatccattattgaatataacagttaaatgttaccagctgtaattatcgtagtttttaacaagttaaaattctttacaaatcttaaataaaaagcaagtaaaaaatgtgttccaaagggttgtgtggaaaaaaaaaaaaagcatgttaagaaaaaaaaagccagctggataaattactaagggtgtgaaaactgcaattgatgaaatacttgtaatattaaatgaaatgaagaagcaaaattgttcattgcagatgactaatttcatatattgcaaataaataatttcatatacctctaagataatgacattcactaacaaaatgaataatcttacttgaataagcattaggcagaatagtaaaaatcctcataggttcaaaccttaacctactattaagatagactgtgaattctttaattcaaattactaaactaactagattcctgaaaatggacatgcaagaaatcactgagaacaacctacactataagaactactaaaaatagtgaatgtggcttggcatctggcttatacctataatcctagcactttggaaggctgatgcaagaggatcagttgaggccaggaattagaggtcaatctgggcaagatggtgagaccccatctttacaaaatatttttaaaaattagccaggtgtggtagcctgtgcctgtagttctacctactcaggagactgaggtgccaggatcacttgagcccaggaattcaaggctgcagtgagctatgactgcactactgcactccagcatgggcaaatgagtgataccctggctctaaaaaaaaaaaaccgttaatgaatatacttcttctgatactaaatatgtcaatatttagaatgtaatattcagtgattacaactgtaaaggcaaaacacacagaaataaccaccaattcctctgtagttctctactaattcaattttgcatcctctgagactatatgtcttttcttctcaaacatcccacaatgccaaccactgtctccagaaataactgaattctgcttcatgatctgccaacaaaacagaagccaaaaacagaagataggaatttgttaccttttggctaccaaatctatctgcatttgtgcctatttttttccctttccagaactgatgaaatgtctattttcctattttagacaggtgatctaaaagctactacttttttttcttttttcattcctttcattggctccttcttttaaattatcaatcttatcttctttactaaattcattgccaaaagattacaaaaatgctatagagtcacctaagctaaaaaatcccttcaaagactttttatcctcctttaggtgccaccccaaatctttgctcctcttcacaccaaagttctttttttttgagataggttctctgtcgcctagacaggagtgcagaggtgtgatcatgactcactgtaacctcaacctcctgggctcaagtgatcctcccctcttagcctctcaagtagcagagactataggtgtgtgccatcatgcctgggtaattaaaaaaatttttttttgttgaaactgggtctcactatgttgcccaggctggtctcaaactcctggcctccagcattcctcccgccttgggctcccaaagtgttgggattacaggcgtgagccacctcgcctggcccaatagtcaaatttcttgataagagttatccacatattctactttcatttctttacctcccatgcccaccccaatctggaatttaacattttatcacttttatcagagtcaccgttaacctccatgtagccaaattaagaagtcttcttgaacttaacttctggccttatctgatttagtttattgaattgctgctttgtttaaaaattcaatttatttaacttttgaactagtaattcaaagttacatgctcaatttacatgctcaaaaagtataaaaatgaatacagagaaaagtctcctatactatccactgagtttctctccgtgaggtaactattattgttagtttccttttcattcttctaggaattcttttgcgtatgtaaagcaaatacaattacatattcttattctttccccacttttacacaaatggtatttatttcacttaacacatcttgcagatttttctatatcattatatagtgtcctcatcctttttaacagctttgtcaagatatgattcacataatattgagttcacagagaatgtaccagccatatcatatggtaagtatacaattcagccaggcacagtggctcatgcctgtaatcccaacactttgggaggccgaggcgggaagatcccttaagcccaggaatttgagaccagcctaggcaacatggtgaaaccctgtctctacaaaaagtagctgggtgtggtggtgcgtgcctgtagtcccagctacttggaaggctaaggtgggaggatcgcttgagcccaggatgtcactgaagtgagcctgaagtgagacataatcgggccactgtgctccagcctgggtgacagagtgagactctgtctcaaaaaaaaaaaagacataattcagtggtttttttgtatattcacagaattgtgcatctatcaacactaatttctgaacattttcatcaccccaaaaagaaatcccatgccacacccagccaatgtatcattttatacatatgccagcagcagtacttcccaaactttaatgtgcacacggatcaatataaaatactattagtccaggaccaggtacggtggctcatgcctgtactttgggtggatcacttgaggtggatcacttgaggtcaagagttcaagaccagcctggccaacatggtgaaaccctgtctctactaaaaatacaaaaattagctgggcatggtggcacatgcctatgtaatctcagctactggggaggctgaggtagaagaatagcttgaactcaaagtggaggttgtagtgaactgagatcacgccactgtactccagcctgggtgacagagtgagactccacataaaaaaaaaaaaaaaaaaaaaaactcagctgggcgtggtggctcatgcctgtaatcccagcactttgggaggccgaggcaggcagatcacaaggtcaggagattgaaaccatcctggctaacacggtgaaaccccctctctactaaaaatacaaaaaaatcagccaggcgtgatggtgcgcacctataatcccagctactggggaggctgaggcaggagaatggtgtgatcccgtgaggcggagcttgcagtgagctgagatcacgccactacaatccagcctgggcaacagagcgagactctgtcttctattagtccttcctcctattacgataattaagcaaaacatctcaaaaagcagcttaattgtatatttcaattctcaattgaatatatattgttttattttcactttaacttttatatttattgttattttattaaaataaaagacagtaataaaaggtgaaatgccatgtttaatcagaattcctctccctgtgtggctgaaatgatggtaaggtcatcctaattatttctattttgttcaacatgtttcaagtaaagcaagtgactgaaaacttcagagtgaatatgaacaaattcctaatttagtgactatggaaagcaagtaattggactaagataaaagacaaatacacttaaagggcctcataaaaagaatttcaacatactttttaaaaagagtcaactttagacttcttttaatagcccaccttagttgctggggattttcatggataccaaccacccagtagtgatcagattttcctttgcagtgctctcttgtattacatataggagtccacgtattaccaagtcctctgttaagcattcgaacaattccttctgaatccacgtaacaaggggtacctaaacaccaacagaaaaatcacttggagacatagctacatgttgttaaaggaaccctatttcaaatatattatacataccaaggattcaactttgctttcaaaagcaaaacacaaaacagaagcaaataatctaagattattacgtaaaatttcattaaccatataaagtaagacctaactaaaaaaagaaaaaacattggatttgatatgactaaaatttacacaaataaagtgaaaaaactgagtttcagtgaaaactatgccacctgctggaagataataataatttcatttatttatttatttattattattattttttttttcgagatggagtcttgctgtgtacccaggctggagggcagtggcgcgatctcggcccactgcaagctccgccttccaggttcaagccattctcctgcctcagcctcccgagtagctgggactacaggcacccgccaccacgcccagctaatttttttttgtatttttagtagagacggggtttcaccatgttagccaggatggtctcaatctcctgaccttgtgatccacccgcctcagcctcccaaagtgctgggattacaggcgtgagccaccgcgcccggccgataataattttaaagccaattttagtaaaaaattaaacatgaatcagaaggctcccgcttgagaaacatttagaaaaatgaccaaaatctgatacaaagtgatctttacgaaatttatctttagtactcttcttcctctctcttctttttgttggccttgtcactactctgtccccaactactaggtaagcaattcttacctcgtaaaacagggaagcattcttgttttccacctattctgcttccaactcaggaaatctgtggcaaattacctgattatcccttttcttatctgtggcttcacacccccctcactctgcaaacattagtttccgcagggtctggatctaattggtacttcggagaaaaaaatctatacaaatggaagttatcaatggttcatattattaaagcctgaatgactaatagaaaacacatttagaaatggttgatattttaaagacaaagtggagtttccagcaatgtaaatgaagaacatgaatctccaaaaagagaaatatttaagtccccatgagacagagatgacaggtgatttaaaataaggtactcctgggccaggtgcagtggctcactcctgtaatcccagcactttgagaggctgaggcaggtggatcacctgatgccaggagttcaaaaccagcctagccaacatgacaaaaccccatctctactaaaaatacaacattagccaggcgtggtggtatgtgcctgtagtcccagatactcgggaggctgaggtacgagaatcacttgaacccagaagacagaggttgtagtgatctgaggtcacatcactgcagtccagcctgggtgacagagtgagactctgcgtcaaaaaaaccacaaacacaaaaacaaataaaataaaataaggtactcctcagtgtctttcaaatcatctgtcataagcctctagaatttggtctaaaatagcacttatccaaaagaaatatcatgtgagccacaagtgtaatttttaatttcctagtgccacattaaaaaaaaaatggctacataccatgtatctgaacaacaaaaaaaagttaagtgaaaaaatttaggctgggggcggtggctcacgcctgtaatcccagcacttcaggaggtcgaggcgggtggatcacatgaggtcaggagttcaagaccagcctggccagcatggtaaaaccctgtctctattaaaaatacaaaaattagccgagtgtggtgacgcaagcctgtaatcccagctactcagaaggctgaagcaggagaattgctggaacccggaaggcagaggttgcagtaagctgagatcgcatcattgcactccagcctgggcaacagagcaagactcctaatttattccttaaaaaaaaaaaaattttaaatagagatgggatctcactatgttgcccactctggtcttgaactcctgggctcaagtgatcctcctgcctcggcctcccagagtgctgggattataggcatgagccaccatgcccagccaaaaaaaaaattatttttaaagaaaaaaaggatgaagttaatgttaataatacattttatttcatcgaagatatctcaaatattatcatttaacatgtaatcaacataaaaaaattgatttttatatcttttttcatgctaagtcttcaaaatccagagtattttacacatacaagcacatctcagccatatttcaagtgctcaacagacacacatactagttattgtagtaaacagtgaagctctagaaaattctaagttttctgtatgatctgctggaaaagacacaacttattattgatttgtatcacctccttgctatttaatactttcagaaaaatatatttccttctttataagttttctaatgagaattctcatgaagagagctcttagccgggtgcagtggctcgcgcctgtaatcccagcactttaggaggccaaggtgggtggatcacttgcgcctaggagtttgagaccagcctgggcaacatggcaaaaccctgtctctacaaaaaatacaaaaattagctaggcatggtggcacatgcctgtagtcccagctactaaggaggctgaggtaggaagatggcttaagcccaggaggtggaggttgcagtgagccgagatcatgccactgcactccagcctggacaacagagccagaccctgtcttaaaagaacataaaaataaaaacaagatcttatacataaaacaatggctaccttgcctaaagattgcagctcccagttctgccaacatattaaaatagaaatttaaaatataaaatagagataatttattcttaaattaattaggaataaaacaatgaaataattttcttcttgaagaatatctaacactttatattatacttgttttttttaaacaaatttatcttgccttcagctgaaaacccaatccatgcaaggtaggatttccttgtaagaggaagagggtcaccatgcaaaatttgttttttctttttccccagctctagcagttgaactccaaggcactgatccccatcaaatcctgtacctaatgagaaaatgtaaatataaatcaggcatcaaaggttatccaactataacgcagtctaaattattttctgtgaattgattttgtggtaaattactagactgactagcactactttttatgaataacccatccaactgaggcatcattcaggtattagaaacacagtaagatgttacatggactcttcacataaagtccttataagtgggcatttattcactcaagacatatttacagagagcttactacacgccagcattggcctagatactggggctacagcaataaacaaagtcaccactcttattaaattcaaatttcaggtagaagacaaattaaaaaacacaaaaagaacaaaaaaattatcacaaagttaaaataatgtgatacagaatgtcagagtggtttgttagactggttagtcagaagtgacctctcagaaagtaaagtttaagctgagacatgaactgcaagctggagcctgccatgcaaacattaggggaaggaacacggaagtggatggagggaacagctaatgcaaagtcctaaggtaggaagaatggagggctcgaagaacacaaagaggcagtatggccagaacatggtaatgagaaacaacggtaagagatgaggttggagaggcaggcaaaggtcagattatacgggatcagtagatcaccttgacagctatcagaagtttgactttgattctaaaagtgaaggaaagtcagagggatttgagaagaggagcatgatctatatttttaaaagatcacctaggctgctctgtggagaatggactgtggaaggcaagaactgaagctaaaagactagttaggaggctactatgacagtccaagagatgacatccaggttgtattagcagaagaaatgaaaagagacaaatttagaatgtgttattccatagaattgacatgatgatataattttactgttggagttgatgcaggggaaatggaaagagaagaatcgaggataatttttagatttttggcttcagccactagattgttagtaagccatttactaagatggggaaactacataagaagcaagcttggaaggaaaaaaatcagtttttattgtgagcaaattaagtctgaaatgtctgtccaaactctaaatagatttcaagtaggcaactggatgtgtaagtctggagacacaaggagagggtagggttggtgctatcaacttaaaagtcatagacactgagatgtatttaaagccatggattatgataaaattccccagggtggtttctcaaactgcatattttgacctaagagtcatggaatcaattttaatttgcaactagcattttaaaaaatgaaataaaaaaatttaaactgatatcaaaagagtaaacattgtccaggagacttttatttcagttacatttgcagatatttatagaacagttatatagaatatatttcttttcttctgtttttcttttaaaaatagaaacaggggcttgctattgctatccagacttgtattgaactcctgggctaaagcaactctcccgcctcggcctcccaaagtgctgagattacaggtgtgagccaccacaccacaccacaccatacctggtccagaatctatgaatctatttcttactgtggcaaagcagacaaaaagactgaaagaccctgacctagagagtagtagagaaaaaggggatacactccagctaaaagatagagccaacaaaaaagtaaaaagggagctgccagtgaggaaaaatattgaaagtatgatgtcacagaagtcatgagaagaaggtattttcaatggaattatttttttaaaaaagcacagagattatcggttaccttgataagaccagtcttagcatagtgacggggactgaagaaagacatgaggggaggaaaaaggaggcagcagcttttaaaaagtgtcacattcagagttgttttggcccttcctactaggagttatttttgtggaatttcaacgctgaaagttctctggtcgtgcttgccaaaatggtaagatttagacatggaagtaattaaccaaattccaccttggaattctctctataatatagttctattaagaaacattttcattttcattgctgctagtgaacacaacaaaattatctacatttaaagattacacggattcaaaaggaagtatataatccaagacaaaaagagtaacaaaaacagcaaaaaagctcaagtaatttccattttacttcaagtcataaaagactgaaaaaaatctacctctgtgataaacaatgaaaagctgttctccatgtcctgccattgacaccacaggtccagcaaggctgaatacctctttttgaacccctccaatagtaaacaatcgaagaagcagggcactagtagcggcagcagcccatccttgaccgagacatatggcttcaatatcctcattctgaggcaagtctattatccactctttgcttgaatcccaagaactaaagtgcaggcagtgaagcttgctaaaaattaaaacaagacagaaacaatcaaactttcatatgatatttacatatatatatatataagcaatcatgatattcaacaaaaaaaccaaatagtttacttcctattatacactagtataagaagttgctttaaaaaagtaattatgaaatacccttaaaatgaactatattgatatctttccagccttttttctttgcacatacatatatgtaagttattattaaatacaaattctttttttttgaaatggagttttgctctgtcacccaggctggagtacagtggtgtgatctctgctcactgcaacctccgcctcccaggttcaagcaattctcctgtctcttgcctcagcctcccgagtagctgggactacaggtgggtgccactgcacctggttaatttttgcatttttagtagagatgcagtttcaccatgttggtcaggctggtctcaaactcttgagctcaggtcatctgtccgccttggcctcccaaagtgccgggattacaggcgtgagccaccatgcccagcctgaaggatacaaatttcaaatcacatagaagatagtaaaatccatgaagtgtatcagtactataatcagctgaagaagggatcaagagagggcaatctcttgattaacaaaaagctgaaaaaatattttcttttcttttgaaaagaaaaacattctgcacccattgctttcccatcataatttttttcttgacatctatctacctatttacttacctacctacttatcaaaacatgtaaacatccaaaaaatattaagtagaaaaagcaaacgggtgactagtacattttttggtttgtttttccgtttttttttcctttctcgaagagagattttaaatttaatccatcatgacaaaaatgtagattaatagttggccaaggctcaggttgaattaactgcaaagggatataagaaaacattcttgggtgataaagacgtagtgacaaaaatctagactaatagttggccaaggctagggttgaactaactgcaaagggatataagaaaacattttcgggtgataaagaacattctgtattttgattgtggtaggggttatctgtgtatatacacctttgtcaactcatcaaatgggtgcattttattgtaaataaattacatctcaataaagtaaattaaaataagggaggttcaaatagaaagaaatctggaaggatacatatcaaattgtaaatagcagttatatctgagagtagaattctgggaggagttttcattttccgaaacttctatactgtatactggttttttttctttacaatgaatgtatattactcttataatagtaaaaaaaaaaaaaagcacttaacaatgtaaaaaaaaaatcccatctcttgcattactaactatgccatgtcattttgctatgtagttagagcatgtaatgagggaatcattatggcaaaaacagacatatgttctgaggtattttgggtgtgctggtgtttgtaccaaactcttctgaaatttcatattacaaaaaataaattttgttttattaactttttgtctttaatttcaacaactgtatctaacagttcaacagtgccaaattcttcctaataatcttgagtttaccttgctagttcatcagtgctttcacatgccaacaaaatagcttcgtgggaaagatctgctattgtataattcaaagtgtttgataagtgtgttgcatggtgtatggaggtatcatggaactccacatctatggcattgtcttgctcatcattatagcagcgaataattccaatagagttccacacctacaaacaggtaagattaaatataagtctgagaaaaactgaagctcctagaatcagtaagccacagtagtacaaattaacaaatattataattaaatttgtattaagatttaggttttgggagttactacatctcatctatctctaaatagtttctgacaggagtcataataccagagctacaattacttattatttccttggtgagaataagatacatatatacttattaattagcaaatagagtatttaataatatttaaaaataaattacatgactgttactttaaaagcacattacagttgtcctttgaacaaccaaaccattaaattcctcaaaagaaatatttcaaaaattgagttttcttacaaatatggatgcaaataacaacagacttttttcctaactattctatgataaaataaatacatacattttaagaaaacataatttttttttttttttggagacagttttgctctgtcacccaagctggagtgcagtggcatgatctcggctcaccgcaacctctgcctcctggattcaagtgattctcctccctcagcctcctgtgtagctgtggttacaggtgcatgccaccaggtccagctaatttctgtatttttttagtagagatagggtgtttcaccatgttggccaggctggtctccaactcctatcctcaagtgaccaacccaccttggcctcccaaagtgctgggattataggcgtgagccatcacgcccggcagaggcaacataaattgataccacttggaaaacttatcttccactgatgtccattataggctcacactaggccctagagtttctaataaaattagtgccaatattttatttaacataactataaataaaatattgacactaataaaaaaattaagacctatgacttgatgactactgatagcaataaaaagttttattaatattaatcaccacccttaatctttacataaaaatttatgccaggcctatactcttcaaatttatgccaggcctatacttttaaaaaggcaaaatcctcagaatggaaaacatcatataaccaacacagaaaaactaaactttttaagaactcaggccaggcgcggtggctcacgcctgtaatcccagcactttgggaggcctaggcaggcggatcacgaggtcaggagatcgagaccatcctgtctaacatggtgaaatcccatctctactaaaaatacaaaaattagctgggcatggtggcaggcacctgtagtcccagctactcgggaggctgaggcaggagaatggcgtgaacctgggaggcggagcttgcagtgagcagagattgtgccactgcactccagcctgggcaacagagcgagactccatctcaaaaaaaaaaaaaaagaactcaaatctaaggcaaaaagccaatatattcattttgtctattcatgaaatatatatttaatgtgcactgtatcataccttgttccaaatcctaagaacatatcagtaaacaaaacaaaaatctttatcctcgtgtagcttacattctggtgggtggtggagtgaggaaaagggtcagacttttccccccatagtacttgccaccttctaatatattatactagtagttgccttctaagaaagcacctccttactagtgttttggagtcagtataatcttctatgtaacaatgaccatgaagaataaggtttgaaagtattgccaagaaatattgcaagatagtaatatttacttatgttcatttaatgtcattttggaaagcagaattttatttaacatcattttcaataaggttgaaacaagattaaaactgtgagctaaccataaaataaaccaaccacaaaactgtaatcaaccaaagtgctccaggctacttaatcaaagtttttaaaaatatgttttatccaaaaaaattaactatagtaagaaaaaagtgctgaaaacctactaagaagttaagtgtagatccaagtcttaccatgaatctgtgagtgagatgcaacggtgtagaacctgactgaaatggcttttgccggggagttggcatgggtccatcataaaatggcctttgggatgttacaagtggtagattgtgaatgctgccttcttgaccatcttcctcctcctctttgagaagactagaaccagtttttagcattgaaatatctacaacacaaaggatcataattaagggaatcacgaataccaatgatttggaaaaaggaaagcattatggaatctagtaactttttcattcatattcaatgacactgacatgctatttgcctctttcactgtgttaaagagatgcagtgatggtgcaaaagcaatggtgggtaaaattcctggtgccttggcaccaatcaaggcagtggcacctaactgtattagtcgttactgcattgttaaccactactcacttgcagtaaaaatattaattttattaaatcttgacgcttacacagattttttttttaaagttctgtgtgctaaaatgagaagtgtgatggttgtcttgaaaaaaagcacttatgcaattgtttgagttgtaagctgaactaagtgattttttttcatacaacactacttttacttaaaaaacacatgccagataaactacggttatgcagaattggatctttggcaaacattttcttgtaaatgaatgaagtgagcctatcaattaagaaaaaataactggcagaatttgttgccaatgataacatttgagctttcaggccaggcacggtggctcacacctgtaatcccagcactttgcaaggccgaggcaggcagatcacttaaggtcgggagttccacgttgaccagcctggccaacatggtgaaaccctgtctctactgaaaatacaaaaattagccaggcatggtggcacatgcctgtaatcccatctactcgggaggctgagacaggagaatcgcttgaacccgggagactccgtctcaaaaaaaaaagagctgggcacagtggctcaggcctgtaatcccagcactttgggaggccaaggtgggtagatcatttgaggtcaggagtccgagaccagattgacctacatagtgaaaccccgtctctactaaaatacaaaaattagcctggcatggtggcgggcacctataatcccagctactcaggaggctgaggcaggagaatcacttgtacccagagggcagaggttgcagtgaaccgagatcgtgccactgcactctaggctgggtgacagagcaagactccctctcaaaaaataaaaacaagaaatttgagctttcaattaaaaattaagatattggaaagcttctatttgccattatgagcttcacaactttctaatacttagaaactactgatgagattggtaacaacactagcagatataatttacagccaggtgctgtgactcacgcttgtaattgcagcactttgggaggctggggagggaatatcacttgaggccaggatttcaagaccagcctgggcaacaaagcaagattccatctctacaaaaaataaaaaattagatgggcatggtggcatgcatctgtagtcctagctacccggaaggctgagtgggagaactgcttaagcccaggagttcaaggttacagtgaggtgtgatgataccactgcactccagcctaggtgacagagcaagatgctatctctaaaaacaaaaattaattaattaaaaacaacatataattaattaaaaacaaaaacaaataatttatattagataataaaaagtgtcagtataaagaggatctataaacttcagtgaaccaatattatcaattcatatgttacaaaattaaacatgattttaaaaaatccattcaacattcaagtcagaccaatgaattttttgattttattttgtttttttctgagacagggtctcgttctgttaccctgcctggagcccactgttgcaatcatggctcactgcagcctcgacctctcgggctcaagagatcctcctacctcagcctcccaagtaggtgggattacaggcacacgtcaccacacctggctaatttttaaagtttttttgtagagaggaggtctcactatgttgccctggctggtcttgaactcctggcctcaagcaatcctcctgcctgggcctcccaaagtgctgggattacaggtgagagccaccattcccagccagaccaatgaatcttaacataacagagccgtaagagttcactgaagttttcagattacactttgcaagtaatctttaggaaacgatcatcttctgagtcttggtgcaacatcaaagaatatccacaattaattgaatgtgctattaaaagatttcttaaaatacttctcccttttcaaattacatatttatgtgaggccaaattttctttatacacttcaaacaaaaacaatgtatagcaatagacttaatccagaaaagtagatgagagaatccagctatcctctatgatagacattacaaagattgcaatgccactcttctcactaattttttttgtttttcataaaaaagtactattcatgtttacatgagtttattaatgttatttttaagtgaataaatatttttaaatttctgaattttaatttctaatatgtaaatgacgatagccgtaactctgtataaataaatgctctcggaagggtcctcaaaattttttagagtataaaggctactgagaccaaaacatttgaggactgctgttctataaactctatatgactttaaaaagcacaacatagcactgcacattggcattttacttgataatgttcaagtgttattgtagcatgtaagttgttacaataagcactctatttgaagattttcaattacaatctcaatttcttcattttacttgataatgttcaagtgttattgtagcatgtaagttgttacaataagcactctatttgaagattttaaattacaatctcaatttctttaatagatacaatactattcaggttatctattacttcttgagttagcagtggtactttgtgtctttcagaaaattcgtctatttcatttaagttgttaaatttatgggcacaaagttattcataatattgccattatgcctttgatattaatagtagcactgccatacagacatataatgtgagttacagctgtaattttaaattttctaatatttctaaagtttaaagagtaaaaagaaacagccataatcttaataatatagtgcatttaaaatacatattatcatttcaacatgtactcaatataaaaaatttcccaagatttttacattctttttttcatattgtcttcaaaatctggttgcactccatggtgaaaccccatctctactaaaaatacaaaaattagccaggcgtggtggcgcatgcctgtaatcccagctactcaggaggctgaggcacaagaatcacttgaatccaggaggcggaggttgcagtgagccaaaatcacaccaccgcactccagcctgggtgacagagtgagactccgcctcaaaaaaaaaaaaaaaatccggttgcactcataacatatctcagtttgaactaaccacatttcaagtgctcaacagctacatgtggctagtggctactatatattggatagcacaaatctacagatctatagtgatggcccacctctctttcattctctatgttagtaatttgtgtcttctctttattgatcaaccacgatagatatttattaattttattgatcttttcttttctttggagatggagtcttgctctgttgcccatgctggcatgcagttgacgcgatctcggctcactgcaacctccacctcctgggttcaagtgagtttcctgcctcagtctcctgagtagctgggattacaggcacgtgccaccacacccagctaatttttgtatttttgtagagacagggttttaccatgttggccaggctggtcttgaactcctgacctcaagtgatctgcccatttcagcctcccaaagtgctgggattatagacgtgagccaccgtgcccggccttattgatcttgtcaaagaaccagcttttggtctcattgactttctctataggttttctgttgtcaattttattgaattttgctctgtattatttccttccatttgcttggggtttagttttctctttttctagtctgccatagcagaagcttggattatagatttgaaaccttttttaacaaagtcatttaatgctataaaatttcctctaagcaccacttagctacattctacaaattcaataatgactttaatagtgttaataaaaaatctaaaatattaatcaacagggtaatcacatgcacaaagtcaaattcttaccaactgagttttcatcatcttctaggatgtgacttcgctgtctaggacgacctgaagccatcatgaggtcttcatcatcctcatcatcatttataatcccttttgaaaaagaagggatctcaactgcattgtcatttagaaaatcaccagcattactcatatcatc

SEQ ID NO: 864 - DNA, 312 bp, Homo sapiens
tttctttttctttttttttttttgagacggagtctcactctgtcacccaggctggagtgcagtggcacgatctcggctcactgcaagctccacctcctgggttgacaccattctcctgcctcagcctcctgagtagctgggactacaggcacccgccaccacacccggctaattttttgtattttttagtatagacagggtttcaccgtgttagccaggatggtctcaatctcctgacctcgtgatccgcccgcctcggcctcccaaagtgctgggattacaggcatgagccaccgcgcctggccgaacatc

SEQ ID NO: 865 - DNA, 140 bp, Homo sapiens
ttttttgtaatttttagtagagatggggtttcaccatgttacccaggatggtctcaatctcctgacctcatgatccacccggctcggcctcccaaagtgctgggattacaggcgtgagcccccgcgcccggcccacaatc

SEQ ID NO: 866 - DNA, 167 bp, Homo sapiens
tacaggcgcctgccaccacgcctggctaatttttgtatttttagtagagacggggtttcaccgtgttagccaggatggtctcgatctcctgacctcgtgatccacccgcctcggcctcccaaagtgctgggattacaggcgtaagccaccgcgcccggcctgaaatc

SEQ ID NO: 867 - DNA, 5667 bp, Homo sapiens
agagcgactctgtctcaaaaaaaaaaaaagtgacagagaagcaaagaagctgcaaagaccttcacaataggccttaaatgatatgggattagacaaaggtctgatggaggccaagggcccatacccaggcaagtaccaaggggactcagaggcagccaatgcagcagataggagcagtcccactgggatctggagaccacttgcagtgaggggtgccataagggtgtggattctgtcacctgagtaggtctgcagtgagggtcagcaggaaccaggaaaacctccataactcgatctttcttcaagggcagtggcagcgttagatagcaaaatgggtcaaaggtcacagaaaccttagcacattctgggcaaaccaaagtagatttgaagaggccatggaaagtatccacaatcacagaatcattcctcaacctgtgattctcccaggcttcctttgccaccacctgcgtcaaagggataaacaggacattctcaacacctctcagccccttgcccctgcatccagaatgactcacagcaaacctggagatgaatcaggtggcaatctgtacagccaagagcttgatccaggacaaacaaggccaggactactcttagtgtatcatactcataccacatgccagctctacgcccaatccccaccccaacacacatatatatatttcacatatatgtttatatatatacatatttcaaatatatattatattgattgattgagacatggtcttgctctgtcgctcaggctggcgtgatcatggttcactacagcctcaacctcccggactcaaagcgatcttcctgcctcagactcccaagtagctaggactataggcatgcatcaccatgcctggctaatttttttaggtttggtagggatgggggtcttactatgttgaccagacagttctagagctcctggcctcaagtgatgctcccacctcagcctccaaagtgctggaaccgcaggggaaagccactgcgcctcgccctaatcctcacacttaataaggttggcaacataggacctattggaaactaggggtctgtgtgtcctgataagaaacagaagcccggagaacactatcggtacagagacatggccagggcaaggaaagcccccctatatgtttccagtgatctaaagtaaggtttttggcggggcacggtggctgacgcctgaaatcccagcactttgggaggccgaagcaggcggatcaccagaggtcaggagttcaatatcagcctggccaacatggtgaaaccccctctctactaaaaatacaaaaatttgctgggcatggtggcacgtggctgtagtgccagctacttgagaggctgagacaggagaatcgcttgaacccgggaggtggaggttgcagtgagccaagatcacgtcattgcactccagcctgggcaacagagtgagactccatctcaaaaaaaataaataaataaattttaaaaataaagtttttatctatactacagctcagctaactcatagtttttctaagaagatctaaattttactttaaagcattcatattgattatcccaatgtgatagggtagctgaaatactaaaatcctcttgcactgatcagataatcaaggcaaaaggtataaatgtcctaatgatactaataacaaattaagtaatcatggatggattttattgtgagcaataacaatcttaggggtcctcactataggtactttacagttttcagagtgttcttagtccctagttcaccagtgaaatatcaaacaagctcactctaatttgaaaaagcccaagaggaagccttaggagtaactagggtacagtgcctcacgcctgttgtaatcccagcactttgggaggctgaggtgagaagactgcttgagctcaggagctggagaccagcctagacaacacagcaagtttctgtctctatttaaaaaaaaaaaaaaaaaaagcagtaactacagttagcccctttctgaccagagaccatatccctataactagctacagtgagaagcaaccagggccctggcaacaacactcaaagaccagaagaatatccctgcactctcaataggaggcagcttctttggcatattatcattcagacatcattaatggcataccgcatctggccgcccattggcatccttcagctccaagtagggctttttctttacccggttcagatcttcatgcaatccatctagaagaaaggccagcagctcctgagaatcttgttgctggtagccagaaaattgaggagcaaaacgtcctacttgagtctacaacaaaagcaactgtatcagaaggcataatacgtaaagaactagttaaatcaaaaaagaattgccatcaaaaatagctctgaggagttagctggggcagtgagagagaacacttggttgagtagtccaattaactcctgaagagcctacaggaggccagtggttcccaccagaaagaaggcctagatcagagagccaggaggatgaacctggaacctgggccactgccctaagtcctaaggaggaagggtggagtaccctgagtaaccacacccaagtactgacatgaatccctctccaacatgtccttctttggttcagagtcttaaactccataaggacattacaaacaatactttcatcagctggaggaatcctcctgtacataacagccctcaggtccctaaatactgtctgtccagtaatactctccaccagttattctgagagtatggtccccagtcgcagcattagtatcacctgggagcttagtagaaaagcacattctcaggccccacaccaaacctattcaatcagaaactctggggatgggtctagcagtctgtgttgtattaagcactcccagagattgtgatgcatcctatggagaaccagccaggcacggtggctcatgcctatgatcccagaattttggaaggctgaggcaggcagatcacctgaggttgggagttcaagaccagcctggccaacatggtgaaaccccgtctctactaaaaatacaaaaattagctgggcatggtggtgcacacctgtaatcccagctacgcaggaggctgaggcaggagaatcacttgaacccaggaggcggaggctgcagtgagccgaaattgtgccagtacgctccagcctgggcgacatagcaaggctgtctcaaaaaaaaaaaaaaaaaaaaaaaaaaggagaaccactgttctacacctgttctctaataccatagccactagccacatatggcaattgaaatttacattaattacaattaaaaaccattaaaaattcagttcctcggtcaaatgaaccacatctcaagtgctcagaggtgcttgagctggtagctaccaaaacacagtgcagatatataacacatccatcactgaggaagctccacacttccctaatacccctaaacactaccttccagttgtttatttacattagcttcagcacagtgtgttgccacccaattcttttttatttttttttctgggacagggtctcactctgttgccaggctggagtgcagtggcgcaatctcagctcactgcaacctccgcctcccaggttcaagcaattctcatgccttggcctcccgagttgctgggattacaggcatatgccaccacgcctggctaatttttgtatttttagtagagatggggtttcacaatattggccaggctggtcttgaactcctgacctcaagtgatccacccaccttggcctccccatgggctgggattacaggtgtgaggcaccgcacccagccgttgccacccaattctagtttctttgtgacttagtatgtgaacagtcatttatatatttcccagggattcatgtgaccaaggggatgaaagataattagttttcaatttcaacaaaccacctgagattttagttttctcactgagctaaggtgctattttttttcctctctgaatcataaatatgcatgtcttttcttatcatatgcttcatgaagctccatgaatcccagtggtacaggctaaataggatctttcagatttcagcttaaatctgctgagcgggagggagcaaagcacctccacctcagcaggaaaaagcagttggggcaatggaaagcccaagttgctccgagtgtatccatgtcttctccttaaaccttcctggctgagggaccccagtgataactgcccctcacatcaccttccaagaatgtgagcccaattcctgacttagggggtcccaactcaaaccacgaagcctgtagaatccaggctcagagaacctggaaacagccttcagatgatactagaaattaaactgaattttcattttttttagagacagggtctctgtcgccaaggctgggtacagtggcacaatcacagctcactgcagccttgacctcccaggcttaagtaattctcccacctcagcctccctggtagccgggactacaggtacatcaccatgtccagctaattttgttgttgttgttgttgttgttgttgagacagagtctcactctgtcgctcaggctggagtgcagtggcgtgatctcggctcactgcaccctccacctcccaggttcaagcaattctcctgcctcagcatcctgagtagctggaattacaggtgcgcaccaccacgcctggctaatttttgtatttttggtagagacggggtttcactatgttggtcaggctgatctcgaactcctgacctcgtgatctgcccgcctcagcctcccaaagtgctgggattacaggaatgagccaccacgcctggacttttttgttgttgttgttgttttttctttgagacagagtctcgttctgtcacccaggctggagtgcagaggcgcaatctcggctcactgcaagctctgcctcccgggttcacgccattctccttccccagcctcccgagtagctgggactacaggcgcctgccatcacacctagctaattttttttttatgtatttttagtagagacggggtttcaccatgttagccaggatggtctcaatctcctgaccttgtgatccgcccgcctcagcctcccaaagtgctgggattacaggcgtgagccacagcgcctggcccagatcccatcttaatcccaaaatgcaacgaaaggaatgcctcataacaacactaaaccactctccccaaagtgggaaaaaggaagtacgggagagtatcccttatccaaaaatctgaaatccaaatgcttaaagatccataacctaacactgacatgatattcaaaggaaatgctcactgaaacattttagattttggaatggggatgctgaactagtaagcataatgtaaataccataaaaaaaaatcctaaaaaacctgaagtcccgaaacatttctggtcccaggcatctatatacagggatacccaacccatatatatatatgtctacctactttgaacatgcgaggtgccacatgggcgtcccttccagaccacatctgcttaatgagttcagcataggcttctgcaatttcccctttcatccccagagggttgtctctgttgatttcggcttcatactcatctttgagaaagtagtcagtcagtggtgcagtgttgctcaaacactgaaa

SEQ ID NO: 868 - DNA, 141 bp, Homo sapiens; identical to SEQ ID NO: 862

SEQ ID NO: 869 - DNA, 153 bp, Homo sapiens
caccacgcccggctaattttttgtatttttagtagagacggggtttcaccgtgttagccaggatggtctcgatctcctgaccttgtgatccacccgccttggcctcccaaagtgctgggattacaggtgtgagccacggcgcccggccaaata

SEQ ID NO: 870 - DNA, 131 bp, Homo sapiens
tttgtgtatttttagtagagacggggtttcaccatgttagccaggatggtctcgatctcctgacctcgtgatccacccacctctgcctcccaaagtgctgggattacaggcgtgagccaccgtgcctggcc

SEQ ID NO: 871 - DNA, 8247 bp, Homo sapiens
aggtttcttgccttgatgtactggagcaatcagatcacacggcggcttggagagtgagtgcaaggttttatgagtggaattagccctcagcagatgggggagccagaaggcagttggagtgggaaggtgattttcccctggagtcgggctgctgagcagcctgggctctcctctgaccgcccctgccaaactcatggttccatcagttgatggcctgctggtgcctgttggtgtgctttccacgtcctcttgacgtccagcggcttgtgtctctgcccactataaaaaaccactggggtttttttataggcacaggacggggacgtggcgggctcgggaaatgcaacatttgggcaaaaaaacagaaatgcctgtcctcacccaggtccctgggcacaggcctgggtgtggagccctggccagagaccacgccctcctctacccagcacttccctgcccccttccttatcatctggtcccttttctcagacaccacaacttccaagaaggatcactggtcctgaaccctgtgtcttgtccaggtgtggaccccagaaaagttggtcctggctgggcgcagtggctcacgcctgtaatctcagcactttgggaggctgaggtgggtggatcgcttgagctcaggagttcgtgaccagcctgggcaacgtgacaaaaccccatctctactaaaaatacagaaattagctgggtgtggcggctcatgcctgtggtcccagctatgtgggatgctgaggcaggaggatggcttcagccagggaggcggaggttacagtgaaccgcgatcacgccactctcctccagcctgggcaacagagcaggatcttgtctcaaaataaataaaggaaagttggtcctggccctccagcatttctccagggtccttttttcagcagggacctggcggaggcatcgccctcagagtcctctggacctggacctgcacacctatgggagcaggaaggacccttgtgacttccagtggcccccctgggtgccaggtcccacagtagccacagcaggagcagagtgggtggggtataaactcctatcacaggagggaggactagccgggcctggctgggtggacctgtgtctacagccacacatttcctgggaatctggaagcctgctacagagaggccaggtcccactagactgaaagaagttcctgttaatccaaaggcctgacctgaggaccacaggataaactgcgtggttattttggtgccaatcaggcacggggactgttgttcctcactgtgtgcctataagcagggggttcctgggggtagacgcaggagcaagagcacgctctggaaaggtgatgttgtcctctgcacctgagtactgacttgtggagaaggaaggtagcgccggcctctgctctgcttgatcagccctgctgaccactgggttctgtttctaccccagaaaatcactggttcaatggcagttttccacctgccacaagggaagccacacgtggcagggctggggagttacagcatacccccccgccccccactgcctcccagagcacgtccccttcctcctggcccctggcacgtgcttcctccacgcacgtcatggctgactctgccctctcaccttcctttcagaacccagggaccatgggcgcctccaggctctataccctggtgctggtcctgcagcctcagcgagttctcctgggcatgaaaaagcgaggcttcggggccggccggtggaatggctttgggggcaaagtgcaagaaggagagaccatcgaggatggggctaggaggtaaggatggggcaggtctggccatagaaccggctttcccagggcacagggattcgggctgtagggccacacccttggtttcaccactaagagctaagtgacctggagcagggggttaagcgtgagcctcagtgtcttcatctcagaatgaagaacagtccgcagcccttcggactcttgtgaagataaaatgaggaaatgaactcgaaggacttagaacggtgcgcggtgtgcggtgcgtgctgagtgcgtgttagctgttgtggtgcggtggtgctgggggctgcagggcgtatctggaagcctctgtgcagcagcttgaattgaaccctcccagcaccctcactgttgccgaagggctcgtcagtcacttggttcctctgtctgttcagtggagctgatgatcgctttcatctcacactcgctgtgcacaaagcctcactgcatcctcaacacagccagcttcacctaggaaggaactgaagcccagagaggttgagccgtttacccaagatcacacagtcctccagacgcccctcaaccctcacagggtaaatgagatcatctgtgtaaacatcgctgcacagacgttagcccccgttcgtgtttttgttctgagaaaggtaggccagcttgcctggagaggagaactacagagtaaagagggtcctggcacggaggaaagccaggacgctgcagcctagtggctttccaattttttcatcacaacctgcagtaagaaatacgttttgtactctgatagagtgtacacactcaggtgtgcaggtacagctaaagtaagttgcagtagccgcccttattacataaaagggggctctacttttccgattcatttctctttttttctccagaggtgggatctcacccatggcacactcttggctcactgcagcctcaaactcttgggctcaaacgatcctcctgcctcagcctcacgaacagctgggaccacaggcacatgccaccacgctcagttcgttttttaattctttgtagagatggtgtctcattaactcccaggctcaagcgatcctccctcccgggcctcccagagtgctgagattgcaggtgtgggccactggcttgacccttttttttttttcaattgcaatccactaagccgatttcccggggtacatgggtcccaaccctcagtttggagagccctgtgtgtgcttcccctccaaggcttgggaccccagaccgcagccacacggacacgttcgatcagtcactgtggcaggtgccagtgcgacaggctctgtgctgggggccgcagctggggaggaggaccactgggtgtgagtcgggcatacagcgtgtccctgccaggagtgtgtgcagagcgaccacagcacaggaaacaggaaaggtggccccgggggttctctgcccagccctttgtctttgatctgctaagactgcccatcagctcatggatttctgtagcgctgctctgtgtggggcctggggacatgaggaggaacaggtcagtccctgcctctgtggagctctcgtgtcatctggctgccgggttcaggagacctgcagaaggaggtctggtccatacctcgtggccaggggcctccaggagaaaggaagggagaataactgggcaccaggaaaatgctctgagggcctgacgttggctgggagagtgtggaaggagggaggaaggagacatttgcagaagcacagagggctggaggagcgccagctgtgcagagaagtggtgggtgtgagtggagcaggcagcggtgctgaggaggctggatggaggaactccaggtggctggatttccgcttctcgtcctgctggtgacaagcaaagcacaggccccctcggcagccctgctttattttcttctgaactttgtcacggtcgaaggaactttcctcctaccctctgtaaatattacacaaacagagggaccatcactccagaccctcaaagctgaatacagtggtggcttgctgtcagaccagggtttgagggggggaactgaggcacagagccggaagcctgtgacttccatcctcgggtgtaacctggagacgggggtttcaccatgttggccaggctggtcttgaacacctgacctcacgggatccacccgcctcggcttcccaaagtgctgtgattacaggcgtgagccaccgtgcccagccgagaccctgtcttaaagaaagaaagaaaaaaatccttcgttggggagcatctgcaagcatgaggaatgggggacactggagccagacaggctggtgcttaggggtcccagggccccgggaacccagcagcaaacagcctcgccctcaggggatgacgtaccatcagccacaggccaccagcacggccctgggcttcagtacctgcgagtctgaatggatttgctcctggggcaaccccaggcccgtgctgctcaggagcgggaggcagggaggagcgtcggcagcccggtctctggggaggctggttcctgctttatccacgcaatacccagtcctattctatcaggaggaccccaagatgggccctaactcccaggccaagagccggtttaggcaccctccccgcttgcctgcagggggcaggcctgagcgcctaaccccagtccagagggctggactcagaccctcctctgtggggcaggggacaggcacgtagggagtactgaattgtgggggtgtgcagatttgggcttcaggcgcacagtgtgagccgacctttctagacagcatccctggtccccaaagactagcgaggccggggacacaggagcagcgatgggaagcaggcccgccggaacctccgactcccacctccccacgccacggacgctgcaccaccctgtgtttttgtttcatgtatttctcaccctgttccccgtgttccgcctggggaaccgagtgccatggacagagcagacacttgggcagaactgaacagcgtcatcttcgcctgcctggcgctccctgcctgggaaatggagcttcagctctgtctcccggcggattcttgatgcttcctacgctgccatgtgctagggaagattaactaaaatcagtcacaatatcccactgggaggtgacgctttttaagacgagcaacagccggccgccaagaggcgggtgaggccccactgagcacttctattgcatctaactggggagccatttatacccaagtagaagcacacgttcactttgtagctcaagcccaactttaattagccatctgtatgaataaatgctgattccaggtccgtttcctctccagtccctgcagtttaagctgaggaggcatcgcttaaatcagaccatttagaccaggcatggtggctcacacctgaaatcccagcactttgggaggccaaagcagaaggatcgcttgagcccaggagttcaggaccagcctgggcaacatagcaagaccctgtctctacagaaaaacacacacacagaaaaattagccgggcatggtaagaggaggagactgaggtgcccagcggctgcagcccgtgcatccccagggtcccagcacagagtgggtgttcagaagtgtctgctgagggactgagcaagaacccgactgagcacagcaagcaaacgctcagaacgggaggtcagcagcaccgctgtgcccaacacgggtttccaccataacccgaagttggaacgttttattcttccataccaaacaggagttgagaaggcggctgggttccttgaggtgtggaatgtcatgcactcctcctttcttgcgtggaaagcccgaggtataaagtgtgtatgatgtttgcttttttttttttttttttttttaagacagggtctagctcggttgcccaggctggagtgcagtggagtaatcccagctcactgcagcctccaactcctgggctcaagcattcctcccatctcagtctcctgaggagctgggactacaggcgagtgccaccatgcccagctaatttctgtcctttttgtagaaacagggttttgccatattgcccaagctggtctcaaactccggagctcaagcaatcaatcctcccaccttggcctccaaaaatgctgggattacaggcatgagccaccctgcacccaacctgtttgcatttttattttttaactttaagctattaagggttaatgtttgcatttcttaagggaaaaacagaggagaaagagccaaaggaaaaacactgaaatggtagcattcctgggtgatgagtttatggcgttttgtttcctggttgtctataacaaatatgtaatttttaaattagcaacagcgttagactacttcggggaaacctggctctgtgtgccacgaagcagggaagggcttgttcccaggcgcagcagcacttgggcatcccgtggtgaagtcagccccttacacctcctccaggcacagctgtggggagcatgtcccgagaaggcgcaggaagaggcccaggccacgtgtcccgtgtggtcagcctggggaccagagttaaaaccagagctcctccttcaggaaacagatcatagaagcctgtggtttcatcctgtgttctcagagaagaggcaccaggctggaaagacatttctttgggcagacaggcccagagtatagggcccaggttcccagagcaagcgtcccagggccccggcggtcgtaactaccgctgcatgggctctgatgctcagccgcggaaaagcaagtaaccgggaatgaaggaagtggggtcagtcccaaccctgccacgtgcgggtctcgagacggtggacaagtggctggactccactgggcctgggctgtcactggtacacagagggcactgggctagaactgcgttcctcccaccagaggctccacaccatctccgggcccctccccagagcctctcaaccaaaatcagtgtcttcaaagttcaagttgattctgaagctcagccaggtcgggaccagataatgcattctaggggacatcctcctgggtctcccatccaccctggtggctccctgggctgtgtgtagatgcccagctcctcctccctgccatcgtgtgggcatggcaccatgccctgacggcctccctcccctgcccacctctgcccgcagggagctgcaggaggagagcggtctgacagtggacgccctgcacaaggtgggccagatcgtgtttgagttcgtgggcgagcctgagctcatggacgtgcatgtcttctgcacagacagcatccaggggacccccgtggagagcgacggtgagtctcacagggcctgctccccctccccactatgcgggtcccatctcctggctgggagaaaggccatccgcccaaaccatctctgagtgccagggaccgggcagcctgcgtccccctccaccccacagtgccagcgtggggcccatgagccgtggtctctgcaccgaggctccagtagcgtacctgcccctgctctgcgcccaccctaaaatgagaaacacggtaatgaggatgaaatataaacgatcgtcaggttcctcacgatcactcagtgaactcctcagagagtcagtgtacgtttgggctggccagacgcagtggctcacccctgtaatcccagcactgtggactgtgggaggccgaggcaggaggatcgttgagcccaggagttcaagaccagtctgggcaacacagtgagaccccatctctacaaaaaaacatggttttgttgttgttgctgttgttgttttgagacgaagtctcgctctgtcgcccaggctggagggcaatggcgcaatctcggctcactgcaagctccacctcccaggttcacaccattctcctgcctcagcctcccaagtagctgggactacaggcgcccgccaccacgcccggctaatttttttgtatttttagtagagacggggtttcaccgtgttagccaggatggtctcgatctcctgacctcgtgatcctcccgcctcggcctcccaaagtgctgggattacaggcgtgagccaccgcgcccggccaaaaaaaacatgttttttaagcatgaagtttgggttgcacctcagtgcctcctcttcccccattggtacagaaatgcgcccatgctggttccagctggatcagatccccttcaaggacatgtggcccgacgacagctactggtttccactcctgcttcagaagaagaaattccacgggtacttcaagttccagggtcaggacaccatcctggactacacactccgcgaggtggacacggtctagcgggagcccagggcagcccctgggcaggagacgtggctgctgaacagccgcaaaccatcttcacctgggggcattgagtggcgcagagccgggtttcatctggaattaactggatggaagggaaaataaagctatctagcggtggttttttttttttttttttggaga

SEQ ID NO: 872 - DNA, 83 bp, Homo sapiens
aaggtgatgaggggcctctccatctgcaccacctgcctcctgagcatgctccaggccattaccatcagcctcagcacctcctg

SEQ ID NO: 873 - DNA, 354 bp, Homo sapiens
gttgagtctaagaagtttgtttataacactggagtaacttcctgcttccatgcaggtagctctcagtcactgctgagtaatttaagatggaaaactcagtgagtttactcaagagaaaacatctccatgttagatcaggttgcacaaaaaaaagctttattgactcactggactctaaactccatgttcattgttttgatgaacaggaccacaccccgaggttggcctggagaaggtaaagaaatcggatctagaaagagccaagggaaggcagattggacccaaagttaacacctacgaccaggagactctggagaaaaatgaaagtgctgcctcataaagggtcaacgagaa

SEQ ID NO: 874 - DNA, 149 bp, Homo sapiens
gatagcattgggagatatacctaatgctaggtgacgagttagtgggtgcagcgcaccagcatggcacatgcatagatatgtaactaacctgcacattgtgcacatgtaccctaaaacttaaagtataataataataaattttaaaaaaa

SEQ ID NO: 875 - DNA, 83 bp, Homo sapiens; identical to SEQ ID NO: 872

SEQ ID NO: 876 - DNA, 636 bp, Homo sapiens
ataactattcttgttttatattttattatagtggaacagctcgtgtcctcggtctcttgcctcggtgcctgggtggcttgccgcccacagctaacacggtgaaaccccgtctctactaaaaatacaaaaaattagacaggcgtggtggcaggcgcctgtagtcccagctacttgggaggccgaggcaggagaatggcatgaacctgggaggcagagcttgcagtgagccaagatcacgtcactgcactccagcctgggagacagagcaagactccgtctcaaaaaaaaaaaaaaagagattcatcatctaatatacactctttatattaaatgctgcaaataacagtttgatactaatggcagttaaaatcattgtgtgcggaaacagaaagttaaccaaaaaagaagagtcaattcctcagatgtgtaaaatactgaactagaagctttagaattacaaagagaaaatagcgtcagagatgagctttgatctcaaggatcagttgggaaacattaaagaggcacctcacagtactatactttccacagtaagcgccaaatgaatgctacagacaatgagtagagcaggaacatcaaaagagattattcatagtcagaaatcagggttttttgttt

SEQ ID NO: 877 - DNA, 101 bp, Homo sapiens
cctgtaatcccagctacttgggaggctgaggcaggagaattgcttgaatccgggaggcagaggttgcagtgagccaagatcgcgccactgcactccagcct

SEQ ID NO: 878 - DNA, 461 bp, Homo sapiens
aagccagacacaaaagatcacatattgtatgattccatttatacggaatgtccacaataggcaaattatctgtagagtcagaaggtagattaatggttgcctagcgctgggggaggaggctgagggaaaacaggaagtgactgttcatggatatggagtttctttagggtgatgaaaatgttcaggaattactggtcatgactgcacagctctgtgaatatactaaaaacaactgagttgtaaggtgtgtgaattttatcccaataacgctgtttaaaaaaacagaagcatgggctgggtgcggtggctcccacctgtaatcctggcactttgggaggccaaggtgggcggatcacgaggtcagagatcgagaccatcctggctaacacagtgaaagcccgtctctactaaaaaatacaaaaaattagctgggtgtggtggtgggcacctgtagtcccagc

SEQ ID NO: 879 - DNA, 101 bp, Homo sapiens
acacctgtaatcccagcactttgggaggccgaggcaggtggatcaccagaggtcaggagtttgagaccagcctggccaacatgatgaaaccccgtctctac

SEQ ID NO: 880 - DNA, 222 bp, Homo sapiens
gccagagctcacaaatagttggaactgccctaaggatgccattttgttcttaaatataactagcaaatattactcaaagctgtgcacgatccccaaaccctggtccccaataatttgaataatctgaatatgcaagttaaggtattgagatgggaaccctcctgtgtggtatatcttgctcttatcctttgtgaagccaataaacttcaatttctactctca

SEQ ID NO: 881 - DNA, 374 bp, Homo sapiens
gaaagcttaaatgctgacatgttacaaagtagttttgttgatagctagcaagaagcacacattttctttattctgttgaatcttcatttggatttacagttctgggcagatttggaaacggggatggtggcggcattgtttccgaaaaccagcgcatccgtgcaaagaatttaattccctcaccatcttgctactggtctgttgcagtggggtgtggttagagggctaggaagcaatccaaaacagcagctcaggctgcccaaagccgtgtccaagcgatcattttctccattttgggccaagtcaatttgcaccggcaagaggcagaatgtttgttttatggggaggaggaaaataaaaaaggaagtcagaga

SEQ ID NO: 882 - DNA, 100 bp, Homo sapiens
ctctactaaaaatacaaaaaattagccaggcatggtggggggcgcctgtaatcccagctactcgggaggctgaggcaggagaatggtgtgaacccaggag

SEQ ID NO: 883 - DNA, 159 bp, Homo sapiens
ttttttttttttttgatatggaatcttgctctgtcgcccaggctggagtgcagtggcgcgatctcagctcactgcaacctctgcctccagggttcaagtcattctgctgcctcagcctcccgagtagctgggattacaggtatatgccaccacgcccag

SEQ ID NO: 884 - DNA, 159 bp, Homo sapiens; identical to SEQ ID NO: 883

SEQ ID NO: 885 - DNA, 6041 bp, Homo sapiens
gagccattgacactggagaatgatacctaccctgaaataactcacttcctgaggaaaaaacgccatctctagggtacagaaacctgattctgggctccttttgggaaggaggatttggagtctggtgagagcaaatgattttgcaagtataaaacaatgtccagagaggctgtagggatatctgtgagcccagaggaaacaccaggggatcctgtgcgaagcaccatggcttcagctagggtgggaggagtgggtgggcctctctctaatgacttatcctggtgtttgtgtttctaaagatttgattgtggagagcatatctgatgatggggatttgtaggtaggtaactactttccacgtaagatccaattggagagagttcccaggggccttcggggtatccatgctgcttgggaggttaagggagggggcatgaaatcaaaaggaaacaggaaatatgtgtcatattggatttggtcttttccgggtttattggcataatagttagaactgtctctctgggctatgagggtgctgtgatatttaaaggtggtctttcccagaacacctggccttttcttttctgcctctgccaaacatcacagcctttgggttggattagtcagcaccccttgggattgtgcagaagaggtttggggttgcatcgagtgtcacctgtggtgaacagaatctgagggacacaactctctcacaggcacttccttcaacctggagacagagttctcctggtgtgtgcccaggggtggaggagaaattgacagtctgcctctgaactttcaggactttaaaaagcactcatgtttccatcctcactgttgactcctggcttaaagggatctcccggggtgagtgaggaggcgggatcggaccctggcagtctgacggcagcacctgtgttcctctgcactgggccgtggatgacattacacaccttggtgagaatcaggaattgaggctaaccacatctgaaattgagatgggccttgagtcatataaatagtttggaaaagatgcattttactacgctattgaaagaaaccatttatttctcactccagcaggataaatggttttcagtatccatttaactgctcattgactcttactgtagatgaggaggtggccagcagcccctgccctcccccagttggtaggcccaaggtaaccagcaattgactggatataatggaagagtggtgcattcggaagtatctgtattaatgggacccacatgatatggatgagagctattagggtgagaaaaagcctgggagcacaatgaaatatttaaatattaaacaaaacattgttgaaatctccattgtactttagtagttgaagtcattcttgtggtcatcactgcctttcccaagcataacaagctacttaatatcacatggacccgtgccatgaggaatgatgatcagtttgtaaaatgccaataaaacaattgcctatataagccacaatgtttcatccatatatttcaatttccatgtgtaagtatagttcaaatttcagaaatttattattatctaatagaatatgcatggtatatcaatgagcaattatcatactgtttctattaacaattatttgtatgatgaaaaaagcagactcccattcttggatttttctcagtttgcacacattagcatgacagccccatttccacctgacatgtgccagcaagaggccaggaacagaggcttttcttattaactaagatttctaaatgtattacgtattcacatttagaaactctaaatatcataaaaggttagcaaggaagtttcccttccactctgaacttccaaacaccaagtcaacatttttgtttgcatatcatccctgcaatctatgtgcaaatagaagcatgcacctggaatgcaggctgatgtgtgatcgtgtttacacaaagtcctctgcacctctgcatatatcactgggcaatgcaccttagttatcattccacatttcaaatgtaaatccattgtattgtttcagagctataaagtactgcaccccatgactattcccaaaattacttaagcaccccgctatgggtatccgtttgttctgtttccagtcttgctcttataaccaatgctgtagtgaacagcactgtgttgagaagcggtgaacgtgggcatctttgtcttgttcccttcctcagggggaatgctttcaactctcccccattcaggaaaatgttggctgtgggtttgtcatagatagcttttattaccttaaggtatgtccgttctatgctgattttgacgaacggttttaatcataaagaaatgctggattttgtcaaaggctttttctgcatctattcagattatcatgtgatttttgtttttagttttattgatgtgatgtatcacatttattgacttgcgtatgttaaaccatccctgcatccctagtatgaaacccacttgaatcatggtggattatctttttgatatgctgttggattcagttagcttggttgtagcatttcttattattccatctgtggaatgtattggttgaaataatgaaaacatgttctatcctcactgcttagcactttgtgtttctttaatagccttcccaacagggcaacataaaagcaggagccctgctagtctccccttaacccggaatccccccttctccacagctcgctcattggacaggatagactgggcgcccaggcttcaaggtaaggacgtgctctgtcacctagaggtgcagtgcttgggaaggccaaccttggagggttgcctgccagctttacagtgacagaggtgttgagagggactgaccaccagtgcagaaggctgtgctttgttggtgacataaaggattgtttcacagattgttggggagggacaatcccaaggcctcccctggccctggtgctggctctgcacaaaggcaataagagagggatgctggtaagggctgacctgttgctgtgctggggaggaaggtgctgggctgaaattcaggaggctgaggatgcagcagtcccataggaggtacatgaccttcaggatacattttcttcattgatgatcaatggaaatgagaaatcactgactattttttctatcattggaatctactctccactgctcatgctgttcctgtcttttggggaagatggaggatcaatcagtgtgcgctgcactgagtggaaggaaggagaactgtgacaaaaattaaggaaggatgagagacgggagggcccttcatccagctgcttgcagagtcctcctgaggaggaaagccccgtggctccctggcgaaggagcagtgagggctgcgtgactcccacagtgaagtgtgtggtatgtctgaggacacccaggctggtggtccatgaggagccagtggcagagtgagaagaagaaaggccaggagggtggctggaggccaggctctgagtcattctccatgtgatggaaacagccggagcccagtgggcttggaggtacaggatgcggtggctgatgacagaacaatgtggagagaggcgtcatttgtcaaatccttactttgttctgggcattgtgctaaaaattctgatggctcatcccatttaggggctgaaagttgcagaggtttaggaagctcacccacgatactggagcccccatctcctgccctagtgctgtccaccttctcacccagccaccacctgtttcgggggaacacacagaagtggtaacctcttatggagaggcaagtaaattctgctgtttttgttattcacagaaaaacactggctcgtgtgggttgggaaggtgaaataccagaagtatttcatctggttatttctacccatgcaactcctataatattgaaatgcataggttagcatttttggccaatttactcagcattctgggttaaaggcttttatttattttatttatttatttatttatttttgagatggagtttcactcttgttgcccaagctggagtgcaatggtgcgatcctggttcattgcaacctccgcctcccaggttcaaactattctcctgtctcagcctcccaagtagctgagattataggcacatgccaccacactgggctaatttttttgtatttttagtagaaatgagatttcaccatgttggtcaggctggtttcgaactcctgacctcaggtgatctgccctcctcggcctcttaaagtgctgggattacaggtgtgagccaccacgcctgccctaaagtcttttaaaattcacttgtataagttgacttagttttctttaaccttgtagaaaaatacaaaaatggcaatctcttttatcacacaaataatgtctttttaatggagtgatttttttctaattgaggtattatgtacttttcttttactaattattgtttacatttgaagtgttttatgaatgaatatttaattgcatagatgaagattactagttataggcattttactaaccaatactcattaagcatagcgtggattcatatgacatcaaggagctattttatttggtaaaatgaaaaagcacaagaatgaacgaacgcaagaactgaaacagtggagacacctagaatgacttgtctaagatctaaatcattttgttgtcttcccagcgtacttattatcctgatcattgtcatcagcattgtttgggtccttttagcacagatttctcaaaatgggtaactccataacagttggaagcttacgaattcatataatttgtaagaggtcaatttggaagtacctatctatattaaaattccaataacctgggaatttcatcccatgtcaagagtcttttatgtaaaatatttccacaattaggagaaatatgtgcatggggattttctatgtagcggtgttttgatagaacagaaaattgggataaaccaaatttccatcacgaaggaaatagtaatatgctgaataataatacagcgaatattatgcaggctttaaacatcaaaaaagagttcaacttctgacttccgatgatggtgttgaagcaggtcactgctggtttacatttgattttcatgtgggaactctggaagtccgtccgccttagtgatttcacatgtggctaaattgagctaatgacaagctgttcgaagtatggcaaaatggaactttaaaacagtatcttgtcaacaaccaagaggacctttttcacataaagcccacgcattcatctgcctgtccatcattctgtctgtccacacgggcatcattcgttagtggaactgagtgcccactgtcgagctgacaagcccataacctccctgttcctagtcacacattaattcttcaacaagtcccttttgatagattgtgattaagcttagctactatttccaattgcttccccaaacgtacttctcactgttctcccatcacacccttcagcccatccatgcggggttcctttgcttttcccaccttacaccaaactccctatttttactcccactttgacctcctctccaagacaaaacaaacaaaattagcattttaaaacttagttgtaatctttcttccttcatgaaaatttctccaacagccactcccacggtcctgtgtgttccggatattttaaaataatggctataaggttgagcacttcaggatacgctgttttgctgtgtgcagatggaggcagtggctggagtgaatgaacggcaacacttgctggcaaccggcagaagctgagagacagggaacaggctctcctccagagcctccaggagccaggcctttggacaccttgaatgtgggcttctgggagaccatgcgtttctgttataagcagcccagtctctggcagtttttacggctgccccggaacactcatctatacctgtctgacaaggtcaagctccaaggaagggactctctacatatctacattgtttgcagattttacaataatcatttattcttgcatggctgatcattgttaaccaatacaaataaaataataaagaaatgacccacatttta

SEQ ID NO: 886 - DNA, 656 bp, Homo sapiens
ttccatttatgcagccaacagacacgtgaaaaaatgctcatcatcactggccatcagagaaatgcaaatcaaaaccactatgagataccatctgacacctgttagaatggcaatcattcaaaagtcaggaaacaacaggtgctggagaggatgtggagaaataggaacacttttatactgttggtgggagtgtaaactagttcaaccattgtggaagacagtatggcgattcctcaaggatctagaactagaaataccatttgaaccagccatcctattactgggtatatacccaaaggatcataaatcatgctactgtaaagacacacacacatgtatgtttattgcagcactattcacaatagcaaagacttggaatcaacccaaatgtccatcagtgatagactggattaagaaaatgtggcacatatacaccatggaatactatgcagccataaaaaaggatgagttcatgtcctttgtagaaacatggatggagctggaaaccatcattctgagcaaactatcacaaggacagaaaaccaaacaccgcatgttctcactcataggtgggaattgaacaatgagaacacttggacacagggtggggaacatcacacactggggcctgtcctggggtcggggaaggggggagg

SEQ ID NO: 887 - DNA, 413 bp, Homo sapiens
tagggaggtagcaccgcatggaagctgaaaacagtgacagagaaaactacccagaccaggcgttgtccttgatcccttcaggaacatcactgggcaatgtgaggcacagagagagctagaaagtgtttgggggctgatttgtttttcctgagacgaggtctcgctctgtgacccacgccgaagtgcagtggagccaacatggctcactgcaacctcgaccgcctgggcccaagcgatcctccttcctcaacctcctaaagtgctgggattacaggcatgagccactgcagccagcttggtggctgatttttaaaaatttattggctagttgatggatttgtctgtatatgctatatgttctctatattatctgtcacacttccaaagtataccagctcattctctcccttcac

SEQ ID NO: 888 - DNA, 1829 bp, Homo sapiens
taacatttcgacctgttaaataaaatgggaagccacacttcataccaataaaagtagatactgaataaattaaaagtttgatgagaaacaggatatttacacagtttcaaagtactctcccacaaaatacatattattaattaccattattacatacatgtgatacaggttcattctgcccgcatgccataaatccatcactgtgacaggttttgtaaaagagaaaagatttattcgcaaggcagcccagtgaggaggcaggagaacagctctcaaatcttcctccccaaagataagtcttagggatatttaccggtgagagaagcagggtggtgtaaggtatgggcaaaggtgattggcagtgggggaaaatgaggcagtcggtgaccactgcaagcatagtcagggttcgtggcacttcacagggcacatgttcaaaaaatgacagccttagcgtgatctgagggtgtcgcttggggcctctgatgtcaaaaggccacttcttttgtttgcacaagcctacttgaaagctcacggtctcaactggtttgaactaggcaggagctgccccaagttcctgaaaaacaatttgaacgatcatgacagtagtgacatacatgttatctgtaaggaagccggcaaggttaagttacagcgctcagtggcgcggccttcagcttcacagaaaaaaaataacaaaagcaagtgacccaaagcaagcagggcaggctaaattgggcagacctaatcagatgaaccccatggtctcatatgtaatattacattataactataaagaatgtaattaatgtaaatattcggtacaagaaagtcatcagtgcggggaacactggaattgcgtgccaccagaggacagagtggagccagcgcggtatcacttctgtgctgttcccatcgaaggtcagtaaccggaaccccttcgccaggacgcgggtcctggccaacccaaatcgaggggcattctgcagatcagctggtctgccatcttcaaacgattcatgaaaatcaaagacagctttgaggaacggctccagactggcagagaccaaagaggtcatagatgaacaggagatccccaactggatcctttggctgtaaaggacaatattggcacaacgggtgaagcttgaatggggtctgaggattaggtggtagtaacttcacaggcggggatttgggagaaatgcaatgtcacgtggaaaactgactctcaaatagttcaagaaggaagttctttggactatacttgcaacttttctgtaggcttaatactgtttcacaattttaaaatgtaaaataatagtaccaggtagtagttttttattaagacagattgtgctttttgaaagcattggtggaaagatttctcaaaatcatgcgcgaaagagtttataatgaaattgtgtaatatttgtttcaaaagaaagtgtgggccctgagaagcattttctgtagtttacacagtatttctgccaatttgggatactttcagtgtccctggaattctcatcatctgaatttcttactctttttccctttaaaaaaaaataaaataaagaagtatgaggcaaaaggccacacctacctacctcactttaaaattctgtctaaaaacctggtcacagaggaagatgttggctaactttaatgcgataatctagttcccctcaaaatggaaagctatttagaaaaaagctatttgcccaacgtgaggaacaatttatagaaactgacaagaatttttgtcctggggaaaggacagggtttgttgcatgggataaggggaagtgatgtggccgggcatgatg

SEQ ID NO: 889 - DNA, 300 bp, Homo sapiens
ttgttggggtttatgttactgaagaatgaacagagatgagtaagtggaggtgttatgtaaaggcatactgtactcaaaatctgaagacctgcagcagatttaaattccagctcttattataactttttaaaagattgtgaaaatatcaaaatatagatgaatcaagttttaatatactgtatgatgggtggatgaggctgtccattgtaccatttgtttgaattctcaggcatggtttggcagtgcaagaactctgtaacgttaacaaattcaataaaaagtaaatatatggaaaaaaaa

SEQ ID NO: 890 - DNA, 168 bp, Homo sapiens
tatatatatatatatatttattatactttaagttctagagtacatgtgcacaatgtgcaggtttgttacatatgtatacatgtgccatgttggtgtgctgcacccattaactcgtcatttacattaggtacatctcctaaagctatccctccccctccccacacccca

SEQ ID NO: 891 - DNA, 83 bp, Homo sapiens
aaggtgatgaggggcctctccatctgcaccacctgcctcctgagcatgttccaggccattaccatcagccccagcacctcctg

SEQ ID NO: 892 - DNA, 83 bp, Homo sapiens; identical to SEQ ID NO: 891

SEQ ID NO: 893 - DNA, 279 bp, Homo sapiens
caaatcacatgtgaggcatccaagaaatccctttgaattaggtttgatcaaagtggaaggcattatttaaagcagagcctgccccgcaagagtggttaacctgaatggtttagacaggaggttgacaaactttatctgtaaaacaccagagtaaacactttaggttttatctgccatagtcccaactactcaactttgtccttgtaatcaaaagcagccacagagagtttgcaaatgagtgggtgtggccatattccaatacaattttatttacaaaaa

SEQ ID NO: 894 - DNA, 471 bp, Homo sapiens
ctacaaaacccatagtctttgcactacaacacaagcaaagacgagtcctctgccaacccacatggcagcttggtgcaaattggaaatggggccttttctgcccagggacctcagggcacagagcctggcaactcagtcaatggccagtttctgccctcgactaacccccttggctgggcccctcatgaaaggccttgcaccactgcacaccctcgccctgttcacagaggtagcaaagcacctgcacgtagtcactggtgtgtttccaggttcccctggcatgagacacacacctatgaaatggcaactgtgatcagaggcatagcgagggtcctggagcagagtaaatctaaacatcttcaaaggagctgagccatgatgttggtctcactgagaaaagtggaaggaggaacatttagttttatcctgtggggctgatacccaaaacctgtcatgtacagactattccgt

SEQ ID NO: 895 - DNA, 232 bp, Homo sapiens
cgggtgtggtggctcacacctgtaatcccaacactttgggaggccgaggcgggcggatcacgaggtcaggagattgagaccgtcctggctaacacggtgaaaccccgtctctaataaaaaatacaaaaaattagccgggcatggtggtgggtgcctgtagtcccagctactcgggaggctgaggcaggagaatggcatgaacccgggaggcggagcttgcagtgagcagaga

SEQ ID NO: 896 - DNA, 6150 bp, Homo sapiens
aaagtagagaaaacagtgtaatgaaccactacatattcatcaccctgcttcaaaaatactcaacatttaggcctggtgcggtggctcaagcctgtaatcccagcactttgagaggccgaggcaggcggatcacctgaggtcaagagtttgagacaagcctggccaacatggtgaaaccccatctctactaaaaatacaaaaactagccaggcgtggtggccggcacctgtaatcccagctacttgggaggctgaggcaggagaattgcttgaacccaggaggcggaggttgcagcgagccgagatcctgccattgcactccagcctgggtgacaagagcaagactctgtctcaaacattttgtcagcctttttcatctatctgccccctcctctttttttgcactagagctgggattggcaaactgtaaccccatagaccacatccaacctgctgcctgtgttttaaaaattgagatataattaatataacacatcataaaactcactctcttaaaatatacaattcagtggtttttagcattttacaacattgtgcaaccatcaccattatctaattccagggcattatcatcaccccagaagaaaccccacacccattagcagtcactcattctccccttccaccagccccgggcaaccactaatcaactttgtctctctggctttatctactctggatatttcatgtaaatggaattatacaatatgtggcttttggtgtctggcttctttcacttagcttaatgttttcaaggttcatctatgttgtagaatgcaccagtactttgttccttttcatggttgaccatttcacattttgtttgttcattcatcagttggacagttgggttgtttccacatacattttcaattctactgggtatgcacctaggagtggaattgctaggtcatatggtgactattgtttagctttttgaggaactgccaaactatttcccaaagtggccacaccactttacatttccatcagcaatgtataagggttccggtttctccaaattcttgtcaatatttgttattgtttatctttttgattctatccatcttagtggatgtgaaatggcatctcattgtgtttatttgcatttccctaatgactaaagaggctgagcatcttttcatgtgcttattggtcatatgtataccttctttggagaaatgcctattcaaatcttttgtccagttttcaattgggttattattatttttgaggcagagtctcgctctgttgcccatgctggagtgcagtggtgggttcttggctcactgcaacctccacctcctgggttcaagtgattctcgtgtgtagtctccagagtagctgggattacaggtgtaccccagcaagcccagctaatttttgtattttaagtagatacagggtttcgccatgttggcctggctggtcttgaactctacccaggcctcccaaagtgctgggattaccggtgtgagctaccgtgcctagcctatttttttcaactattaagttgtaagaattctttatatgttctggatactagactcttttcagataagtgatatgcaaatatttccttccatcctatgggctgtgttttcactttctatcttgaaatagtcctttaaagcacaaagtttcaaattttaattattttttctttcattgcttgtgctttaggtggcatatctaagaaaccattgcctaatccaagatcatgaagatttacatgtgttttcttatgagttttatattttagctcttacaattagttcttatgcatctgaatttttaaaaaacttatgtacttctaaggtacaactaattttagaaagtaagagtgagtagattttgatggcctccaagagtttagaaaaaggtatgagctttgatgcacaattttacccaacatatatatgttggatgattggaactttttttggtctactttagggttttttgctcttttgcagcagacagctgggttgtccagagagctgattctggaaaggtgtatattactatttaggtaaatggtcagcttctagtatcagcaaaataaaatactccaaacatgtttaggaggagccccttacagtcccaagtttaaaaacacagactgttattttaagacattttctatgtatagagccccacagttctaacacaggtatttggaaatgtagagaaaaggaagcaaaaatcagcagctgggacttagtttccaaccaagggaggatggcatggatggctgcacttctttcatttgcagacataaccacaaaccatcagttgctggttgacagtttgttctggagatgtgaggccagtggttcttaaacttgagcgagcattagaatcacctggagagtttataaaaacccagattcctgacccccatctgcagagattctgctacaggaggctggggtggggccattaatttgcatttctaataggcttccagatgctgctggccctaagaccacactctgagtagcactactttagatacatgggccaaccatctcgccctggtgcttaccaaacattgaccaagcaaacatgaagctaggtgactctccttggggatgaatatgataataatctactgagaaattcaagaggctgtaagtatcccaatttcattaaaatttctaaccattggtgatgtcatttcaggttccaggcttatgctctttttcttcttcttttttcttttttttttaatttttttatttttgagacagttttgctctgtcacctaggctggagtgcagtggggcaatatgagctcactgcttcctctgcctcccgggttcaaatgattatcctgcctcagcctcccagatagctgggattacgggcacatgccaccacacctggctaacttttgtatttttagtagagacagagtttcgccatgttagccaggctggtctcgaactcctgacctcagatgatacacccacctcagcctcccaacgtgctgggattacaggtgtgagccactgcgcccagctggcttatgctctttttctaaaaatttgtccacttaggaaagtgtcttgatttcaataaaattagcatggattaaattactttttttcttttttttttttcttttggtatttgatcttgctcgatgaatgtggacatcagctatgggttaggaatgctattcaggaacatctaatgtgtttgtgataatgtatttgacttgtggccaaatggtactcttgagagatgtggttgtgactttgacagattaagccaaagttaaattctgatgaagtgcaaaggaattttatcggtcccaggatggttgccaactgtgttgggcaaaagagtgattttccaaaaaggtccagagcaatccgcatgtattctgtcacctctacttccagtttcttcaaaggccagccaaaagcttcattttcctacttcctgtcatttccaaaaccacagcttaaacctgaaaaacaaatgggaagctgtgttcctgcctcttatgattgctgccacttacaaaccagcaagaacagagcacagcaagcagaggagagttcagtcttgctgatgtcacatgaagcagaatgaggactctgcttgtttggctcctgagtttaaaagataagtagacaatttattgttggtaggttgagaaaattcaagaacagagagaaatctgacagtctggccataagaagaaatttttgcatttatgttcttatagccatacctgaagtcaactaattacgtttggagagaagtagaatgcttgctttaagaagaaaaaacaggctagggcgcggtggcacacacctgtaatcccagcactttgggaggccgaggcgggcagatcatgaggtcaggagatcaagaccatcctggctagcatggtgaaaccctgtctctactaaaaatacaaaaaattagccgggcgtggtggtgggcacctgtggtcccagctgctcgggtggctgaggcaggaaaatggcatgaacccgggaggcagaggttgcagtgagccgaggtcgcgccactgcactccagcctgggtgacagagcgagactctgtctcaaaaaaaaaaaaaaaaaaagaaaagaaaaaacaaatgttctatgttgaccctatccccaacacccttgcagcaggtctattgtaccttaagctgtgctctaacttcattagcaggctctaggcctctctcccagagatcacccatgggagggatccagcttccttcactcagcagctcttacactgctcccaggaggaaggaagcattttgttttaaagagactgcaacacaacccaaaggaaagacagttatcttagtgtccatatgtccacaagaggaaaatgtgggtgtagcattttaatcccagtaagtgacaattagtcactaggcttctaagaagtttgacactgttattcctctcccccttttctaaattgcaagggtaatactgcatttgcacagaaaccatgctaactggctagctacttcattaaattaccatatgattcttattttatgggtacaaaacagttgatctcagtgaaccggcaacttagaaacttaggaggcaaattagagcaattactaataaattatacatgtggtaactaacaatttgtctatcacctagaaatatgagaaaaaactgccagactccctggctctgcaattctgaacaagtcttttcatttttttcttttccaagaccaaaagctgtcattatccacaccagttataccattactcttgctgctttcacagagtccaacatttataatacaaagttaggagtacaacgagtgggatttgcattctgtttggaacagagtgtttgactgcttaaaattaaagaactaaaaaaaaaaaaaaaaaaaaattcccagaacctcaaatcaccccctaaaaaccaggaagtgagattcatgttagctttccctaagtaagtttatggaagagataatggcaagaggtaggggcaaagtatctgttcattcataatcactactgtgcttcgtttctgggcaaggtagtctgatgaaattaaaggaagttctgtgttacaagtcatgtgcttttatgggggaggaggtgagatgaggtcaattaacaagatatgatctttctcttctctccctgcttgtctcacccaggcctcgggtgtgccattcaacatgaaaggtgttgatgccattcattaattgagggtcagattcctctatcagcatattcctcccatctgagactgccttacctccatccacttccacccccaacaggtttcattttctgcagctgctgtcaagagctacgtggaggaagagagtggttttaacaactgcatgctcaaatttattctcactggcctcttgtttgaaggaagtccaatgtctagaccctggatgttgaaacaggatgtaaaaaaaacaccaaaaaaaccctgtatatttgagagagttttgaaacccatcccaaatacactccagcaatggagaaaaatttgattttggcataatttatataccacatttctccccgtacccaacaaaagtgtatgctaatgtctctatatcacatgatatatcagtttaaaatattctttctctttgcctttgttcgtagtctcatttccacttttacttaaaattttaatatcttctccccaggttctttatttatttttgctatatgcctgaatataagacctaattccatgtcaccaatatctcccttgagaagcactgatgttaagtagaataaaatgtaatcaacactcattgtttcctaccaggacaacagtagggtttaaaacaaaaccaacctcgttatgaattccaaacgcccttctaaataactctgggtgccatttcacaacctgacctgcatagttcctttaggctgctgtgggagttgtgactatcctgtgtccacgtttgcatgctaggttgcactaacccagtaaacacattctgtatcagcctgcagtttgtggaggtccgagcacaacgcatggaattccacctctctggggttcctgccaggtggagcaatccagaagtatagcttccacctgtaggggaggcgcctgcaaacctggcagctct

SEQ ID NO: 897 - DNA, 114 bp, Homo sapiens
ttttttgtatttttagtagagatggggtttcaccgtgtcagccaggatggtctcgatctcctgacttcatgatctgcccgccttggcctcccaaagtgctgggattacaggcgt

SEQ ID NO: 898 - DNA, 327 bp, Homo sapiens
tttgcagtagtgtgtcttattttcagtctatatgaaaacctacaacagtaacttaaatattgtagaacatgtattaaggtattaaggtttttcccagctgacttaataagttaatttgaattaatggtgtatgattttgaatacaagttcgaagaccttgggtgctgtgtgtgatgtcattgagctggctgtgaaagatgtgagacaatgagtgtcttcttgtatcgcatggtaagaccataaccgtattgtaacactccaccacgggcctcctctcaggggaaagggggattacttcaggttgggccaccgctctgacgtgcacgt

SEQ ID NO: 899 - DNA, 413 bp, Homo sapiens; identical to SEQ ID NO: 887

SEQ ID NO: 900 - DNA, 232 bp, Homo sapiens
tttttattttattttatttttttgagacagagtctcgctctgtcacccaggctggagtgcagtggcaccatctcggctcactgcaacctccacctcctgggttcaatcgattcccctgcctcagcctcccgagtagctgggattacaggggcctgccaccacacctggctaatttttgcatttttagtagagatggggtttcaccatgttggccaggctggtctcgaactcc

SEQ ID NO: 901 - DNA, 327 bp, Homo sapiens
tttgcagtagtgtgtcttattttcagtctatatgaaaacctacaacagtaacttaaatattgtagaacatgtattaagatattaaggtttttcccagctgacttaataagttaatttgaattaatggtgtatgattttgaatacaagttcgaagaccttgggtgctgtgtgtgatgtcattgagctggctgtgaaagatgtgagacaatgagtgtcttcttgtatcgcatggtaagaccataaccgtattgtaacactccaccacgggcctcctctcaggggaaagggggattacttcaggttgggccaccgctctgacgtgcacgt

SEQ ID NO: 902 - DNA, 84 bp, Homo sapiens
ggtggccggtgcttgtaatcccagctacttgggaggctgaggcaggagaatcgcttgaacccgggaggcggaggttgcagtgag

SEQ ID NO: 903 - DNA, 510 bp, Homo sapiens
cccacctggttctgtttgctagcgtttactcttatttcaagtgtctttttgggatttttcaaccttggacgtttccatgtcctgcactgtgaagagaccctatagcagctttcctagcaattgtcagcacaccaactgcacccttcccctggaggaaacaggccaccttgccaggctcctgaggccccattcccaagaaggcaggtcaggttaaactagcagcgaccctaggcccttttctctgggtgccagaggtcattttcttttgagctgagggataatcaggctaaccaaaacagtccaggttaagccctgcccaatccaactggcaaaggtgctgggagtaaagagaaacaccctggaatttgagcaaagtcagatctaaggggccatgggaggctgacagcttggtttttggtcctgggaagtacagcagcctggctgggcccagtggggaggagctcctggccagcagccaggaccagcactgggaggctgggcgccaccctg

SEQ ID NO: 904 - DNA, 5131 bp, Homo sapiens
atgaagaactgtgaaccatttgtatccttccctctgttggccattgacaagagaaattctttgttgtgtttaacagcgaaactctcgtctatagagaagtaaagttttcagttacattatagatataacctccaaaaaaatttcatcttcacttctattcatatctgatgtattatttagtgccacacacaacttacttagataataaagttaggttatgaaagaagagaatcaaatatgaatcaatttcccctctcatctttttttttgagatggagtctcgctctgttgcccaggctggagtgcagtggcccaatctcggctcactgttaagctccacctcctgggttcacgccattctcctgcctcagcctcctgagtagctgggactacaggcgcccatcaccacgcccagctaatttttgtatttttagtagagacggcatttcaccgtgttagccaggatggtctcaatttcctgacatcgtgatccgcccgcctcggcctcccaaagtgctgggattacaggcatgagccaccgtgcccagcctcccctctcatctttttaagattcaaatattattaattttctattatttgcttataaaacccaaatattatctcaatccccttcctttccatttatatttgtccttcacaatttttggaaaagataacaccactttatttaaataaaaaaatgaaactatctttaaaaagcaagaaacagctgagcacagtagtgtggctgtagtcctagctactcagcaggttgaagcaggaggatcactggagctcaggagcttgaacctaaagtgcactatgatcacacccatgaaaagccactgcattccagcccgggcaacacagtgagatcccatctcttaaaaaaaagagtgagacagtccagattagattcttttacatttcatctgtttcatttctgagcacacagagtattatttagtctggactcattaacttaacctctgccatagcatcacttaccgcaaaaggaggaatttgttttccaatcttgggttagaatattaagaacaaatcatgtagaatgggaaacaaaatgctactaaatgttaaaagtgaaggatgaaaaatattaaattatttccacattaaatatgcttatagaccattttccaaatggtcttcacatcaacaaaaaaattccagcaagaaaacttaaatttttggaaaatattatagtcaaattttagaatatcaaagattttttaaaaatgttcatagaaaaaatgacctaaaatttggatgttgtaagaaatattgctgaatctcctttaataaaagttaagattgacctacggaagttcctattctatcattaaaattctaagaattaagtacagatcattgaaaccctttcaaatcatgttgtaaaaatgtcctaagaagaaaaaatacccatctgtataaaaagcaattttttttaccagaaaattaaccttcagattagttgaaggcagctagacattagtataccctttaatgaataatgttattgattccatagagaataaaatagaataaaagacaaaatatttaaaacataatataaatgtaaacatttttaccttcaaaaaatcctccatagatagattcccctcctcgtccatttcctaaaaatgaaaaacatactcttataactctcagtaagctcctcaaaggtgatacctaaacacaatacttcttgtaaagtagatttttgaataattttgaattaacaatattcgaagattgcagcaaatcataaaagatattaatgtcaataacgacaaggtcccaaattactttctttcccctatgctatgatagcaagaatgtgacgaagactattaaaatatattttaaaaaagaactttcagattctaattatgattatgcaggtcttgcaacaggttaacattttttcaaagttttttaaaactatagttttgatatttttacaataaaaaagtaaaaatttttattgtagtaaggattaccacttgtgacaaaatcaaacagaaacacttgacagattactgagatgaatgcagtgttgttttgtatccagaagcctatttctgaaattcatgtgtcaaaggcaaaattattttctatgagcttccttcttttttttttttttttttttttttttgagacagagtcttgctctgtcattcaggccggagtgcagtggcacaatctcagctcaccgcaacttccacctttcgggttcaagccattctcctgcctcagcctctcaagtagctgggactacagccacgtgccatcatgcccagcaaatttttctatttttagtagaggcagggtttcaccatgttggccaggctggtctcgaactactgacctcgtgatccgcccacctcggcctcccaaagtgctgggattacaggcgtgagccaccgcacccagcctatgagcttccttcttttacatatttctatgagtacttctaattgaccaaagattaaatggagtgagagtgacaagaatattggactaaaacttctagggacttgtctaactttgagatctgtgatatttaacagaaaataatacatgatttttccaagtctcaccttcactgaagtcaccaccttgaaccataaaatccttgacaactctgtgaaagagacaactcttataatgtaatggtttctgagttgatttcccggtccccttttcacctatagagataaaaaaataggacatttaatagaaaggaaatcaaagtagtatgaaagcaaaataaatgtaaaatatgcccctcttgaaccctgcagacttaaaatcatattttcattcctttcaggaatttttttttaaaaattcatttaaaaaatcacccacgttatttctggagaatgtagaaatcactctcaaataatatacctttacaactaatgtttggttttaggtttttttttgagacagagtctagctctgtcacccaggctacagtgcggtggcacgatcttggctcactgcaacctccgcctcctgggttcaagtgattctcctgcctcagcctcctgagtggctgggattacaggcacctgtcaccacacccggctaatttttttttttagtagagactgaatttcaccatgttggccaggctggtctcaaaattcctgacctcaagtgatccacccacctcggcctcccaaactgctgggattacaggcatgggccaccacacttggcctctatttttttaattgagacaggatctcactcttgtcgcccaggctggagtgcagtggagtgatcttggctcactgccacctccgcctcctgggctcaagcgaatctcccgcctcatcctccagagtagctgggactacaggcacacaccaccatacccagctgattttttgttatttatttttttgagacagagtttcactcttgttgcccaggctggagagcaatggtgcgatcttggctcactgcaacctccatctagggttcaagtgattctcctgtctgagcctcccgagtagctgggattacaggcacccactaccacgcctggctaatttttattttttcagtagagatgaggtttcactatgtttgccaggctggtctcaagctcctgacatcaggtgatctgcctgccttggccttccaaagtgctggggttacaggcgtgagccaccacgcctggccgattatttgcatttttagtagagatggggtttcaccatgttggacaggattgtcttgaactactgacctcaagtgatccacccacctcggccccccaaagtgctgggattacaggtgtgagccaccatgcccagccacaccgtgcccagccataatatttctttctttttttttttttagatggagtctcgctcttctagctcaggctggagtgcaatggcacgatctcggctcaccgcaacctctgcctctcgggttcaagtgattctccttcctcagcctcccaaatagctgggactacaggcgtgcgccaccacatttggctaatttttgtatttttagtagagatggggtttcaccatcttggccaggctcgtctggaactcctgacctcgtgagccacccccctcggcctcccagagtgctgggattacagacatgagccactgcgcctggctgcccagccataatatttctaagaattactttcacgccctagtcactgctgtgtaatcttcatgttaagagaaaagtaatatgcatggagaaatctaaaatagagtaaataaaaaattaaagcaagctatgccaggtgtggtagctcacacctgtatcccagctgaggacgcttatgtgtaaggattgatgagcccaggagttctagtccagttggacaacgttgcaagatcctgtctcaaaaaaaaaaaaaaaaaaaaaaaaacccaggcaagcaagcaagccagccatagtcaactgagactactattagggcagttgaaaatgtgaacaaacctgtacaaagacaacgaaagttctcgcatgttttggggcacacatcagaaaataattcaaagacaactcttccagctgaaaaagaaggtagttggttaaacttctttactaatttaaaatattaaacacccatttataaatgtcaactaatattcttaccaggttgattgttaatggcaatgtcaaaaaaacatcgaggacgttgaacctttattcccatggctccaatacttaatctgtgagtaaaatacagtttcagacaagcagactaaaatagcaaagatctttcacaaatttctggaaaaaaaattctgtgaaacaatattagaaatatagtttgaatttattttgatatttatttctatgaggtaaatcacatggattattagtgctttctttttagagattagattgcattttgtgaagcaattagaaaagacttgaaagttaagccttaaccattattatgtaatcaactttctatttatcaaccggaatacagattaatagctcaaacagaaaattgtatttactctgtatgattagtgaactcaataagcagattaccttcaaatgaagaaaagaccaaaaaaaaacaaggacaactgatccctgtgctcct

SEQ ID NO: 905 - DNA, 554 bp, Homo sapiens
aataagaatgatctctataaactgttatggagtattttaaggatatactgttaagtgaagagtgaaacagtatacatggtatgccatctacggtgtaagaaagggaaagtgagaaaatgtatacatgtatttgcttatgtttacaaacagaaatacaggaagataaactggaaattaggttggttattaacatgtatagatggaactggggtgaaaaaaaaaaggaaatgggaatggagtggaagggttgggtgggagagacacttcacagtattctttttgttttgactttggaaatgttactatttcataaacttaaaaaaatgcaaaaaaaaaatatcaaaactaggtaggaaggagaacaaaatgaaatataaccagaaaggaataaacctaacacattttgagtgaatcacaaagccaaaccaaaaaagaactaatttaagtcacttttaaacttggtgtttaactacctacactcagtctaaaaacgaaaataaggataaagaaatagtgaactctagttagttggtctttctttacagcagtatggg

SEQ ID NO: 906 - DNA, 456 bp, Homo sapiens
taaagaggcagaataaacatttggtgccacatgacccctcagaagcatttgccagcttcagtgctaggactgaaaacctgaacaaaaagctgaggttgagcagctaagcagagttttcaatagatgtcagaggcgggggtcacaaaaacgggagttcagggatgacagaccctggtaaacatcccaggcttttggttggaaccacccttcttaccccctaaaaaccccaactttttaccctaggtgtatggtgaacctaaaaattttcctgaaatccagccctcacaaaacacaaaaacttagttttgaattggctgaaatagattaaagtgattcacccttgctcttaaatgcttgtcagaagcaaaactaaatcctctctagaggaaggtaacattcacagcctcagcctatctccacagttttgtgcatgcaagattaacattcagtcaaaaa

SEQ ID NO: 907 - DNA, 157 bp, Homo sapiens
ttttttttttttttttttttgaggcagagtctcgctctgtcgtgcaggctggagtgcagtggcgcaatctcggctcactgcaagctctgcctcccaggttcataccattcttctgcctcagcctcctgggtagctgggactacaggcgcccgccacc

SEQ ID NO: 908 - DNA, 5158 bp, Homo sapiens
ttagagagagggtctcactatgttgccatggctggtcttgaactcctgggctcaagcaatcctcccgcctcagcctcctgagttgctgagattataggcatgagccactgcacccatggtgcctaatttctgcctgatatgctgttggctcttggatccctggccaggacaggacatggaacatgggtaagggccacagacccagcagggctgctctcgaacccagtcttgcttttgcagaaagagccccctgagaaggcctgcatgaggcaactgagtgaaacagaggcaaagcaaggaagagagaagaggtcaagccttaccaagggcacagagccaactgcccagagcaagtgaagtcagagagatgggaatccccaggccaggagccaagtttcctctaggagggacaagggagctattgccaggccatgaaggttgatcagaagcttcaggcaaggattattatttattttattattatttttgtctgtagggggcaggtatggaagctgaggccacatttccatgagtcctacttcccacctgagtctgagggccccctgctggtagaacaagttggtccataggggaaacccctcggggcctgtccttccccaaggctggggcgcttcttggggagctgactgtagggctggtgctgagctccccacctcccacaggggttgtcttcgctttctccacgggtaggtctgcctagacaggcctggctggcagcgctcccggctggggaaatggtatctctttgtatctgagggcctggggcaggctgacagcccaagggattgggtgtcagcagcatgggctgccttgcccagcctgagatgctcaggcctgcaggtaccttggggcagaaagccaggcttctcatcctggattggagacaggtttcgactcctggcgcagaatcagaaaagaccccagcctcacaggctagaacaaaaatccagccccagtttgcctggggatgacagcagtgacccctaaggtgggcagcactttgctgtcagttcttcacaacgtttgttgtttgttgtcttttgtttttgttcttgtttttttttttgaaacggagcctccctctgtcacccaggctggagtgtagcagcgcgatcttggctcactgcaacctctgctttccaggttcaagtgattctcctgccttaacctcccaagtagctgggattacgggcacccaccaccatgcccagctaatttttatattttttgtagagacggagtttcaccatgttggccaggatggtctcgaactcctgacctcaagtgatccacccgtatcaatctcccaaagtgatcggattacaggtataagcctctgcgtccggccaacaacgtttgtttttttgttttgtttttcagacagggtattactctgtcactgaggctggagtgcagtggcacaatcacggctcactacagcctcagcctcccaaggctcatatgatcctctcacctcagcctcctgagtagctgggactacaggcatgggccaccatgcccggctaatttttgtattttttgcaaagatgcagccttgtttatgctgcccaggctagtctcgaactcctggcctcaagagattgacctgcctcagcctcccgaagtgctgggattacaggtgtgagccactgcacccagcccatgtttccttaaatgcacaattcataggacacttcatggggactgtcccgttaagccttacaacaaggatcctcattttagatggggactctgaggcttaaggcagatccagggttaaaccttgcttgaatttatactcagaaaaggcagaatacagagaaaacccagagttttgagtcccacaggctggacaagttacagggtaatcataccaacactgacaaactgtcagaagcaatacatgatataaggatatatacatgacctggcacatggcaggtattcagcaaaactcattttctgccccttctcctttcccttcactgagcagaagccatctcccccttgggttcagcgtggccccagctccccttcagcctgaaagctactggaaaaacgtctggaacctgtcctgctggctgaggcagaggtggctggagggacctcaggctattgtccctgcagttcacagagccaaaatgctgaaacagaagaaactcagccatcagctgaactccttatttgacagacaggaacccaggggccagagagggctcgaggggctcacggctcctcagatgttgaaacagggccagtacactggaagctcagcaggcagtcatgcgccccctccctgatgctctgaagctctcctctgagttcttgctcccctagctggtgggaggagaggggcagcccagtaggtgggcctgtcttctccacagacactgtattctaggggagatgacctccagggcaggaggcccgaagggtcctagcggggacaagctgaggccgctccttttggcgggcaggctggggagtaggctctccgtgctgggtggtgagtcactccctagcatggccaggcccaaactcaaagctcagcattctgggaggtgtgcacgtccacgtgaacgggggtggcgaaaacagactgaggaagtggcgatggggctggcttgggcagattagctgtggccattcccacagaatctctgccacttcctcttgtgtccccagcttgtcaagcccagtgagtccccttctttctcctgcctgggacctacagaagggccaaggcttctccactctctggggtgccacagcaggtggccctggctcctgaggtgacaatggtgagccctctcatctccatggaatggaaaactttccttaagctgggtgtggtggtgcatgcctgtaatcccaacactttgggaggctgaggcaggtggattgcttgagcccaggagtttgagaccagcctaggaaacatggcaagacgctgtctctacaaaaaatacaaaaattaggtgggcacggtggcgggtgtctgtggtcccatctacttgggaggctgaggtgggaggatggctcaaggttgcagtgagcctagatggcaccattgcactccagcctgggcaacagagagagaccgtgtcttaaaaaaaaaaaaaaaaaaggctgggcacagtggctcatgcctgtaatcccagcactttgggaggccgagatgggcgaggtcaggagatcgagaccatcctggctaacacaatgaaaccctgtctctactaaaaaaatacaaaaaaattatccgggcatggtggcaggcacctgtagtcccagttactcaggaggctgaggcatgagaatgcgttcacccgggaggcggagcttgcagtgagctgagatcacaccactgcactccagcctggatgacagagccagactccgtctcaaaaaaaaaaaaaaaaggaaaccttcctcagtagatcttcagtgtccaggaagaaggtacggcagggatcaccaagtccattttacagatgagaaaactgaggctcacagaggtccagtggctcatctattcctcaggtcccaagcctcatgaacttcccactctactacactgtcctcctgagttaaggcttccacaagctggcccaacaacccctttgaagcaattatcccatgccagttcatggaacccaagggtggtggggcagctgccaagggcaaacattggagctggcacagaaaggacacagaagaagagcaaacacctcttctctagtagaggcctagtggtttccaggcttcctgccaccttcttggcagggtccctggcctgggcatgaaaggaagtcaggctcatatccctgcctggctgggagggccctacagcctgcagaacttaggaggggagctgagccttacttagtgagcatctacttgaccctggctctattaattaattatttattattattatttgtagagaacgaggtctccctatgttgtccaggctgatcttgaactcctgggctcaaatgatcatcccacctcagcctccagtctgggattacaagctggagccacagtgcccagctgaccccggctcttcatatgtagaacctcagttggattcaggagactggggttctgaaatgagtacctgtggatggggcactggctcacgtagacagaaatggcttggcctaaagaagatgatcgacagaaggtgctagtgaggaggttttgagaaaacagccagggaaagaagaagccacttcacagggaggggccccctgccaggacccagggatggggccgcagagaggaaagctgacctgccgccccagcacagcaggcagcacgtgctcagatgtgcttcctcatccactgcctttcatcctcccaagaacctgggaagggaaacatcactcttgtcacaggccaagaaactgccagagacaaccacaggctgtcagtctgaaccttgagtggcctggactccagcgggaggaccctgtcagcagtgtctctgggctggctgagaggctggcagcccagtcctggagagaggcacatcaaaggctgggagcgcagatgccacttacaggtttacaacttccacaagcacaggcttctctgtcctggcctggggagctgtgagaggaaactcccaggaaggagggactctggggtatcacagtcataaaagaacaggacttaaagtcctgaggcctgggttccagccttcattcagacaccaaacagttgaatcacagaaagaaacttctcctgaggcctcctttgtaaattgtggggattagactggatgatttctatgcttttaacaactctaaatgaccccaaaatgactggagaagtccccagccacaccctccagtggtggttaagagcatggatgctagagccagaccatgctggctcaactataaactctgccacttagtagctaagttgaacttgggcaaggaatttaatcatttcctacctcagtttccttatacaggaatatcagcccctgtctttgcctgatagggtggttatgagaattccctgagttcacacatgaaagggcagagcagggcctggggcatgcgaggtgctctttgtgcatgagatgcttctgctagttgtcagcacatgcttgtctgtctgtgcc

SEQ ID NO: 909 - DNA, 125 bp, Homo sapiens
atggagtctcgctctgtcgcccaggctggagtgcagtggcaagatctcggctcactgcaagctccgtctcccgggttcacgccattctcctgcctcagcctcctgagcagctgggactacaggcg

SEQ ID NO: 910 - DNA, 87 bp, Homo sapiens
ctcacgcctgtaatcccagcactttgggaggccaaggcgggtggatcacgaggtcaggagtttgagaccagcctgaccaacatggtg

SEQ ID NO: 911 - DNA, 780 bp, Homo sapiens
ctatgaaggaaggagtcttgttgctgatatagtttcctgttgctgccgttactaataaccactaatttagtggcttaaatcaatataattatgatttatacctctgctggtcagaagtctgaaatcagtctgaaagggctaatatcatagtattagcagagccatgttccttctggaggttctagaggactggagaatctgtttccttgtccttttctggttctaaaggctgtccacgatccctggggtgtggcttccatccattttcaaagccagcaatcacattttgacttgtgctttcatcatcacgtttcctttttttactcacctgcctccctctatcacttacaaatacattgggcccaaccagataatccaggataaccccctctcaagatccttaatttaattgcacttctaaagtcccctttgccatgtaaggtaaggtatacataggttttgtaacgaaattcaggtccagaccacttgtcacttgaaagtttaagagatgagcattggtgaaaggatggttagctctattcaggaatccaacaacccaggggaggcagtgaactagtgttcaaagaccgccgagttctgtctccatatcaggggtttttaagggaaattagaaaaaatgatgatcaaaacattcttgtgaaatgtgcagtctcaggtcattgctttgttggtcattgctttcttggtcagtgttttgtggccttctgtaggtgccatcagcctattcttatcaggctggtcagcccattcccagagttg

SEQ ID NO: 912 - DNA, 1459 bp, Homo sapiens
gaggttttcaccgtcatcaccgaaacgcgcgaggcagctgcggtaaagctcatcagcgtggtcgtgaagcgattcacagatgtctgcctgttcatccgcgtccagctcgttgagtttctccagaagcgataatgtctggcttctgataaagcgggccatgttaagggcggttttttcctgtttggtcactgatgcctccgtgtaagggggatttctgttcatgggggtaatgataccgatgaaacgagagaggatgctcacgatacgggttactgatgatgaacatgcccggttactggaacgttgtgagggtaaacaactggcggtatggatgcggcgggaccagagaaaaatcactcagggtcaatgccagcgcttcgttaatacagatgtaggtgttccacagggtagccagcagcatcctgcgatgcagatccggaacataatggtgcagggcgctgacttccgcgtttccagactttacgaaacacggaaaccgaagaccattcatgttgttgctcaggtcgcagacgttttgcagcagcagtcgcttcacgttcgctcgcgtatcggtgattcattctgctaaccagtaaggcaaccccgccagcctagccgggtcctcaacgacaggagcacgatcatgcgcacccgtggccaggacccaacgctgcccgagatgcgccgcgtgcggctgctggagatggcggacgcgatggatatgttctgccaagggttggtttgcgcattcacagttctccgcaagaattgattggctccaattcttggagtggtgaatccgttagcgaggtgccgccggcttccattcaggtcgaggtggcccggctccatgcaccgcgacgcaaacgcggggaggcagacaaggtatagggcggcgcctacaatccatgccaacccgttccatgtgctcgccgaggcggcataaatcgccgtgacgatcagcggtccaatgatcgaagttaggctggtaagagccgcgagcgatccttgaagctgtccctgatggtcgtcatctacctgcctggacagcatggcctgcaacgcgggcatcccgatgccgccggaagcgagaagaatcataatggggaaggccatccagcctcgcgtcgcgaacgccagcaagacgtagcccagcgcgtcggccgccatgccggcgataatggcctgcttctcgccgaaacgtttggtggcgggaccagtgacgaaggcttgagcgagggcgtgcaagattccgaataccgcaagcgacaggccgatcatcgtcgcgctccagcgaaagcggtccatcgccgaaaatgacccagagcgctgccggcacctgtcctacgagttgcatgataaagaagacagtcataagtgcggcgacgatagtcatgccccgcgcccaccggaaggagctgactgggttgaaggctctcaagggcatcggtcgagcttg

SEQ ID NO: 913 - DNA, 396 bp, Homo sapiens
tgatacaaggcctggctctatcacccaggctggagtgcagtggcacgatctcagatcactgtaacctctgcctcctgggctcaggtcatcctcccaccttagcctccagagtagctgggactacaggtgtgcaccaccatgcctggctaatttttgtattttttgtagagacacggttttgccatgttgcccaggctggtctggaactcctgagctcaagcgatacgtcttcctcagcctcccaaagtgctggattataggggtgagccaccaagcagaatagtttcttttttccttttcttttttttgaaacagaatctcattctattgcccaggctggagtgtaatggtgcgatctcggccactgcaacatccccgtcccaggttcaagcaatt

SEQ ID NO: 914 - DNA, 129 bp, Homo sapiens
agatggagtttttgctcttgttgcccaggctggagtgcagtggcgcaatctcggctcactgcaatctccgcctcccaggttcaagtgattctcctgcctcagcctcctgagtagctgggattacaggca

SEQ ID NO: 915 - DNA, 130 bp, Homo sapiens
ttttttttttgagacagagtctcgttctgtcccccaggctggagtgcagtggtgcgatctcggctcactgcaagctccgcctcctgggttcatgccattctcctgcctcagcctcctgagtagctgggac

SEQ ID NO: 916 - DNA, 465 bp, Homo sapiens
ggctggtctcaaactccgaggctcaagcagtcatcctggttcagcctccgaaagtgctgggattacacgcatgaaccactgcacccagccttaaaatttttttgtagagatgaggtcttgctatgttgccctggccggtcttaaacccctaagcccgagcgatcctcttgcctcagcctcccaaaatgctggaattacagggatgaaccatggtatctggctgtgcaactgtcttttaaggtggagtagatgaaggagagagagagcatgggggttttattattttttaaatttttggtttgagagagggtctcactctgtcacccaggctggagtgcaatggcgtgatctcagctcactgcaacgtctgcatcctgggctcaaatgatcctcttgcctcagcctcccaagtagttgggactacaggcatgcaccaccatgcctgcctaatttttgaatgttttt

SEQ ID NO: 917 - DNA, 354 bp, Homo sapiens; identical to SEQ ID NO: 873

SEQ ID NO: 918 - DNA, 485 bp, Homo sapiens
aatgaaagggagaggggaaggtatatgtgtggtgtttggggtgggggttagttttagacaggcaggcaaggctgcctccctgggccgggggtgagacgtgagttggggagcacagcaggtgcttttgcagaagagagctccagggagagggaacagcaagcgcagagcctcaagcaggagcttctgcagcagcagagggagggaggtgtggcagggtagtggctgaccctcagtgtccttgtggcccttggaaggtctgtggagggggtatgacaagagtggtattcctttcattttaagggcccctctggttatggtgtcaagacacagagagatagagctgcagggcaagggcaggagtgaggggaccagttaggaggctgccaccatccgccagggacgcactgatgtggctcagagcagggtggcaggggtggcatctgctgagactcctgagatccaactgaaagagacaacaagtttta

SEQ ID NO: 919 - DNA, 116 bp, Homo sapiens
ttttttgtatttttagtagagacagggtttcaccgtgttagccaggatggtctcgatctcctgaccttgtgatccgcccatgtcggcttcccaaagtgctgggattacaggcgtga

SEQ ID NO: 920 - DNA, 1628 bp, Homo sapiens
tggagtctcgctctgtcgccaggctggagtgcagtggcgtgatctcggctcactgcaacctccgcctcccgggttcaagcgattctcctgcctcagtctcccaagtagctgggactacaggcgcatgccaccatgcccagctaatttttgtatttttagtagagatggggtttcaccatgttggccaggatggtcttgatctcttgacctcgtgatccacccgcctcagactcccaaagtgctgggattacaggcgtgagccacagcgcccagccttttttttttttttttttttttttgacacagagtctcaccctgtcacccaggctggagtgcagtggcgtgatcttggctcactgcaaacttcatctcccaggctcaagtgattttcctgcctcagcttcctgagtacctgggtttacaggcctacacaaccacacctggctaatttttgtattttcagtagagacggggtttccccatgttggccaggctattcttgaactcctgacctcaggtgataaacccacctcggcctccaaaagttctgggattgtaggcgttagccaccgtacccagaccctcataaaccttttaaatggaagtaaacataactgtgctctgaaaactgatgtttaataaaatgagatgaaaaagtgtttctaaatccatacattgaaaaatacttgatatgagtaaattaataactaagtgctataagaagatattcaaccattccatttatagtcctaaaagtttgtgtactcaagctgacaaaaaattgtttttggattttctaattaaaaaaaatggggaggccgggcatggtgtctcatgcctgtaatcccagcactttgggaggccgaggtgggcagatcacgaggtcaggagatcgagaccatcctggctaacacagtgaaaccccgtctctactaaaaatgcaaaaattagccaggcgtgggggcacaagcctgtaatcccagctactcaggaggctgaggcaggagaatcacttgaacccgggaagcagaggttgcagtgagccgagatcgcgccattgcactccagcttgggcaacaagagcggaactccgtctcaaaaaaaaaaaatggggaggccaggcacggtggcccatgtctgtaaccctagcactttggggggctgcggtgggtggatcacctgaggtcaggaattcaagaccagcctggctaacatggtgaaaccctgtctctactaaaaatacaaaaaattagcagggcgtggtggtgggtgcctgttatcctaggtacttgggaggctgaggcaggagaatcgcttcaacccaggaggcggaggttgcagggagccaccattgcactccagcctgggcaacagaaggagactttgcctcaaagaaaaaaaaaaatttttaatggaggactgtgcctcatatttatgatgaaggcgataaaatgttcacagatgtgaaattagcccagctaatttttgtatttttagtagagacggggtttcgtcatgttggccaggctggtcttgaactcctgacctcaggtgatccaccggcctcggcctcccaaagtgctgggattacagccgtgagccaccgtgcccagccaaaattttttttc

SEQ ID NO: 921 - DNA, 1366 bp, Homo sapiens
ttattgatatgatgatgattaataattaatttatttccattttcactttcatactattcagtcccaattctctggaaaaaaaaaaaagaacactggaaaaaaacaggtttactattatatagcagagaaataaggataatgtttcttggtttcaaagttctgatttgtaagttaaaccaagtcaatacaaaaaccttccttcagccaaaaaaaagtagggaagtaaaaacccttttgtaaatccttgttattaggttgctatgaatctgaaatacaatatacacagattatatccttaagcattaggttggcacaaaagaaatcgcggtttttgccactgaaatggcgaaactgcatttacttttatatcaacctagtattataaaatatatacaaagcaagttgaggaaccaaacacaaaatacatgtctacaaacatgctttccaatgtactataaataaacctttacttaagatcttgaaatcaaaattagtttgtatagtattcagaatcaaacctaatgacaaagcaagatgaaataaccaacagcatcatcattatcagaatagtaactaacatttatataaaagattactatgtgtcagaaactaagggctttcatttcattcaattctcataacaacctataaagtaggtactatcattatatccattttacagatgagtgaatgaaggctagaatttgggtcaccggcccaacatgacccaactattagtagtaggtagagaagcgggtctccgaacctaggtaatctggctttggaatctgtgctcataaccactgtgctataatgtctctgatagcagctactaattaaaaaataaaaaatgtatgttttcctaactttaatcatcaccagataaggaatattcttggttcatttatgtctaaattttcaacatactttttccctttcaacctattaactatcctcaattttgagtcagctgattttatgtgattgtttccttccctcccacccccagtacactgcctttatgtggctgcatttgtattagtctctgcttagaaaaccaaaaatgtatgacatgattaaaccttgtttgttcaatataaaataagagttaaatactttccataactttgctctcttctcaggccttcaaagtcttgctcagtaaagtactgttgatgctgataatcagagtatcccaccaagagcacatgatgccttggactgcaatactgtcacagcagtgtcttcagttcttctctactgtgtataatgcagagcaaaatgggggtggtggtagaaattatggtagtaaatatatattttctagaaatatatccatttcgtggaaagataatattaagaccat

SEQ ID NO: 922 - DNA, 786 bp, Homo sapiens
gatggtgttggcctaaggcctcttggcccttgttaggacttggtttaccatggcgcaacacatccatgagattggcaaaaattaaaaagtctgacaacagaaaatctggtaatctggtgaggatgtggagcagtgggaattctccaatactgccagggagcatgggcatcaatcccaccacactggaatgcaaaggggcattctgagtagaactgaagatgtgcccatccttgaccccacagttccagccatgggcatgcgcatgaatgtgcacacgtgttgactgcggcatttgtttgtcattatgaaaacatctaagtttccatctatgggagaggggatatgtgggagtgcccaacagtggagttctagagagcagtaaaaataaatggactagagctgcacacgtcaaaatggatgaagataaaagacatgagggatggagagcccccccctggccacagaagtatatgtccaatatgatgctggtgtatccagagtgttcaaacaaacaacacacccactactcattgtttccaacgtgagtatgaaagtatggagcagtgcggagggccaggagtgctgaatccacatggttacttctccaggcgggggccgaggaccagggctggaggtttactccaggagcttcagtggtgcatgctgaatgtgctgtttcttgggctgggggacagagatgtgcatgctgttatacactctatattgaaatgattgtataacaatatactaatttatcatgtaataaatttgaccagaaagaaacaa

SEQ ID NO: 923 - DNA, 485 bp, Homo sapiens; identical to SEQ ID NO: 918

SEQ ID NO: 924 - DNA, 116 bp, Homo sapiens; identical to SEQ ID NO: 919

SEQ ID NO: 925 - DNA, 913 bp, Homo sapiens
tttaataacagttgttcacacatgtttattgataaaccgtccaaaatgtaggtcatgtgtaaacaattccagttgttgggtatattgggtattgatccctgcagcctcctaaagtgctttggacatgaactgacccgcaaagcaagggcaaaggcctcagatgcacagagctgccctgacatcccttggctcggagtccctgtgccccatgtcagagccctaaacctgtctcccctgcctgcactgtgtccggcagacaaagggcagctgtctgcacggtgaccccgagtacccaggacacggaccacgaggacccaatgaaaatgtcccctttcaccatgatcggcagcccccttcccacagccccgccagcccacaacccccctcccacggccccgccagccgtcctcacagggcaggcggcatctggcatctccaccagcatcacacgcagctgtccctgccagctaggcaaggccgtaatgaccggcacaagcttgggcttgggccgtgggcagcaggagggctggagaggcatggggggaaccccgctctccctccggcatggggcctccacctgcagcagtaagcagcctctcagcccctgagcctggggacctgcccgggcagcacagggccagggccaagaagtatttgtgagaaggaaggtggcctccgccacccctgcctagcaggcctctttctgctgccctttagaaggcactgggtggcagaggaggaaggggagggaggtgttccaaagccagtgcccacccctccacagagccaaccccagggcacacaggaagcagccaccacacgtgggagacaggctgccctcgtcaccgctgccctccagcccccccttcaccctgccctcctgaccctcccacccctgccttcctgccccccc

SEQ ID NO: 926 - DNA, 1403 bp, Homo sapiens
actgtaccaaggcttcagagtgagcagggggacatctggataggttagccagggccacagagagaagagctgcttacacctgaattgtttcacccttttcaagaacagggttgtccttctccccatctggatccttgggctagatctctgccgaggggctccgtcaagtcccgcaaggctagagaagggagccccacatcatttccactttcaaagagggaagatgctcgtcattcaaattacttctgttgatttccatggtatccccctgtccgtcccacaatctcttaccaggcgtcaatgcacatgcaggggatggaaagaggatgagccgatgagcagactttgcattaatcaaggagaaagaaaaagcagatggaaggaggtaggtagatggagaaagcaacagctccttttagcccttgatgatggccctgaaggcctgtctcttttagtgactcctctttgggtcctcttcccctacctctcagtgactaggttcctcatattaattccctgctgtgagtttggctccttgtgctgggcaattcagtcatcctcagaaagagcaaagttggtcttggaattaaggtgcaggtggggaaaaagagggactcagctagacacgaagaaaggctctcttcccagtctaagcccttctaccgtaaggggcattttatcaagacagccacccaactccccatcccatctcccctcctttgtagaaacagcatttgactcaccaagcctttctctccctttccgtgtgtcttgcttagtttctggattgagagaatttctatccttgctccctcgaactctaaaagagcttcttttgaaaactggggagtatcaggcctacctctacatgtgcaacagtgccaggattcaaaggaaaagctcattccagcctctgcctcttgggagatggttcagagtgccacatagggactgaaagagggtgtctgaatccttcaggaatgctttaagtgacattgttgaaaagagataaagaaaaggaaaacaatggaattgggtttctaaggtccctggaaatatcctgggggtctaatagagaaagaaaataagaggaaatttgaagactcacttcttccttcatctgaatccactcagatggcaactgatctctgtcccaaggaccctctaccccacccaattcataatcatctcagattagaaaaggcagaattccttcccattctcaaatcagcatttgggttaggggcccctaagttacgtgagcatgttagaaatgtgaccccaggcctcaagagagaggctctgccacatgagaggagataggaatcatgactgaaaggggattagcacagaacagagaaaactgatttgatagacaaatcaaatagaaaatataaaaaaaa

SEQ ID NO: 927 - DNA, 10337 bp, Homo sapiens
gcctcatcatcgttgtcatagttgggcacagtgctgaagctgccagctcgctgctcatgggtaataccacattcgggcaagttttctacggacctcgtactccgaattcggttctcggggatccgggcagggacactggtggtgtcaaagttttcacattcaaggacttccacataaatcaggtagggagcctgggggaagagtgagacagtatttgcaacttacttccaccactaacccccaaatctcaactctgttagcaaggttcttcctgctgtcctttctcctagctccagccttcatccaatagtcctctgaaactatgaacactatatttagggcagatacttgtcctatgatcacctatgtaaagaatttgtgtgacagaatccttaagtcttcaaaatatttcaactgagctccaaaatgtacagatgatgtgcttgggccaaaccactctagactatcaattacaggctgtaagggaggcctagatgcctctgtgggctcgtcctgaagacagggcccagggagctacagtggacaaaaagactgggacaaagctgggcactgtcccaaggagtgtcccaaacttcagtatttcctttgaaagaagaatatgggccgggcgcggtggctcacgcctgtaatcctagcactttggggggccgaggcgggtggatcatgaggtcaggagttcaagaccagcctggccaagatggcgaaaccccgtcgctactaaaactacaaaaattagccgggtgtggtggcaggcgcctgtaatcccagctactcaggaggctaaggcaggagaatcgcttgaacctgggttgcggaggttgcagtaagccaagattgtgccactgcactccagcctccgcaatagagtgagactccatctcaaaaaaaaaagaagaatctgaaccatgaatactcattccagtcagcacacaaattcagctaattctctccagtgtgaattgggcatccttctctccttttgtcggctcattctgatcagaaaaggtcttagaaacaaaatatttctctatccttatggttgctgtatctggaaagcccaagagttatagaaaggctggagaaaagctaccaaaatgaccataaggtggggtgaagagcaattctcctaagatacagcaagaaggaagctaaaaagattaggtttctttggtccagaaaaacaaaacccaaaaagggatacaggggggctctcaaaatcacaatcgcactgagacagagtcatggttgacatatgcatcatgaactatgaagggagtctaggatgttggtgagggcctcactggtcatacacgcaaactctgaacaaccatgggtgaagagtcacgtccagggtaggggtttgggccagaacccatctaccttgtccttggagttgaggacaacagcctgtgtgtggggtacacggaccacgtggtggtcaaagccagcagtgggcagccagactcgggcagggagcttatggttgagcagggagagctctgagatcagcctctgtgttttctgctctttggtggggagcgtggccagccgcttgccgatcgccatcagggacttgatgaattctctctcaggagccagtcgaacaggctacaggggtttggggtaagacaaaagatggtgaagaaaccatagaatacaatggcacacccactcagtcactcctggccatgcaggccggggaccccactatctggagaactccaggaaaggagctgctttttagtcttagtaggagcttccacccacccttcacaacttgaattgagaatagccagcacattccttccctataggctatcccttgagggtaagggaggccatgagtccaggtaactgggatgcactcctcttctcctggacttgggttccttaaggactgtaccaaggcttcagagtgagcagggggacatctggataggttagccagggccacagagagaagagctgcttacacctgaattgtttcacccttttcaagaacagggttgtccttctccccatctggatccttgggctagatctctgccgaggggctccgtcaagtcccgcaaggctagagaagggagccccacatcatttccactttcaaagagggaagatgctcgtcattcaaattacttctgttgatttccatggtatccccctgtccgtcccacaatctcttaccaggcgtcaatgcacatgcaggggatggaaagaggatgagccgatgagcagactttgcattaatcaaggagaaagaaaaagcagatggaaggaggtaggtagatggagaaagcaacagctccttttagcccttgatgatggccctgaaggcctgtctcttttagtgactcctctttgggtcctcttcccctacctctcagtgactaggttcctcatattaattccctgctgtgagtttggctccttgtgctgggcaattcagtcatcctcagaaagagcaaagttggtcttggaattaaggtgcaggtggggaaaaagagggactcagctagacacgaagaaaggctctcttcccagtctaagcccttctaccgtaaggggcattttatcaagacagccacccaactccccatcccatctcccctcctttgtagaaacagcatttgactcaccaagcctttctctccctttccgtgtgtcttgcttagtttctggattgagagaatttctatccttgctccctcgaactctaaaagagcttcttttgaaaactggggagtatcaggcctacctctacatgtgcaacagtgccaggattcaaaggaaaagctcattccagcctctgcctcttgggagatggttcagagtgccacatagggactgaaagagggtgtctgaatccttcaggaatgctttaagtgacattgttgaaaagagataaagaaaaggaaaacaatggaattgggtttctaaggtccctggaaatatcctgggggtctaatagagaaagaaaataagaggaaatttgaagactcacttcttccttcatctgaatccactcagatggcaactgatctctgtcccaaggaccctctaccccacccaattcataatcatctcagattagaaaaggcagaattccttcccattctcaaatcagcatttgggttaggggcccctaagttacgtgagcatgttagaaatgtgaccccaggcctcaagagagaggctctgccacatgagaggagataggaatcatgactgaaaggggattagcacagaacagagaaaactgatttgatagacaaatcaaatagaaaatataaaaaaaatcagccaaactcccagaggtcctgcatttcctctcacgtctttgcccagcaacaaggtccaagaccctgtgggaccaaagggtcaggggttagtccagagggaacaagaaaggagaggggattaaggaacatcctgggcagtgagctgggaaaagggaagaactcagacctggaaaaaatgtggttgaagttaaaaaagaaaaccagttgtggagaggcaaaactttccttcaggccaagtcctatttgtttttggagtcagctcaccagcacagggcctagcatttagaagattatgaataaatatttgataatctgacggcagaagccatggggaaagggttctgggtgggagaaacaggatcctgggggtttctgccaggcagtttttggctctaatccaggagtgaattctacctctctcccagctgtttgctccagacactcaggagctgggggctgagcagcactgtactccagctgtctctgagagaaggatcagctgagctcatctcagcctgggctcaggatttccaccgcaaaggtcaggggaactccagcagatctgggaggtctgggagggaggagctgatctcccagtaagaaaaggggcattttaactccagccttggcctgggggctcagaagacctggggacggagaggaaatgcggccactgggggagcctgccaccccgtcccagcctggccccacttacggaactgaatgaattatcaatactctcggtgctggaggagagctcctgggaaagggccagagggcaaagggagaaggagggggtgggaagggaggggagagagacaaaggtaaagaatttagctccaacttggatcgtaactgcttctctagtgcagttctacctttctgctttaataaaagaaagtcaactcagaaatgctacttgcccagatgcttgaccacttgtaggagatgctggaagggcagctcagactttaaggtcagaaggactgaagagacaaagcagcctctgcttttcactttattcacttctattctcaactgaatggatcttccttctaggccaaagctctaaagctgggtccctagggcagtaactgcactgccaagcttccctgctctttttttttacccactcacatgctctcaaccaaatccttctccatggggaccaccacaggactgaacttaataagctgcatggctcccatactggaaaccccatgttcctccagctttttggaaacctcagggaggaagaaaagctaaactttcagtggcaggtatacctcttctctaattagcctcattatcaccctgggaagctgaatcccaaccttgaacctctgtgacaaagagcatcctagaccaataagcccaaaatctctgggctggatgctgatgggagtgaaggataaatcaatctcctatctaccaaacctccttaggcttcctatcaggctatccacatgacaatcaatatactacaatttttgatataagttggggagttagctatatccatctagaaagctgactagctggatagcagctgtcctagtcccagcccagaggatttatctaaacatcaccccattgctgtgtcatatgtgtccgtgtgcaaaaacaggggaaagagatggtgtcaaactctcactcagcagctctgaggcaacactcatgcacagggctcatcctgggttctgtccaacatggtctaccagggcagggaacagagcagcacgtgtgcacaaatctaggttgtgggggacgttgaggtcggggtgggggaggttagacttaaaagacaaagtcctaagagctcccagggcaggagggcagtggtgagtttctactctgaaatctgctgagtagattcaagcatccacttgaactcaattccatggtttcagttctattctagctggaggtcctatagtcaggtccttccttgaagaatctggggactggagcactttgagggagaagccacatttggaaacatgcccctaaggcaacaactcttccattttgggtagaaggtggtgggagaattaaggcagtgaggatgtcagagtctattatgaattagtggttctatttctacctatgagctggttggagaaggaacagcaggcaagatattggctccctgagcaacgctccagctgattctgtcacagacaggtcctgtctgactcattgacagccctgggggaagggaggtatatcatgacctgctcctctcctactccctgggcttgagtcactcacactgagtcagctccggggagtaaagatgaagcaagaagctgacatcacaccatatcaagctagaaggcctactggggcttccagtgtgacatgcggcagatttctctgtacaaaggttgcagtcctgaaaagacaaagctaatctactaacagtgtcatcatatcggggagggtgtgatacctaaatcactctctccttttagctcccccattctataccaaaatatttgccatttggttacaaatgggaggacaaactgcctgggcagagttccccgactaggctgataaaatggctttgaagcggcaggctttgaggagcagtggtggaaaatgtgaaaaatcagcacaaagccttctgactgtgggagagagtgtaaaggattcctcatagtaagaaagagaacactgtgagagctgagcagagaacaactctgcagggagaccatgggcaggaagagaactgtacatgctgcccctgagcctcttctttgaggcccgacctcatccttgggagcccctctactggtggtaggagcatagtattaaactcagaacctaaaagaaaagcaagagactgggagcagagtgttagggtctacctagagattctcctagagtatctctgcttaggtcttagataattatgtgcctcattttagtaagctgtatacttcctgcttatggcagaaaacaactttttcaagagagtcacaaactaaacagttccatagatactggggttttcattattacttcacatgttcctagagggaaggataacattttatcccccgtcctccacagcacagctcacggctttggacattgtacaaagtcaataactacatgttgagtgaatgaatgttacatgaaagggaagaaggatgagtaaaaggaaaaccaattcctttggtatttaggggacaaaagccttgacagacgcatcctcaaaatgccaaaggggctgggtctagtcactcatgcctgtaatcccagtgacttgggaggctgaggcgagaggatgacttgaagccaggagtttgagactagcttgggcaatagagcacgacctcatctttacaaaaaaattttttaaaaattagccaggtgtggtggtacatagctgtagccccaggtacttgggaggctaagatgggaggattgcttgagcccaggagttaaaggctacagtgagctatgactgtgccactgcacgccagcctgggcaacagagcaagaccctgttgcaagaaaaagggcggacggacagacagacgggtgggcggaaggaaggaaggaaggaaggaaggaaggacggatggaaggaaaagggctgggagagacccctgtgctgacgactctaatgcttagaaacctagtgatattcatgtttctgtctctttcttgctctcccattttctgtggagccataatgaattcaggtatttcattctgtcagtatcagataacgcaggagtgcctgggaacatagtatctccttcctctcctggatctagtgacccaagataaggagtcaggttggaagaacggcagctacagaacccaccctaaatgatgtaagtattcacctaatacctgcctctcagtgccatccataatcttatcctggagtgggagttagatgtaaggaaagagggaccaaggatcagcagagtaagaaaagccctgaggcctcagcttttctggtcctaagatgagcactacaaaatggataaagagaaaagccaagcctgacaagaggcaccaaggaattcacttccagctgctcaccctctgctacaggtttgactccaagatgagacagctatccaacccttcatgttccactagaatctggatgactcttcttgttctgcagcaacttctcttcatgacccagggctctgctgccaagctcaaccagatatgaaaacggttcattctagttctgacaacagttttggctttgcctgtgcatggatgtggaagctcagatggccatagcctgggccgttcttccccacatggcttctgacagctggggaccttgggaagtagatattgagaaataaccaaggtagttcagctgaatgattatgagcaccagctggagatttgagtcctggtctgacattcactagttgagggaccttgggcaaaacatctaatctttctaagcctcagtttccttgctggcaaaataatacctgtctctcagcatggttgtgaggattaaatgtaaagtacttggcaagatgcctggcacataagtgctgaataaatgttagcacttttagctttaccattattaaactatcctaacaaaattccaaatttccagagagcaggctctatagtctccctccctcttccttttctctagtcactctgacttccctctatttgaaagaagtcccattgtatcaaaaacgtgggtgggttatatgccccacagaggcagatgccaagaccatagctatccgcatttttcaaaaagtgcaaattcctcctttttttctccctcttttctaggctgggttggaagccaggatgggagcctggccaatggtgagtcagaggggaggactggagcaccattgtctggctgggacaccaggtcactgacacttggtagtccactgggcagctttccctgctatctgtccagatgtggagtgaagagtgggtataacctattcatgtggccacctcttccctgctctatatcctaagttatacctccaactgctgctgtagcttcctcttcttcccagcctccaggtccttgactaggcactatatttactctatactaagagtgctttctcttccctttgtgcttctcccaaatggtatgggaaagataccagcaaggcactcttccccctaaggaaaggcaggcaatgaaggcattctccagatgcctcagtgataagaaataaaccttacacttatgtcaacaaaaggtaggatcttcagagggtagtgaaaagggattagattatgaggaggagtggccaggagaatgaagccgatgttctaacatctcccctaccccagcacacagaaagacaatagtaccttttcctttcccacagatgctgctctgagaggctctggtagctatctcaagtctcaggtcagggtgtggagggcttctgccacagttctcattaacatagtagatgttaatggaatggcagtttatttatttatttatttatttagagacggagtctcactctgtcgcccaagctggagtgcagtggcgcgatctctggtcactgcaacctctgcctcccaggttcaagtgattctcctgtctcagcctcccaagtagctgggattacacgcgcccaccaccacgcctggctaatttttgtatttttagtagagatgggattttgccatgttggccaggctggtctcaaactcctgacctcgtgatctgcctgcctcagcctcccaaagtgctgggattacaagcgtgagccaccgcgcctggccagtgcagtttaataaaaatgatttgggacacagtcaggagcgtcagccttgccatgacctatatgacctgaggcaactcactttatctctctgggtctgagttcttcctttgtaaactaaggcaggcaaaatacatgaattctaaggcctttccattctaacattccatgcttttatcagtgaaatgaaacagggaggacagaaagaacagcgtaaccctgtgtgtatataggaggcatcctgtctccatgcagccctctaccaccttttgtctctggccctccccagaattttacctcatcctcattctccactttagggttgctggctgttcgtttcaggttgctgctgagacttatgctggcagtggcatctgacttagagcgctggtgagtccttttggagggagacagccctgtgtcaggggccgggctcaaggagggcagctccctcttcctgtgagctggctttagctcatctgagaggatcagcttccgtagcttggtcccacgggagtgtcgttgagtggaaatgtgcatgtctgaagaataggccccaagcaacagggcacactggagggaaaagttaatgctctggcggcaacggtggactatgtagggcttaatggcatcacccacgtcctcatccatgtggatgtacatgttaagcaactggggcagatagaagtccacgtcctcgttgcgaaagcagaagagccggttgccaatgtaggcttgtactccaggctccttggagttatacaggtatgaaatggccatggagatgtcaaacagttttgactcaaacagcctcagcagccaagactgtttagctgagttgttctgccgccgtcttcttgctcctttggctgtgcctgaggccacagcggcccccatctcatcttcctcctccctgatctgggcaggtggatcatctaggcaacggatctcactgtccacaccatccccattgaccaactccagtggggtgcctctgctagagactgccacgcctccatgcaaaagcttgactttctccaacacctcctggcaggccttctgggccacctcagggtcaatcactgatagttccccgaccccctccgtgatgacacttagcagggaccccccattattccctggtgggccagaagtgggctcagaagttggcttcaagggggcaggctccactactgtatctcccatggccacagccagacttcgagcttccaag

SEQ ID NO: 928 - DNA, 274 bp, Homo sapiens
ctccatctcaaaaaaaaaagaagaatctgaaccatgaatactcattccagtcagcacacaaattcagctaattctctccagtgtgaattgggcatccttctctccttttgtcggctcattctgatcagaaaaggtcttagaaacaaaatatttctctatccttatggttgctgtatctggaaagcccaagagttatagaaaggctggagaaaagctaccaaaatgaccataaggtggggtgaagagcaattctcctaagatacagcaagaagga

SEQ ID NO: 929 - DNA, 117 bp, Homo sapiens
ttgttgttgttgagacggagtctcgctctgtcacccaggctggagtgcagtggcgcaatctcagctcactgtaagttccgcctcccgggttcacaccattctcctgcctcagcctcc

SEQ ID NO: 930 - DNA, 1899 bp, Homo sapiens
tagaatcatcaacaaaactcgcatttaatgatggtgttgacctgaggaatcttcaggcagaagcttgtggtcagaggggaccaccagcaaagaactgacccaggtcttggaccaagagtctcccagagagagtcaacctcccagtagaagggaggccaacccctccactgcttcatgaaagaagactaaaaattctcctgggggaaagaaacacggtacaaaatacattcagagccccctgggtgggcctggggcagcccaaatcctacagatgagggaattggggaagtgtgccacaggtctaatccctgtgcccttgctttgcatggccaggttccaaggggcggaatgtattaatcatattcctcttacaaaaatatatctctttacacgcaccttctccatggtctctttgctacttgggaatgagcatttacctgcactccaaggcttcagagggactgcctagggaggctactccaatagaatagcaaagaggctatgacctatggctttttcatctacataatgatggatggtgcaggtttggactgggtgggaagctactggtatccagggttggggaagagatgggactctggaccaacactttgtaagattgatgctccgtgatttaggtcctcagaaatccttcggtttggcatttcagcatcaagagagcagtgtttgtatagaaatgacacaatttcattcaccccattccttaaagggcccccaagggaagctggccctgttggactatgatcaaggggagatatatggtctgggaaggtagtgggggtccattttgggtgtggttccatctgattaagaacactcttgctgtctcacctggatagcaaaggacccatttgtaggggtcagaagggcagtgtaagactgactggagcccaccatggagagatgtgtcactggggctctctcttaagtcaaattctgcacatggcatgtgaccatcctcgtgggctcactgttggtgcctgaggttccttgaaggtggtatcaggatctcaaggtcacctcctggacacagcatggatagaaaggggcagggttcatgccctggaggtggaaaggcaagcagctcatttctgagaagcagtgtggcctggggggctcataacaccaatggccccacatggtgtctccaattaacctactgtgagcaccattacctccccacactatccaggatgtcagaaacctaaggccacggagaaacttcccagcaatctttctttagaacagaaggtggcctgagttaaacatcggtgccagcacttcttgggtggagatgagaagggggctgcgaaatctcagcccagaagggacaagcatctggggccaagtttttacaatagccccctgggctcttgcatcaagagccttgacaattgccatggggcatccagcaagtctccatgatgtggatgagccctccctcccacaaatggaacccagagtggtgggggcagggacccaggagacagaaaagagtccatgtaactagaaccccctaaacaagatgccccacattgccaaggggggaacatgtgagcagagtggtagtgcctgggcaatctcttcccttgagcctcctctgtcatgcaggaaactcattgaaggcaaagagcagccaaggggattgtccccagaccaaagagaggacagatgagtgggggtaaccaggggtcttgagtccccagggcctgcgtggtcaggactcccagtctaccctccccctgtgtggacgcatcatcttgggtagtagtcatcggggacacccgttaggttccgccctttgagggctgcatccaccatcttgatgtaggcagagatggtcttctgcatgtccgcagtataggggtcatactcgag

SEQ ID NO: 931 - DNA, 104 bp, Homo sapiens
gcaggctgaccatccggcccagctggacaaagaggtcctgcttcaggtcctcaaagtgcaccaccagcaccttcttgccaaacttgagccagtccagtgtgtga

SEQ ID NO: 932 - DNA, 456 bp, Homo sapiens
gcttgccttgtggcactggcagcagcagccaaccacagtggcagatgcagatgagaaatgtcaatggggctacagggatgtggagatgcaggggctattgggccccagggcagaatgcaatctggtggctggctctcaaaatggtactgtgctgtagctgcttagggctcggggagttcatgagacccagcatgagctccctgtctggagcagtgccattatgaggtctctaggaagctcctcatgttagtctcagggcctgtgagggttgaggagcattcccattgataggattgcaggagtcttcaatggaaatatggaccactgggggtctctcactctttctccacattgagaaacctctctgcgctcccagctaatcctggctgagcaggatgcctggcttcctgctccttccttgccttggatgtttcctgtcacttctctgttgaatgc

SEQ ID NO: 933 - DNA, 260 bp, Homo sapiens
tgagatggagtctcgctctgtcacccaggctggagtgcagtggcacgatctcagctcactgcaagctccaccccctgggttcacaccattctcctgcctcagcctccccagtagctgggactataggcccccgccaccatgcccggctaattttttgtatttttagtagagacggagtttcaccattttagccaggatggtctcgatctcccaacctcgtgatctgcccacctcagcctcccaaagtgctgggattacag

SEQ ID NO: 934 - DNA, 1190 bp, Homo sapiens
cgcatgggcagggaaagtgttttattgttatggactaataatttagaggctagggaaggaatggccttgtgtgctggcctcgttgtaacaatttttctcatgtgtcttccagcctgttcatctgtcgcgtttatttctaaaaagtcctctcacctgccctctgctgtcctcagatcccatccacggccctcacctccctcatccttctctgtaacctctgacaattctggatgacctggtccccgccatgcactttgggcttgcccctgccctgtgagtagcctgacaaccctgcacacacccctggggtggtgccagtgcctgctcctcctcctggcctccctgccacccagcccggcatgaagctgaacatcgagtgggccccaggagagaggctgagttggtatggccaggactctcccttggcccagtgggaaggtgcacctgcccacttgggagcaggcctcagcacccctcaccagtttcaggttgcccactctcaacagcagctaagtcagagctccgagggctgctccccacccaccttcagcctcccaggcctccccttgcccgcctgggccctggagacacatgcttcagccacaggcaagtctgtttcccttccatggggttttctccacaccacagcagtggtacctctgggcttctctccctggcccctgccccaaggagcccagatccagtgtggtgcttcttagactgtggtctgaggcctcctgcttatagaacaggcagattcccagacattgcctctcccctaaccaaagtttattgattctgagtctctagggctgtggcctatatttgcatttttaacaatctccctcgggactttttatgcactgagatttgaggccagggttgttctaggctgtaccggcaggtggactggaggccacagagaagaggcagagtgaaattgtgccgggcctggcttggagcacccaccagcccccggaagacaagtctcacccagagctctccggttaagcctgccgagagagaggcaccaggaggcaatctccacactctcagacaccagccgtacccaaagattgatgatttcagacaccgggcctcccggccacatcctcactgcctcactcacgcgtcacaccatagctcttggtttatgtgtttgtctcctggttacacgtgtgttcctcgag

SEQ ID NO: 935 - DNA, 432 bp, Homo sapiens
ccctgctgtttgttccagctcagacctatatgttttgtccatttcacgctccacctcctgctctccccagattgtttcctgtaggttttgtttttgcatctgcccctgccaaagtatgtgggttgacgtggaagacctgaacactctgggagcctttgaagcaaggatggatttattcctttcaggccacagacgccatgccgaggccctggttcccctccagacctgtgcgaggtcctgagcatggcccagtgcatgctaaaatccccacccacacacagaggctgcggatccatccccgaacttcaggggcagcttctgaagtccaggccacctagaaccagggtccctagctccccttctggaacccaatcccctacatggcccaggacccaagcaaggcagggagagtgcgccgtgagtcagcagcag

SEQ ID NO: 936 - DNA, 1099 bp, Homo sapiens
gagccaccaccccagcccattatctctattgatcctcactccaaccttgcaaaataggtagcgtattccagtggagaaactgaggcacaaagaggtgaaagacctttcctgtcacagttaggaaagtggcagaagccgtatttgaaccccagcaggtctccctctgaagtccacacacgtcagcgcctctgtgttgtctctttgccagcacagggctccctggagcccagagatgggggtggtgacttgaaggggttggcaagcctgggctcctccagcgaagcattcccttggccctgggcattcctaagcgagaagaggctcaatcctattttcttctcctaattggatgccttttattcctccttcctaattgaagtctggtcattgctggttgccatggcagcagccaaagcgctcatctcactgtggcttgtctctgcctgcggccaatgggaaacctcctttcccatatacggtggggacatggagtgtcaggctgtcgtattctggtggctggaggaggagaggaagtgagatgggaggaaaaaggcctgtcctctcccacgcagagactccggacagcaggatgtgtggaatccccagtctgttttcagccaggcagcaacagcatctgtactgagttgagtctatgtgtctaccagtgggctaagaacttcatgtgcagtatctcatttaatcttcgtgatggccccaggaagataagggatcaaggcccagaaaggctaagtaagctgccaggtcatccaaggagaaaatggcaaagcctggatttgaacagagactccagcttccttatgtgtagccatctcaccatgctacttctcagggggttactatgagtgtctctcatgtccccagacccagattacaggtttggaggaatacacagcccaccttcccaatatcgcaggcaacagttccaccaaatgccctgcatggcatcacagggagcctagttgcccactgctctactgctgagctcaatgccacccagcccgggctctctcgagctagcctgcttctcaggccccactgacgtcccatggttcaccattacaaccgttcccttgcctcc

SEQ ID NO: 937 - DNA, 869 bp, Homo sapiens
tgctctcgccacaggtctttctttttcaaaagcaaacagctacagtatccatcatactccagagcagccctcaaagcctgggctgttgagagtgcacatcctggcctgcggtgacagccgtcagatggtgaggggccccaggcgactgccccagcagcagggcctgggagctgcacaggggagaactcgataaggagcatcatgagcatagtgggtccattgacaacatgcagtccccacggtggtgcctaatgacaaaatgacatcatgccacctgcaaaaaaagtaaaaatgatcagaggcgagcttgtcagagaagctttgaactaggtgactgcatgaaacatctcagaggcggaagagtgcctccccctccccgggactcccacctggtgccctgagctcatcatcccttctcttgtagcatatgctgtcaatacccagggccttttcgaaacggcaatgggtccgaaggcctcgggaccacctttcacacctcccctttatgcagtgtccatacctccttggtgctcagctgctggtcagctccatgtgccctgtggtccctgccctcccaaggcctgtgaacaaatgcttagtcccagattagagtctacgtcaatctgggatgtgagctgagtggcacctgtcgtgaaccaggccagagtctacgcaatctggggtgtgagctgagtggcacctgtcgtgaacgtgcatgcacatgggcattttgtcagtctgcaccggtgaataaatgtcgctgcatttgccagctgagtgtcaccaggttccaggtcccattacacatcaggaattgtgtccgactcttctggatccgctgattggacctgagggatccctgactcgag

SEQ ID NO: 938 - DNA, 851 bp, Homo sapiens
gtctttcttttcaaaagcgaacagtcagtatccatcatactccagagcagccctcaaagcctgggctgttgagagtgcacatcctggcctgcggtgacagccgtcagatggtgaggggccccaggcgactgccccagcagcagggcctggcacctgcacagggtagaactcgataaggagcatcatgagcatacccccccattgacaacatgcagtccccacggtggtgcctaatgacaaaatgacatcatgccacctgcaaaaaaagtaaaaatgatcagaggcgagcttgtcagagaagctttgaactaggtgactgcatgaaacatctcagaggcggaagagtgcctccccctccccgggactcccacctggtgccctgagctcatcatcccttctcttgtagcatatgctgtcaatacccagggccttttcgaaacggcaatgggtccgaaggcctcgggaccacctttcacacctcccctttatgcagtgtccatacctccttggtgctcagctgctggtcagctccatatgccctgtggtccctgccctcccaaggcctgtgaacaaatgcttagtcccagattagagtctacgtcaatctgggatgtgagctgagtggcacctgtcgtgaaccaggccagagtctacgcaatctggggtgtgagctgagtggcacctgtcgtgaacgtgcatgcacatgggcattttgtcagtctgcaccggtgaataaatgtcgctgcatttgccagctgagtgtcaccaggttccaggtcccattacacatcaggaattgtgtccgactcttctggatccgctgattggacctgagggatccctgactcgag

SEQ ID NO: 939 - DNA, 1472 bp, Homo sapiens
tagtttaaaatacaatttaataagaaaatccgggatacattttatatgattccatttattaaagaaaaagaaacttctttccaatatattctacccaattattaaattcattttagatttttgggaagagcaaatccaacttaaaaaaaaaacttgctaggcagttgaaatcctctggttccaaagttttaaaaaatgaggcaagattgtatagtgagagtagaaaaaataagatgaagtggaatcacccatgacaatttgtcatatttgtcattacgaatttcaacatctgcaactgaaaagctacagaaatcaaaaaataaaacacaaagaagattctcaaggaccaaagactgtttgatgatgttgctctaagattttgtcctccatttatttcacacaaaaataagttaagtataaataagaagatgaggagagctggtatgtactcagatgtgttcactggtgcatagtcagagggggtgtgagaacagccaaatgtatttcttcgcccacactcactacacaaaactctcctccatgttgctgcagagtaagaaggagtccaccagccgaggctggaccaactgctgaaagtcagagtcctggaggccttcagggcagaccccagccaatctacgcagagcagcctggggagaagacagaagaggtgacacgtgtcagactgggccatgtcaggtacatgtatttccttcacctaccctgaaatgtgcatttcagaaagtggtgcatttaccagacaatttgggttgatcatcatgttagccacttggcatctcagtcaccatcttggtcacctggtcaacatagcaaccacatctcttggtcagctagctttatttgcaccttgatcactaagatagatgtcatctgaaagctgttaataatcttaataatggtctttattatttccagatccctagagtaaccttagaacagcaagaactattcattcatccataaattcagcaaggtgctatagaaagcactatggaaaaaagaggaaaagagagggagaacatattgtaaaagtagacagggattctgctactgagaaattcaacacctggcaagggggatgaacaggaaagagaggtgctggcagaataaaatcactccccagctccccacacaatgagcaatgagtatgctatttctattttgtgtccatgtgtccttgctcatattcttaatcttcagcccaatgctctacctctgagctataccccctcctccttgctcatactcttacttgtgacttgaagtgacttcctgctcctgcctattgtcacctcccccatgaaggcttccccaattatcctgaagcagagacagtccatccctccctcccctgtgcaaccagggcccctgggctgacctcaagcttctcacacttggccataactagcttttaggtatttatctcccacactagactctgagctcctcga

SEQ ID NO: 940 - DNA, 898 bp, Homo sapiens
ccagaagagggattgctgggtcatatggtagtttaatttttttcagcaatctttgtattgttttccataatggctacaccaatttacattctcattaacagtgcaaaagggtttttgtttctctataccttgccaacttgttatctattgactttttgataataggctttgcatttgcctgatgattaatgatattgaacacattttcatatacctgttggccactttttatgtcttcttttgggaaatgtttgtttattctggtacttggcctattttttaattgggtttttgtttttttctttttgctattgattttcttaaatttttggatagtaacctgttatcagatatgtggttcacaaatattttctcctaatctgtagattgcctttccattttattgattatttcctttgctctgtagaagcttttcagtgtgatgtagtcctacttgtttgttcttgctttcattgcctgtcctatcagaaaaatcattgccaaggccaatatgtatcagcttctttcctatgttttctcctaggtgttttacagattcaagtcttatgtttaggtctttaatctgttttgagttgacttttgctcttggtgtaagataagggtccattttcatccttttgcatgtggatatccagttttcccaacactagatatgaaagagactaaactttacccattgtgtcttcttggtgcctttgtctaagacacttctatgacagttgtttctcagatgggtacttgtttacgtgattcacaacagtgaatggaaatgtttaccactcatcactccatctaacacaccttgttaagacacatgtaaaaactgttctaatagtaccagttgcaactataactgaaaatagtattattttagtaa

SEQ ID NO: 941 - DNA, 306 bp, Homo sapiens
ttctttttttttttttcttttttttgagacggagtctcactctgtcgcccaggctggagtgcagtggtgtgatctcggctcactacaagctccacctcctaggttcacgccattctcctgcctcagcctcccgagtagctgggaccacaggcgcccgccaccacgcccagctaattttttgtatttttagtagagacgtggtttcgccatgttagccaggatggtctcaatctcttgacctcgtgatccacccgcctcagcctcccaaagtgctgggattacaggcatgagccaaggcacccggcc

SEQ ID NO: 942 - DNA, 1605 bp, Homo sapiens
gcaaccttgcagagtcagaatcctgatcagcagttttgaccagcacatcaagagtggctttacctcccaggcattgatccagcattagtcaagctacaagacactgatgtagaaaaccataatgtcagtttactaatgtagaataagaaataaaatctcagaagacctgagctctcctgtcagcatgacttgcacttgtacttttcctttttgtagagaagctaaattataatcagaaagttgttttggtgagcttggaatcagaaaataggagtttaagtcatctgttcaacatgcagctttcctcagctgtgatagctttttcctgctgtccagtcttcatgtggagcctggtcaatagcaccagaattctaagtctgctggccaaggtgctgcctcctgcagagagagaaagcccatcaaagttgacttcagtgactcccccttcactcacccctcatcttccacggccaaccaactccctttttgattgacacatcatttctttacatacattaatgccttccatattaccacagagagtttgttagactggaaatcattttatttctttgatctacttcatctttctctgcattgagcctttgcgtactaatttatagctattttctcacaggatagtctatttccattatatctatattttctagtggtcctttgcgtttgcctcttttccagactgtatagggcatggtgccaggcacagtttatttgttttattctatatgctgatagtatcatcttttccatctttagatgttttatctcattcagagtgagaggggcacttggtcagtcctttttgcatctcaatagttgatcctcttttgattaaaaaatatttaatttctaataatgtgtgttagagtgaaaataacaggaattattaggcccagtcaagactaacagttcttgactcatagttccaaatcacagttccaagatttccttaacctttctgatcctcacttccctcccaaaaaagtaagaatggctataattacctacctcatggaaattataaggcttcagcaagattaaatgtactcatttatttaacatgcatagtaagaactataaatgttaatttattcttacttacattaggatactgacttatgaaacagagattaaacacattctgcaaaaggactggtattgacaggctttgattctaatagctcaaaagataggccatggcttgctagagaaaatgaaaggatactcaaggctcattagattaaaaggctgctaatgttctctaagctgtaagtagatttttgcccacatttatgaaggttgatttctaatcagattagaaatggcataggctggtggcgtcatctcagagctgccacagcattctcaggagactcagccatatcatgttgggttgctctaagaacacacagagacctttatgctttttcacaaaagcatactctttccctggagtgtgtaactctatgtgttgacctttagtgggataagttcttacaatggagctattctgggtacaaaacatcactactctgtgagatttaggaagataacactgtttgctgattttacaagcccactcga

SEQ ID NO: 943 - DNA, 561 bp, Homo sapiens
gaatcatcagagatgaaactgtttgagagactcatgtgaccttacgaaaattacaacagcagtcttaaagtatgaaaaagatgcatcacagcagagacattatggcccagttgatatcaaatgtaaaatgtaaatgcatgtaaatgcacacttcattttatgtattatttagtaatttgcagtggtatgtgtttaatatttttgctacctacacattaggcaaaaaaaagatgtaaataatttgggagaaaaagaggaagaacagtgtaaaataaaactttctataagtactccatttcaatgtgttcaacatcatcctaaaaggcaagattttcccacgcaggtgacaaggtggtttatgtactatttaagggcggaaggtgcgtgcccgttcaataagcatgttttttgccaggtaggaaatatgttccatatctttacttatcattgcatttcagatgggaactagaaaaactggagagaaaaatgtaatgaaactgctgctgtaaattattccttttagcatgtattcacttgctaaatacacatttcttcaaaata

SEQ ID NO: 944 - DNA, 561 bp, Homo sapiens; identical to SEQ ID NO: 943

SEQ ID NO: 945 - DNA, 561 bp, Homo sapiens; identical to SEQ ID NO: 943

SEQ ID NO: 946 - DNA, 1741 bp, Homo sapiens
gaaaaatggaatacactgatctactactgatgtcttctttcagctttgatctaaagatgtattttattaaaactataatttaaatgtaccatgaaaaatatgcagtaaaaattagttgttttctaagctagagtaggatttgtcttacaattattgtgctatgtagtttttgttttaaaaattccaatggtgtgctgctttctttggacattttattttcaattctataagagggatagatgacattgttctagaaacacatatacatcattaagagtgaatctctaaaaccaggatataaattatgctttatttctctgagaaaatcaaacaaatggaagctgttcacacctccccttctttaagcattatctaaattaatttttacttgcataatgttcttagaaaaaaaaacagaacatttaagcaggaaaaaaggaagaaacaagttgatttttaagtgcattttactataatgaatcaatgaagggaaaaggaactgcatatttcatgaaaataataagcattgtcttaatatactgttaatagaaaatgtgtcttaattccgtgcttgaatccctgcatgatatttgagactaagatctctcttatgattctaccaagaattatatctgtgtcacttaatttttttaaaagagagagatcaataactattcagagcaacatgttaaaggcaaagtttccaatcatttacatctgtatcaggtgcctcttacctttccttatttaagacaattatttgtacaagaaacacatgactcttttcatatcaatgggagggacttttctacaaagtattttccaggatgcaacccacatttaaacaatgtaaaattctttgtttcctgcaacaacttacaaaataaggtaaaagactaaaattcaagatttgcttccttcattgtcctaagacgattcgttgagaatcactgactttgagatatttaaaactttcagcattatactgtggtttcttttgcactgcactcacctattcaggactcctcccccaggttcctcatcatgcacaaaaatgcaaagaaaacatcttattagtaattaatgaagcaacattgaaattctaactctagctgtctttggattctaattaactcagcatcaatttctcacctcagactacagtgaatttttatttcctatcagctgaaatatttcacagatggaagctcatgtttcagttttaatgactgccttgaataaacaagttgttgccacttgtttcaaacaaaagcctaaaaataatctacattcaattttaggctccattgactaatatggtgttgcttttggaagtactgtatatcctcacatggaagccaaattgttaaattatttgaaggacacaccactgtacagaaagtagtgtttcaaatataaatcgaagaacaaagagtgctccaaaaaataggtcattcttttattttcataaagtatctaaactgtactaacattcagtgttgtgtttcattctaaatttgcagctgaaataaatttatttgcgatagcagaaatatcttattattcatcctcagaaataaaggatttgaagggatagagattatatgataaatttatagaagactttcagaatttgaatgcattttgtttagtgttatgaaatgacaatagaaaaaagtctcgacttcaattaaaagttacacaaacaaacaaatctacaggcatgtctttatataccatc

SEQ ID NO: 947 - DNA, 354 bp, Homo sapiens
ctgggttctatatttatggtgatgatgtgaatttttatgccctttaaattaagtattgttctttttaatgtcatacctaaaaaggaaatgtagggataaatttttataatgtgtcattttcataatcagtttggttttattcaggatccacaaagatgtcagatgactgttattgaaattgcttatcttaaaggtcacagacaagcattttattaatatggagccactagtataatatgttaaaatctttgttttattagctcattttaaaacacaatttccattcaatttaatgaaactgtatcaggtttcatggtttcaaagacagacttaaataggattcaacacccccgt

SEQ ID NO: 948 - DNA, 1741 bp, Homo sapiens
gaaaaatggaatacactgatctactactgatgtcttctttcagctttgatctaaagatgtattttattaaaactataatttaaatgtaccatgaaaaatatgcagtaaaaattagttgttttctaagctagagtaggatttgtcttacaattattgtgctatgtagtttttgttttaaaaattccaatggtgtgctgctttctttggacattttattttcaattctataagagggatagatgacattgttctagaaacacatatacatcattaagagtgaatctctaaaaccaggatataaattatgctttatttctctgagaaaatcaaacaaatggaagctgttcacacctccccttctttaagcattatctaaattaatttttacttgcataatgttcttagaaaaaaaaacagaacatttaagcaggaaaaaaggaagaaacaagttgatttttaagtgcattttactataatgaatcaatgaagggaaaaggaactgcatatttcatgaaaataataagcattgtcttaatatactgttaatagaaaatgtgtcttaattctgtgcttgaatccctgcatgatatttgagactaagatctctcttatgattctaccaagaattatatctgtgtcacttaatttttttaaaagagagagatcaataactattcagagcaacatgttaaaggcaaagtttccaatcatttacatctgtatcaggtgcctcttacctttccttatttaagacaattatttgtacaagaaacacatgactcttttcatatcaatgggagggacttttctacaaagtattttccaggatgcaacccacatttaaacaatgtaaaattctttgtttcctgcaacaacttacaaaataaggtaaaagactaaaattcaagatttgcttccttcattgtcctaagacgattcgttgagaatcactgactttgagatatttaaaactttcagcattatactgtggtttcttttgcactgcactcacctattcaggactcctcccccaggttcctcatcatgcacaaaaatgcaaagaaaacatcttattagtaattaatgaagcaacattgaaattctaactctagctgtctttggattctaattaactcagcatcaatttctcacctcagactacagtgaatttttatttcctatcagctgaaatatttcacagatggaagctcatgtttcagttttaatgactgccttgaataaacaagttgttgccacttgtttcaaacaaaagcctaaaaataatctacattcaattttaggctccattgactaatatggtgttgcttttggaagtactgtatatcctcacatggaagccaaattgttaaattatttgaaggacacaccactgtacagaaagtagtgtttcaaatataaatcgaagaacaaagagtgctccaaaaaataggtcattcttttattttcataaagtatctaaactgtactaacattcagtgttgtgtttcattctaaatttgcagctgaaataaatttatttgcgatagcagaaatatcttattattcatcctcagaaataaaggatttgaagggatagagattatatgataaatttatagaagactttcagaatttgaatgcattttgtttagtgttatgaaatgacaatagaaaaaagtctcgacttcaattaaaagttacacaaacaaacaaatctacaggcatgtctttatataccatc

SEQ ID NO: 949 - DNA, 354 bp, Homo sapiens; identical to SEQ ID NO: 947

SEQ ID NO: 950 - DNA, 8125 bp, Homo sapiens
tgggagtgggcatctggctctccgtgtcccaaggcaactttgccaccttctcccccagcttcccttcgttgtctgcagccaacctggtcattgccataggcaccattgtcatggtgacgggcttcctcggctgcctgggggccatcaaggaaaacaagtgcctcctcctcagcgtaagttctgtccaaatccccagcccctccaactcctgatctccttgcacttggacccctgggacaggcaagacctggaatattagacacctgggtgtccaacctgagcccagggaaactgcttctagaacgttctaggcttgaccacacccctcctcctcatggttggttatgcctacccctggttgtccctcccactccctgattagtcagctcctttatgtccctgtcctagctatctgggtttcctcaggaggagctggcttctcccagacctgggaagccccacctaggcgccgcctgtccctgccttccacaccctccttgtcctcagccctgcccattaccacctacccatgcctggccctttcctttccagtttttcatcgtcctgttggtcatcctcctagcagagctgatcttactcatcctcttctttgtctacatggacaaggtaagccttaccagatgggagggggcatatggaatgtcactgcccttagagttgggccaagcaggccagggtcccttccctggccagaggaagagtgctggcaagcagcacctgtgcagaaaggaacatggaaccaagggttgggaaagctaccaaggaaagagcagatggaaggttttgatgggggcagcacggggcaggcaaatttggaggatgggagagttgactttgtatagttccaggaagtggaatcctctgcatgaccagagatggcagtgggctgcctctggcgctagtgagctccctctcactggaaggaattaagctacttggagaagggattcagacctcatcaggtggttgggctgggtgatttgagagcaaaccatgaaaaacaaggaggaactctctgggcgacgctggctgagcaggactgaggcacagggaagctctgtttcctgcactagagcccttgaggacgggcgctgctcctgggttcaggaggatggtgggtgaccccctgtaacctcgccaggctgggcagttcgcagtcaagagcgaggttggccgggatttcagtctcttggggcgtggcaggccctttggtaccatgcactccagaactgtgtaaggagcagttcttgaaatagctgcctgagccacactgaaagttagagacatcgttaggatgagaaagaataatcttttagttttgcactcgtgaaaaggaagaaagaacaattttgagagatttctctgtgccagccctgttcttggcccttttatgagaattgtttcccttaattctaacaacagcgccatgagtagatgctgctgttcaacatcgggtagaacagcggtgagggaggtgaaggtcacatgacctgtcttcctccctctagttcccagggtgtgttttgagaggggcagtctgtggggaagctgtgtagtggggggcgggggtggcagagtggcctgtgtgtgtggctggtcctgggatgggggagtggaggcacgtggtgtgtttttttgcctctgggtgttacagccctggccctgagtttagctctgctgggaggcggtgggtgcaccagggcctgctgtattctgaaactgggagtgtgtgcctaaccccgcacctctgttgggccagcagaggcccccaccccagtgggcagggccttccagaccagctgccttccctgccttcctcactcctcatctgtcacccaccatcctgggtgacctgaggtgggctggagagacgagctgcgtcctggttccaaccgtctcactgtgtccctccgcctggcaggtgaacgagaacgccaagaaggacctgaaggaaggcctgctgctgtaccacaccgagaacaacgtggggctgaagaacgcctggaacatcatccaggctgaggtgcgggctgggccgccctggtggggccaggcagggaggaggggtggcggccggtacttctagctgccttccccggtgacctggccgggcacctgtgctttctggattttagccgggagtggagtggtacccacgggggcatttgcctgaactgctgagtcagatgtgatacagcaaggtacagccagggagggatgaggatacaggaggggcaggcctgagagagctgtggctgagctttgggatgaatgactgaatttattttagcaacagatttgcctccatgatggggcttggcttaggtgaggaggccctggctctaggaggagaacaagtccatagtcccagatgctcccattttaagccctggggaggggccggcagggggttgggtggcagtcagcttgggacggtttacagaaagagcagaggtgctggtgggcaagcacagggctgagccaaggggcccagcccgaggggtgggctgcattgccctctcccgctctggtctccaggaaggagtgctcactcacttctccagtgggcccggctgaagcccaaagaagggacaagaagcaagccctttgtctcctcccttaactgcagggtggccacttttgcggggactggggttggcctgggcaggggaaggccctggggaggaaggggcgggccatggcatgtctgactgccccttccattcctgctggccagatgcgatgctgtggtgtcactgactacacagactggtacccagtgctgggggagaacacggttcccgaccgctgctgcatggagaactcccagggctgcgggcgcaacgccaccacgcctttgtggagaacggtgaggctggggatggaccgcttgggtccaagagcccgtgtgtggatgccccggcacggggagccctataggggaggctgggcccgggacactaagaggttggctgaatgtggcggtggggggctcacaaaaataaagccaaaagacaggtggaaaatggggggtggggctggacccacagttgggagagtcagagggcgaggggttgaatggggtctgaggctctgcagctggccttgcgggtggggcggaggctgcgccaagggatggggacagggctgaggccagggagggctgggaggtaagagtgaggacgaggtggaaggagagagtgagctgggggctgggctgcagggagcgcatgcttgggctgggaccctaacctcgtgggcctcgctccccagggctgctatgaaaaggtgaagatgtggttcgatgacaataagcacgtgctgggcacggtggggatgtgcatcctcatcatgcaggtaagaggggcgtccccagcagcctcacccaccctgctggcctcagccgcagagggaaggaagcacagagaagtgaaagcagtgttggtacacggcggagggtctggaattcatcacagctattcaagcttagcagctgtgcctgccaccgtttccgcagagctctgatatgagagcacgtgtctactcagcactgagagtggtgctcagggctgcctgtggccaggcccaggctgggatattgaagctggagtcaacccccgtgggttcccccagttctgcccaaaccttgagctcagagagccatgcaagacacacacggtgtcccccggtcaccatctttacagcctgtgcacatggcacactctctgtggtgaccgtgagaccacaccgggcttccttctgcctcctgcactcctctgggtccccggctcctttgaggattcaggagggaaggggcacaaacgagtagtgacgtggtcctgagcacacatcactggaaagacagccctgctgctgccaagacatcgcaccatgtgttccacaagcagacaagagaggcttgacaggagtcctttatttttctttttttaagagacagggtctcactttgttgctcaggctggagtgcggtggcgccgtcatagctcgctgcagccacaaactcctgggctcaagccatcgtcccacttcagcctctcaagtagctgggactacaggcatatacaccaccatacctgaatgatttacaacttttttccaaaaacagatggagtctccctctattgcccaggccgatctcaagccatcctcccaccttggcctcctaaagtgccaccgtgcccggctggcctgagtcctgaatgatccctgccacctcccactccccaccttggctcctgtgagcccccacgtagagccaggtcctccgtgcattccgtgcctgcagcgcccctctgagtaggcacacgtatgcatcctgcagaggttcgatggcttctggtctaacagccccacgaggctgagccagagttcacctgtgtgtgtctccagggtgacctctgttcacggttttcttcatgtcttcattccataagcattttcctggcacaccagtggccatccccgcttgctctaggtgccctgtgacatcccaagcctctcggggctgaggtcaggtccaggctgctgcagctcctgcctcaggcccctccccgtgtctttcagatcctgggcatggccttctccatgaccctcttccagcacatccaccggactggtaagaagtacgacgcatgagcgggctggccgggagtgcccaccccgccctgctgccctgtggagggaagaggattgagctttgtgtcgcctgcctgcgctctccagatatgacccctgcacccaccccccacagcctgccctaccccacctaccctgcctcagcctcggacttctcagtgggtggagtgccagggaggaggaggcacacggagacctggggctcggggcccctggattcctgcatctgcatatgcgtatttgccaaagacgacagggtgggctggggtgcgctctggaggaacccccggcactgatgggcttctgcccctgcccttcctcacactgacactttgtccccacatggggtggggagcagagtgcccgccccgtggagataccgccccagcgggggctgcgacatccatggccaccatggggcacctggcggggcgggggtctgccggcctctgggcaaggcccctggagcatctcgcccaggctttttataccttacaatgtaacttttttattttattttactctatgattattcaggaatattatctctcagataagtttagggttagatttctgatttgtaactttttactgtgttgatttctttaatggtttgactttttttccctgagggtgagggatgggtgggaagagaggacatctgtccagtctcaatcaggacagaccaccgtgcgacacccaggaggctctcggatggggcgcgcctgcgccctcagaacgtgtgggaaggagggggcgtggacaggacacgggaccttgccaggcctggtgtctgaggacaggagcctgggagaggcgggtggagcgtgaagcaggctggaggtgcccctgcacgggaggtggcgtttgctaaccaatcgagctggaaatgccagggcaggggggccccacggtgctgtggcagagctagaggggtccttagacttttcactgatgagcagttgttggttttttctttctcccttcctcccgctctctgctggcacgcgaggcttccccttccaccccatgtgggtattcccacaacaggttctgcacaccccagttatttcacagacattcctgctagaaactgtcagacaaatacctctctagttcggatgctgctcactttcccccttgcttctggaaggggaagcagtccttaggttttgctgtgctgggacagtggcaggggacccacaggggtgaggacccacggtcctccccgccagccttgctcagctgtgggttgccctgctgggaaggagggaatcacgtccacctgggtcccaagatcttcgcctccttccctggggccacggacatcagcagtgggttgggtggcgattatatcatctgtgatcccaaggagaagaaatacagaaaacccaagagaggtcagactggctcttgttaccggagccacgggaagaaagcagccggagtcacgcacgtgcagagctgggcatgggagagaaacgggctggggagtgaggccaggagtgggattcagctgcagcagggcgccccctccaaactgcagctggtctggcttactgttttgccgttcaaaaaggtcgcgaatccgtgggactgagcacggggacctcacccgctagccagcgtctgctgcacttgatcaggtggggccttggtgggcggctgcctttcctatacagtttgtcttgtcaccctggtttcccactggggccaggtctcttctccagcctccacctgcctgtctgatccaagagctgagacacggccacccagcaccagtcactcctctgttcaccttaagtaacacacaaaccgggaacaggaggacagaaccgttggcattatcaggattcgtgttttgtgggggtgggagtggagagtagggtggtcttgtgagttgtgcagggtgaagaccgcttccctgagacaggggcagtggtgctgatggaatgtgggggaggcccacatttgagcaaagctgccctgcccttgtcccctggcctggcttcctggtaaggagtttcagccgcctccgcaggaacccccaaagtgcagattccggagcagacacatccgggcggagagactcagcagacaagtgctgcagttgcacggtgggacccggggcctcgtgcgttttttgctgtgggtggggtgggtgggttggtttatgcctatcaatgcaatttttaatttttgttaatatcaacagcaaaagcctagtgcattgggagatgtgcaacctccctgaaaatcttttctgtttctggagtacttcaggggtggcctctggccccagagcctttgccacagtgctcccaccagcccccacctcatccgtctgtttgcagagcctcatctacaggtccccacgctgccttctttactcactctgcgcttggccgttttgttatttggcttagtctacattgggcggaagtctgtgtgcacagagtgggtgttccttcgagccccttccactcagagggccacacccagcgatgccagtgaaggtggcacagcctctcttcagtttctcctgactgtgatctcactggggtagaattcccctgagagaattccctcactcacggctccctttgccagagtcagttcaatcaggtctgatgtgagcaatttacacacttgtctcagaaagtccctcagggtttgtagaggactgcaggggggcatccgctgcagactcagcctttctctgcagccatcctgcagtgggggtgagcgggcacaggctgagaactgctcttgggtggtggaagcaggtgtcacggtgcaagtctccccctgcacccctcccccagcttgagccgtgtcacccccctctccctccagcatgggcctgtgtctcaggctctctggaaggtggccctgccccggaccctcttgcaggtgtcctggtttgacttggaactagatggccatctttccaggctttggtggcccaagagcagtctgggtggatggaagtggctgtcccctcctctccagcccctgcccacccactggtggaggtgctaactagcagggacgtggcataggatgggagctgggcgtgaggtgcttggggtccattctttgtccctcagcttctcagagtccggccagcccttgtgttcccgtgccccacactttcctcctccccactgcagtgagtcaatagtccagggtggggcctggcctccctgccctgattggggactcaggaggtgaggcctggggggcttcctgccccctccttgcccacctgcctgcccccgggcagcacgggagggagagcagggtgagcacgcttgttggtttcagatgcactttctgcttgcattgccgtatctgtgcgttccttcatcctggtcctggctttatggaacaccatgtttttagcatgtttttaaataaaaacggataaagtgtcaaaagcacagca

SEQ ID NO: 951 - DNA, 1111 bp, Homo sapiens
gtcagcaaaggttcatgctattcgatagatgctttcactaaatgatgagtgggaaatgtaactttgtcatcttgcagagcctacaatgcaaacattttttccgccccatgtacagtttcatttacatagtgttgtcaaggaataagtgatttgtttcacttaagtgatttttccaggtaattgaagcttacctctttgtgcacacattattctttgcttaaactttctttgatgaaaacatggcacatggttctttcctttttttttgcttggtacatataaatgtggctacatcttttcttgacttggggttatcatgataaagattgctttttgttctgtgccgtaatcctgttattgacagctgaattgtgtgggattgagagcctgtatgtgaatagtcacagatccatattcttttagagttaccattattactaataatatagctcctctgagtcattagcaaatcccaggcaggatgctaagaattcatatacattataatcttggctaaaccatccaccccactccaagaaatgatcattattattcctcctactttacaggtaaaaattgaagtttaagggataagtagtaagtggtagagttgagatttgcatccatgtctctctaactgcaagatgcctgttgccagttatacttcttctatttctcctctctgcccctctttgggtatttctgtctgtccggttgctttaaaagcctttgcccaggtaagggcccgagattaggtctgtgcctattttgtggaaattattggtatgtttttcgttaagtggagttctgaaggcatttttgctgatttctgggttcccagacatctgcacggttgccgtttctagaagtctaacctgtgaattcatcactgtgtatgctaaggctttgggagggattataggattttctgcattatgattaagcagcataatcaagaaacttgcagtcagaggaaagcgtggcaattctgtaatgcagaagttggcagaccttttctgtggagggccagatactaaacgtcttagttcattttgtgttgctataaaggtatacctgaggctgggtaatttattaaaaaaaaaaaaagagg

SEQ ID NO: 952 - DNA, 315 bp, Homo sapiens
gccaaccctacatctttgccctggccatggtcgtgcataccagcttcacttcccgctgccagcacctgcattggtttgtctgaggactttctctgactgtggaagtggtgggctggaaatgcaggggaattagcatccactccctccagtgatgaacagggtttggcctatggatactccagctcccttgctcatccagtgaaactaaggggtgtatattgtacaccttttcccagagtttccaccatggtgagtatcaccatggtgataggtgacttaataggctagtacttttttttttttttggtggcctta

SEQ ID NO: 953 - DNA, 2582 bp, Homo sapiens
gtctttgccctctcaagttgctcttgaatgttgattcaactcattaggacatacttggatgatgaattagaaggagcatctttgccctctacttacagatcctaggaacaatttgtggaattatcagtaagcaatatctgtaacagataaaatgtctgctttccctttgcccctcttagcctatgacatgccacatccaatttgtcttcgttccaactgtgagaggtcttaatttcatcattctggccttttgcagttaaatgttctccaaggatatgatctatggggagaggactgatagtggaactaatctttcaaagttctgcttaagcaattgtagataacataggagaagaaactctggaaacaattatgattatcctagttctgcccctgtggaaattcaatccgaaacccttcatgtttttgcttctctcttctctacatggatggaatatgttatacttttttgagctgaaaaatctaaataattagaaaaagacaaagttgtaatgagttttctgtttaaacttataggaccctttctaataaaagtgttattgtaatcattgaatcgttagttaactgctttgtatggttatgtcttgtctctctttaatccagggactgcaagcaactaggcaaaaaactaacaaaaaaaccaatgttttataagagtggttctcaaactttaaagtgctgattaaagcacagattgcccaggcctcaccctcagtagatgggtatggggcccaagaactttcaacaggagatgctgctgctgcagcttgtctaagaactacacttggaaaattactaatttgtgtaataaatacctgaccatttggaatccttagaggatggaaatattttgtaatgctgtgtgcaagatttgatatagaaaaacttgggttcaagtggcaattcagcagattacaagaggtgaaacaactgagtttctgagactcagttttattatctgaaagtcaggaatgaaaataatgcctatgtggcagaactgctataaagatcagacaaggtcgtgtatgggaaaggccttggtaaatggaaaagcacaatctaagtgtaacttattctagatgtgttttcaataggcaagttttatatacctaagactaaaagcttgcattttaatccctgggattgaaatctttcaccatcatcaccatgatggtaataacaacaataacaatactagtgcactatttattgtattttctgcaatgggcacttaatatgttttgattatatatttcaaaaacctcataaaatctattttatcatgtatattatttgcttacctaagagtgtactggacagaatttaaatttttcttgagggcttagggcagtgcagttcttagggtgtgtgatgtctctgtctatatagatgatttgatttaaaaatgtgttatatgtgatacatttataacggaatattttttgctaaaaagaaatgagctaccaagctataaaaagatatagaggaaccttggatgcatttttctaagttaaagaagccaatctgaaaaggctataaaactgtatgatttccaccatatgacactctggaaaaggcaaaactatggagatattaaaaagatcagtggttgtcaggggttaaaggggaggaagggataaataggcagagcacagatgtttagggcagtgaattattctgtatgattcatattggtggatccatggtcattatacatttgtcaaaactcatagagtgtgcaacatcaagagtgaactctaatgtaaactatggactatgggtgataatgatgtgtcaacataggtacattaattataacaaatataccactctggtgcccagtgttaatactgggggaactgatgtgtgtagaggacaatggtatatgggaactttctgtaattttgggaactgaaaactgctcttaaaagaataaagtgtattaaaaaggatcacaccaaaaaatgaattgcaaaattcatgacctcatgtgaaagatagtgactgtggtagatagaataatggcccctaaagatgaccacatcctagtccttggaacctgtgaatctgctactttacttggtaaaaggggctctacagatatgattaagttaaggattttgagatgggaaggtcatcctggattatctgagtgggtgcagtgtaatcacaagggtcctttaaagatggaggcagactgtcagaggaattggcacaaaagcagaggtcacacacacacacggggggatagagagagagagagagagagaggaagatgttacactgctggctttaaagatggaggaagtggctattaagtcaagcaaggcatgcaacctcaaaagctccaaaaaacaaggaaatgaccttcagaaggaattcaaccttatattccttgctgacccattttagacttttgactatctgaactttaagttaataaagtgctgttgttttaagccaataaattggtggttatttgttacatcagcaataggaaactggtataatgatttttcaatgaaaatttagacaagattagaaaaaaaaaagaataaaaa

SEQ ID NO: 954 - DNA, 3345 bp, Homo sapiens
gtgtaaatagaccaaacctatgactaattggagtacctgaaagagatagggagaatggatcaaagttggaaaacacactgtaggatatccttcaggagaacttccccaacctagcaagacagacaattttcaaatttgggaaatccagagaaccccaataagatactccttgaaaagatctaccccaagacacataatcatcagattctccaaggctgagatggaggaaaaattgttaaggtcagccagagagaaaggccaggtcacctacaaagggaaacacatcagactaacagcggacctctcagcagaaaccctgcaagccagacgagattggggggcaatattcaacagtcttaaagaaaagaaattccaacccagaatttcatatccagccacattaagcttcataaacaaaggagaaataaaatcttttttcagacaagcaaatgctggggtattttgtcaccaccagagacctgtcttgcaagagctcctgaaagaagcattaaacatggataggaaaaaccattaccagccactacaaaaatacattgaagtacacagaccaatgacactatgaagcagctacattaacaagtctgcagaattaaccagccagcattatgatgacaggatcaaattcacacataacaatattaaccttaaatgtaaatgggctaaataccccaattaaaggattcagaatggcaagctggatacaaagacaagacccatcactgtgctgtattcaagagacacatctcatgtgcaaagatgcacatagactcaaaataaaggaatggagaaaaatttaccaagcaaatggaaagcataaaaaagcaggggttgcaatcctagtttctaacaaaattttttttgactttaaaccaaaatttttttgactttaaaccaacaaaggtcaaaaaagacaaagaagggcgttacataatgttaaagggttcaattcaacaagaagaggtaactatcctaaatatatatgcacccaatacagaagcacccagatttataaaacaagttcttagagacctacgaagagacttagacccccacataataatagtgggagactttaataccccactgtcaatattagatgggtcaatgaggcagaaaattaatagtttagactgatcaatgagacagaaaattaacaaagatattcagggcttgaactcagctctagaacaagtggacctgataggtatctacagaactctccacctaaaggcaacagaatatacattttttttgacgtcacatggcacttactctaaaattaatcacataattggaagtaaagcactcctcagcaaatgcaaaagaactgaaataataacagtctctcagaccacagcacaatcaaattagaactcaagattaaaaagcccactcaaaaccacacaactacatggaaattgagcaatctgctcctgaatgaatgactcctgggtaaataatgacattaaggcagaaatcaagaagttctttgaaatcaatgagaacaaagaaacaatgtatcagaacctctgggatgcaggtaaagcagtgttaagaaggaaatttatagcactaaatacccacataaaaaatctagaaagatctcgaattgacaccctaacatcacaactaaaagaactagagaatgaagagcaaacaaatcccagagctagcagaagacaagaagtaactaagctcagagtggaactgaaggagataagagtcatgaaaaacccttccaaaaaaatcaatgcatcccgtagctgtttttttttttaaatcaatgaaatagaccaccagcgagactaataaagaagaaaagagagaagatttcaaataaacaccatcagaaacgataaaggggataccactactgacgccacagaaatacaaccaaccatcagataataccataagcacctctatgcaaataaactggaaaatctagaagaatggataaattcctgcactcataaacaccctacaaagactgaaccaggaagaagttgaatccctgaatagaccaataacaagtcctgaaattgaggcagtaataaatggcctaccaatcaaaaaaagcccagctcccgatggatttacagctgaattccaccagaggcacaaagaggacctggtaccattctgaaacaattccaaacaattaaaaaggagagatatctccctaacccattttatgaggccagcatcttcctgataccaaaacctgatggagatacaacaaaaaaagaaaactgcaggccaatatccctgatgaacatcagtgcaaaaatcctcagtaaaatactggcaaattgaatccagcagcacatcaaaaaacatccaccatgatcaagttggcttcatccccgggatgcaaggctggttcaacatacacaaatcaatacatgtcattcatcacataaacagaactaaagataaaaaccacatgattatctcaataggtgcacaaaaggtcttcaataaaattcaacatcccttcatgttaaaaactctcaataaactacgtattgaaagaacatacctcaaaataataagagccatttatgataaacccacagccagcatcatactgaatgggcaaaagctggaagcattccccttgaaaactggcacaaggcaaggataccctctctcactagtcttattcaatgtagtattggaagttctggccagggcaattaggcaagagaaagaaataaagcgtattcaaataggaagagaggaagtcaaattttctttgtttgcagatgacatgatcctatatctcgaaaaccccatcatttcagcccaaaagcttcttaagctgataagcaacgtcagcaaagtctcaagatacaaagtcaatgtgcagaagtcacaagcattcctatacaccaacaacagacaagaagaaatgcaaatcatgaatgaactcccattcacaattgccacaaagagaataaaatacttaggaatacagctaacaaaggaagtgaaagacctcttcaaggagaactacaaaccactgcttatagaaatcaaagaggacacaagcagatggaaaaacatccaatgctcatggataggaagaatcaatatcatgaaaatggccatactgcccaaaggaatttatagattcaatgctattcccattaaactaccatcgacattcttcacagaattagaaaagactaatttaaaattcatatggaaccaaaaaacagttcacattgccaagacaatcctaagcaaaaagaagaaagctggaggtatcacactatccaacttcaaactatactacaagtccacagtaaaaaaaaaaaa

SEQ ID NO: 955 - DNA, 262 bp, Homo sapiens
gaattatcttctggtaacttcattgaaaaggcctctttaggcatgaaatcacctgccagctgtgctgaggacaggcttcacagagctcctggaggctaattaaggtgcagagttcagagcagaaagatgcttcactatacctgtggcaggatggccaccagggcctgttccctggccagagtaagcactctttccctagggatttggaacagccccattctcacctggtgtttaccccaggttttgaagagattccaaacta

SEQ ID NO: 956 - DNA, 4710 bp, Homo sapiens
taaagaaggtctggatgttatggagagagctgatcctttattccttttaattggacttcctactattcctgtcatgctgatattaggcaagatgattcgctgggaggactatgtgcttagactgtggcgcaaatactcgaataaactacaaattttaaatagtatatttccaggtaaggcactgaactgtggttgtaaagtgcataccaaattgatcttgaagaacaataacatgcttttttagccatgtttgaaggtagtctaactcttctgatttattagcactaacgcactgcatttttttcctctagggataggttgtcctgttcctcgaattccagctgaggccaatcctttagcagatcatgtctctgctactcgaatcttgtgtggagcccttgtctttcctactattgctacaatagttggtaaattgatgttcagtagtgttaactctaatttacaaaggacaatcttggtaagacggctttaacattacttatattaccttgcaaaagagaatgaagtgtatttgtttttaaaaggtggggaactgtataaatattcggtctgtggctcctatgcattaagcctctatttgagcctcactatcattcaatagcttgagtggaaataaaaagaggagaaaccactgcagcagttctggccttttggaactatgttgtaggtgctttctctcctggcatatgcatgaatcatcacacctgtccctcttgccagtgggattacagtactttacgatcagaccacctggttcaaatcccatcacagaaattgtcttgctgtgaaatctaaatcaaatgtctggactttttgttcctgtagtatggtgatggtaataatcaggattattgtgaggattgtataagtactagcacatagtaagcactcatgttgtttgctattattgttactcccacttctcccctctggtggcatgtaacctgcacggaccttggaggactgaacaaagggggcaaacgtgggaataaaagacaaagacaagagagtatatttggaagaaggggtcagggggcaccttgcctctagtggacaagggccctgagctttacacagccctctgtatttattaggcaaaagagatagtgagaagcaggggtgattgtcgggtaattgtcagtccatttggcagtttggttcacagcaggcttgcgagactgcatcatttgaacagtaggcgctagatttcccagtagataagttcaaggagccctgcaccagggagtgatggcccccagcaaaccctttggtggcaggctcagtgtgagtttactcacatcctgcattcatgataaacagtttgctgtttggtcatatagcctccagtggaatgctgagttggtcacgatccctttggcctttcttgctcccaacagtggcagtctgcacatagtgccctagcattcttctttgtatatcagagtatatgtagaactacatggaagaaagactagtcagaaaggataatggagaaggcatctgtgtcccctgttacctgtagtaacagcgtatagtctgtctctctccctatctcatctcctagtagaaaaagaaaactgtttcatttgcagtcatctgaattagtttagcatcaaagcctacgtcttttgtgatctaaataaaattatttttattactctgtttctctaaatctgcattataaaaagctaattttcctttttattttagggtggaattgcgtttgttgccataaaaggagcatttaaagtttacttcaaacagcagcaatatttacgacaggcacaccgcaaaattctgaattatccagaacaagaagaagcataaaactgacttctggttgttctgcagttctctcatccttatgaatctgttgtgttgttttgattccatcattaatgcacttgtggagacttgtgataagctgctgctcctatattttttaagaaatataataaagcacttagggcaggggaaatcatctcggtaatcatggaacctaaggatgtgatttgttttcattgtttgtatgtactacttttatggcagtcatatgaaccattatcttagcatggtaaacctgggttttgttcatattttctccagacagaaatgcaaagatcaaactgtgcaaatattaaaaaaatgcacatgctgttttattcaaatgcctcttttgtacatgttcatgtttagtgttttctcagaatcagcaactcaaggtactatgaggatttttctcactgacataatttgattacatactaaataagaggatatgttaatatgaggaaatgtaaattaaattagttataaataaataaccaaaaatgtatgtaaacattcaaatgattatctgaacaaatgagattttgtggtgttttctttaacccatgtgatgtcctccaaaatgtgtagggtaaaaattcacagggcttccagatcactttttcaatattaaattttatttacataatgttgacatctcatacttcatgaagtaattttgactcatgcagtcgtgtgtgtgtgtgtgtgtgtgtgtgtgtgtgtgtgtgtatttgtgtgtttcagtgtttcatcaggtccttccatctctgggagttttttcaacccatatttctagaaattacagctgccagtttatagtagtttgagcagaggatgatttgcaaaaataaaaataaagttattttactctcctcttgcattgattcagttattgagatattcgttgatcacctcctatttcccaggcactgtgcagagtgctgtaggacatagtggtgaacaagacagacttggtccaagctcttacagagttgacagtctagtttcagcacatagaaaaccagcagtgaataaaccaaggtgaggccttgagctctttgtttttatattaatgaggagaaaagtatgaaaacaagaagtcttaagtaaatattgaggtcattgtttttggcttaagtttattatagaaaatcaacactaatgtttttagattttaattgtcctattgatgaggctagcaccttaatcactgtttagttttgtattcatttttaaaagcaattattgaagccattttcaatagattggccattttaatgttcagcaacctgaatggttatttttgttaattaaaattaaatttttaagagatattttcaaaaccctatttattttcttgttcacagtaatgcatgtcaataataaatgtttccccttactgataagcggccactttaggagtgtagcaaatatagattgagctatgttagtttgcaataatatatgttaactttagtaattaaagactggtttctatagtatgaatgtcttaattttgagttatatgatgtttatttgaatgactgttgaacattcaaatttgtattatttggagatgaagatttgactaacagtgagccttattaagaacactactacagttctgaaggggaaatataacatctatggttatatattttaaaaacttagattataggctgtaattataaaatatattggcttttgttttcaatgtgaaagatacattaaatggacacatatcttgcaaaattttgttgtatagaacagtttttaggcagcctttactaaagttatgcaaacacacagttccccatttactacattaatgcccttgacagggagtagctgcttggttttataggtattagggctcatgaaggccggggaacaactctaatccttttggggcaggagggagggtttttttagggttgcggggagggaactgcaagtgcctgaggaccagagtggcctctagccccgaattgaacacttttaaacctaaagagccttattattattagctcgagaaataccacatgccagtcttcccaggaaggtgacctgcctgaccatgaagcaacaaaagagcataggcagacttaaagttggatagacctgggttcaaatcatagttcagctttcaataactgtatgtatgattttggctaaaggatttgactttctctcaactgcagttttcttaatctttgaaatgcaaataatgtttatctcagaagactatttctaggattaactgagagattaaaggaacagcagcacttaggctcaaaatcgcccctacaaagcagtagttgtttcttaattgctaagtaatctgtttgcactctaggaaaagtaaatggagaggtaaaagaaaggcattggggacaaatgaaagagatgatgtagatttttcggatgggtgggtatattttattttccagtttattttcatatttctttactgtgttatttctggaaactttaatgttttaaacctcttttataaaattcaatgacgactactagaattcttttcaaaagttaacttatctccaaagtggctgaaaatattgtttaccattacatgattatgaaatgactgtgaagaatataaaattaaacttagtgacttaattagtcactgccttgctaactttgctgtaatttttttaaacgtcttgtttttaatatagcaaactatctcaatactggctggattaggttaaataaagaatttttatgttctctaggtgtactttgttaaatctcaaaacattctgtacatacataattttttttaatcacagttatcgagatactagtttttgtaagtaaaagtaatctgaattt

SEQ ID NO: 957 - DNA, 8321 bp, Homo sapiens
gtggactacgtggaaccttctccccaaggtaggcagcaccctatgggagccgggtgtcctggggaaggaggtgggaggtgggcccagttcctgtacagagggcagctgacaccaaagtccttcagccctgctgtccatggtttctggacagtgtcctgtttcactcatcattactttaaagttcttgaccattatcgaaaacaactctggccaggtgcagttgctcacgcctgtactcacagcactttgggaagccaaggcaggccttgatcacttgagcccaggagttcgaggctatagtgagctatgattgcactactgcactccagcctgggtaacaagagcaaaactccatctcaaataaataaattaataaatattaaaaagtaaaaacaactgtttttattttcgagtacagttatagagagcagattcgtgtggcatgtcagctggtctgtgttagagttacaaagcaactttaaggaattccaaacactctagaagaacagggaagcctccagcagtcacctgaacataaattcaaatgtgctcttcccacgtcccaggcacccggtggggcctcggcggcacctgcgtcaacgtgggctgcatccccaagaagctgatgcaccaggcggcactgctgggaggcctgatccaagatgcccccaactatggctgggaggtggcccagcccgtgccgcatgactggtaaggatctggcgccgtggcattccagtgcttttcttctactcttgggtggaagaggaagaggaggcttatcctcgatgagccctcatggggagtgggccgtaggatgggtttctcagccaggggcgactctgcgctgtctgcctcagacatttgggaatgtctggagacagttttggttgtcactggggaagggtttgctcccctttgcggggagcccagggatgctacagccatgcacagcacagccccaccaagaacagtgcatctccaaggccaggagtgcgggtgggaggccgcttcagctgagctcttctgggaaggggaccacgtggcccagccacacccacattggctcagataggcctctgcctgcagtgggtagcctttggggcacagagcagctgcatctggagagccgtgggtcagagcccctgttttctgtgagtccaaaggtctgcagccctgagcctgggacaggcggttgcacgtagggatggatgtcacgttttgccacctttaaaagcactcttgttttttgatatttctatgaatgtaccatttgaatctaatagtccatcgtgaggccctgcagctaacacctgtgttgtggattttacattttgtttcgtatcttcacaggaggaagatggcagaagctgttcaaaatcacgtgaaatccttgaactggggccaccgtgtccagcttcaggacaggtactgaagctctctccgggaatgggccgccctctgggccttctcttgggcgttctgtgcctggacacacacttacttactgtgcagagcatgctctggcaggctctgggggttcatgtcctgctcatgggtggggatgaggacaaggagcagatgggagtgactgtaggggaaggggagactgccctttgctgctgagcagagcctggaggtgctgccaaggaatgagtgaggccacattggcagaatggccagagcccagggctgcacagggaggaggcgcttggggctggaaggcctcaggccagagagcgtggacatagctaggcctggggctaatatgtggtgagggtcatcccagtggcaagcccccaccccgtgaacccccttcttactgcacacctccagctccttgggtgtgggtgcaggagcttggtgctttccgctggagcaaatgtccctacttggtcaccgttcctgtcagcccctggggatctccagcacagaggcctatgctcccctggcctacaaccttctcctggggctcagctgccagcacagcagatgcctgaaactggtaccgcctctggcccagcctttctcccggggctgtggaggggacagtggtcccgcagaggtctggtggctctcctcatgcaccatttgcttggccccagggcgggtcttcctggggcttcacagcaggcagcagttttgtgctcactaaatccaggaaagtggagccaggaagccaactgcttgccctccacctggacctcacaagctctcccctatccagggagctaagccacattgtgctgtggcatttctgtgtttctctgtggggctctgtatcccctggtacagtttcctggggacagcaggctctgccctccctcctccctgccctgggcagctcctggacgggcaccaaacaggcccagcccactgcctgctccggagccacctgcagaaggaggctggggcgcacctgggctgtttctgctttttcactcttctgaaaagtgctgccatgagcattgcccggctgtgtcccgtggcagcttcctggctgtcgaggtgattgaagggctcttgctgtaggaacttcacgcagctcagacagcccatagaggcacaggcttgccagtggggagaaggcaggctcaagcaggaggcagagccttcccagaacccttgctgcagcacggtccttttgtcattagaaagtgttggtcgggtgcagtggctcatgcctgtaatcctagcactttgggaggctgaggtgggaggatcacttgagcccaggagttggagaccagcctgagcaacatagttttattgctacatccctacaaaaaataaaatgaactagccaggtatggttgcccatgcctatagttccagttacttgaaacaaggcttccgtgagctatgatcatgccactgcactccagcctgggtgacagagtgagaagatgtctttaaaaaaaaaaaaaagggtggggcgcggtggctcatgcctgtaatcctagcactttgggaggctgaggtgggtggatcacttgaggtcaggagttcaagaccagcctggccaacatggcgaaaccccgtctctactaaaaatacaaaaattagccaggcgtggtggcgcaagcctgtaatcccagcttctcaggaggctgaggcaagagctgaggcaagagaatggcttgaacctgggaggtggagattgcagtgagccaagatcgtgccactgaactccagcctgggcgacagagtgagactttgactcagaaaaaaaaaaaagaaaagaaagcgtgggtcatttgtttctgtgcactatgctcccagccactgttttgccagccttgtcatgcccgttctcttggtgttaccacacccctgaaatcagaaggtgacaccatctggtgggcaccacagctccctgctggaacatgtccgggtgatgaggactgtccccaagagaggtccagccacctcttgctgcacaccagggctgtacgtggcctcttaggaccgtgctgagctggcttccgtccctgctttgacacctgtggttaacatgtccctgggatccctgggggacaggcgaggtgcccccacatcccctccatgcttctcagcatggttgccgcttacctcttggtccatctgagccacagcaccaggccctgctgggggctggagctcccttttaccagtgttccctattgatccagttggtgaggtttaatttgcagaggaagtgtttgaaaatcttatctttatctttcagaaaagtcaagtactttaacatcaaagccagctttgttgacgagcacacggtttgcggcgttgccaaaggtgggaaagaggtgagcatctgacttactcgcgtggctccttgtggacccttctgcagaccttgggcaccaactgcagctgtgtttggcctgggtgctgttcttagtaacacgtgctgctggaatcaaaaaggtggcttcttttgaggctgggcacttgtctttaacgtgatcaaataatttgctgccctgctgctcggagtggcatggcaacagggttggtgaccacaccctttttgcaggattttttggggatttgagggtgccttgaagtgcttggagttagaacatctccctgtgctttctgcctgtccccctcctgccaggctgatggttgatgggattccagctccatagggcctctgaactgctggccaagggtccacgctacagggcaggggccgtgggaactgctggccaaggtctgtggtgctcaggccctccggtggggtgatcaccatgcacctgtctgacccacggctttctctttttctcctcagattctgctgtcagccgatcacatcatcattgctactggagggcggccgagataccccacgcacgtgagtgtccccagagcatagcgtccctgctgccgtggcccattcccggcctctttgagggatacgtttttacacacgtgcttcccacagcagcagcttgcacaccctttccccctatactcactatcatcactttctgctttccaattctcttgaatccacactgctgaaatgtggggtccccagtggcctccacgctgccagatcctcaggacagctctcgttctgctctccccctgccccgctggatctgtccccttccacaccaggatcctgcttcctaagtctccattgctgattcccccttttcccttcagcctcagaatgttggaacattcaggatataagcctcattcttcatcttcctccttcacgtcccccagtttaaaaaaagtttgaaataaaattcacacgctataaaatttagccttttttagggtacaattcagtggtttttagtacattcacagagctgtgcggccatcagtcaccaccatccattgccagaactccttccatcatccctgaactgaaactattcccattaaaccctactccccagcgcctcctcccccagcccctagaaaccaccacctactttctgtctctatgaatgtgacaacactaggcacctcgtgtaagtgaaatcgtacatgtaagtccttctcatgtaactggtacgtgtgtgtcccttagtgactcgtatgtgtgtgtcccttagtgactggcttacttcactgagcataacatcctccaggttcacctacattgtagtgtgtgtcagtatcattcctttttatggctagatactattccattgtatggatagaccacactttgtttatctacttgcttggataaacacatgtgttatttccactttttagctattatgaatagtgccgctgtgaacatctgcaaagaagttttttggtggacttcagttttcacttctcttgggttacacttaggagcagaactgctgggtcatgtggtaactttatgttgaatctttcaaggaacgtttcaaggaacctcagactgttttccacaatgactgtgttttacattccttccagtggggtgtaagggtcatggtttcttgtttcttcacgtatcttgtaatttttttattgaaagctgaacatttcaaataatttaatgcgataactttggaaaccagattctccctctgccccaggattctgttgttacagctgcttatttggtgacttttcggaactgactttgtagactcttattctttgatgtatgtggccactgaagtctttacttggttagcttagtggtcagctaagaactgcatggagatttccctaaactaagaactctcccggtctttgctgagggctctgtgtgcgtttggaggggatgccttccacactcaacaggcagcagacagctctgccctagccttcacttcctgcttctgcagagatcaaggtcagctggaggtgagggttcagggcctcgttggtccttcctgatgtgtgcacagtgctgtgcatgcgcctggcctaggttcccaggaatatgctggaacctttcaaagctccagcagacatctcatactttggcttttcctttgaagctttttgggcagtctgttgttggctctaactgttacctatcccctcaggcagctgtgagaagaaaacctcagacaaatgcccccagagaaaggcttttagccctggctgagctccggtgaagttggatgaagatgaccctatagttgctgactctgactcttctttgtgggggggctttgaaagaccccagctgagttctgctctctctgacacatcactgttcagggctgccgctgaggtgggagtgggaccagagtgagttaaaacaccctggagttcccattctcactcagcttcagctgtttttcctgactttaaatgttccctgtgttgctgcaagcctgtggttaatttccataattctgaatctcccagttcttgccagttttatcgctgtttttaacagagaggtgaataactcctggcccagtcttgtgggttgtgggggcagagttgaggaaggggccccggggtgaggggttggggggcagctgcagcagggaaagcaaatgggctgggggtgagcagagaggtttggctgagaccagtccccacgggtctcccagggaaccgtgtgccgcctgctccaagcctctaagtaggctgcagccaagctcttgaagaccacggctctctcggcctggaggccacaccacctctgacttagacccaggggcagtccggtggaggcagagcaaggggaggttctgccacttcttggatgtgaccccagcctccacttcgtcctgtgcttactgtggaaacagggaaaggagcggccccgaggagcacaagcacccccagtccttagaggccgtgggacttgtctggccgccaggcagccacagcagcctctagagggggcaggttgcttatgcacagaggtggggctcagggctgcgtgactttgtaggatgacactgtgcagttgttcaaggcagctgctgcagacagggtcccagtgatcccctctcctggcagctgggctcatggtggttctgcttaaagaaggccacagccagcttccagcagcccagcggtcattgggtttctctgaggccccaggcagagctgcacgtgcatccgcaccagggagcactgcacaggggccctggcctggcccggccctgctctgcacctcacgggcagctgctgacggctctttgggctcacaggggatccagcaggcgctcctggtccttaggaggcaggcagctcagggctgcttcgctctccctgccacgccctcccagggtgtctgccaaggcttgcttgcgttttagtccctttgattgccagacctttcggttttccttgagtaaacctgagaaattcctgactttatttttttttgccagttggaagcataaactgtttgagatccgcttcctccaccagcacatcttgttctcatggccgctaaggggacgttcaccctgggcctcccacctgcttggccgcccctcttcaggtgacctgtatgatttctgggctcagagcccacccgggccagccctcgagagtgtgaagtccgtcctggcttcagccaggtgccctcagagctgcccctcagtccctgcccacctcagcctgtggcacttaccccctgtgcctcctctcctctggctggccttgtaggccacccctgccgcgcagacacacctgagctctgctggccctgatttgctgacctgttctctccccacttcctctctctgagtttggatcccccagaacccaggtgttgctccctggggctgcatgcccctgtctgtttgatgtgtctgtccagaacccgggcagacttgaggggtcccagctgtctgcctgtatggcccctgcagttgctgtacccacctcaggccctgtatcctgctctgaaccagggtcaaggggagggtcctggggaacagaggggaaaggtaccctgcgagggcaccgggacctggagtgcagcagcttagatgcagacaggccacctgcagccccaaagaggccacagcctgcagacaaggactggcagcagggaagccctgtgcatgtgtgccctgggaaagctctgcttgattctgcaaagctggcatcctctttaaggaagccctaggacaggccaaatggagctcttgtccaaggggtcatttctgtcttgacagatcgaaggtgccttggaatatggaatcacaagtgatgacatcttctggctgaaggaatcccctggaaaaacgtaaggcctgcgcgtgcttggtggggtcctctttttgttcaccagagtgagcactggacccttagagcctgtgctggtgctgggctcctggggctttctttccggtttacccaaaagaaggaaaaaa

SEQ ID NO: 958 - DNA, 1160 bp, Homo sapiens
attttttcctttatttttgtcaaatgagtttatttgaagaaccagcctttgagctctgagattatgtcctcagtttggtctgttctgctgttaatgctaccaactgaattatgaagttcttatagtgaactttccaattccagaagttcagtttgattttttcttaaaatggctatttcttatgtcagctcttggatcattttactggattacttgggttccaaggattgggtttcaactttttcctgaatcttgatgaacttctttgtcattcagactctgaattccatttctgtcgttttaatcatttcagtctagttaagaattattgctggggagctactgggctcatttggaggtaagggggtactctggcttttagaattgccagaattcttgagctgattctttctcatctgtgtggattgatattccattaacttttgaaattgatattcttcagatggagcttttagctgttatgtttttttaatgctgttaagagtttgactgtggtataccttgggcttagttgattgtctttgtttctgacactgatgctttcagaggaacaaagctcagttcagcctccctaggcagaattctttaactctggggtactgggactgggaacacagctttattctctgtccccttaagatcaagcatttgctgcactgggggtgtgggaggatatggtgctcccagcctgctggcaacagtgctctgttggaggtttccagcagaagcactgttggggctgttgagtggccttgaacaaaacctctctgatgggtgtctgccagcaaaagcactccagtgggatggcaggggtggccaatgagagagctatggtggtggctctggtaaaagcactacagcaggttgggtttgggttgctgcaagcaagtgtgcttcagtcaggcagcgggcagccacaggcaaaagtgctctggcatggtggctgaggattcatggacgaaaggactccagcaggttggcagggtggccatgggtgaaagatctccattgcagcagcagggacactgcagatactctggtgtgagtaagcactctggcagggcagtggataggttccaggcaaaagcactctgatatgggtcccctatttctttgcagtaaacatttaaaaaaaaact

SEQ ID NO: 959 - DNA, 20113 bp, Homo sapiens
gcccagcatgccccccatcgggctggataacgtggccacctatgcggggcagttcaaccaggactatctctcgggaatggtgagtccagctctcctgctgaggcagccctggggccacacctgcgtggccagaggaatcaaagctgctggcctctggggctccagagttgtctgtgtgtgtgttgctgtggtttgtagtgtgttgagctgtaccttagaacagggttttcatcaggcttctgccacctgctctctgcccctctctgggtctcacttttcccatctgtaaaatgaggggaaggggaccagatgatctcacaggtccctttcagccctgaggggttagggttgggaaggtggcgagggtatctgcatgagtgtgcatgcacgtgctatgtatgagtatccacattcatatacctgcatgtgcatgtgtgtacatatggagggctcttctggttaggccttggtgggtgtgtggcaggtatcttgggcagacatgctactttttaaatttgttgtttcacttttaaaataatacattttatgatttgaaaacaaacatatgcttagtttatgatttgaaaacaaacgtatgcttagaggaaattatgcaaccaatacacaccctaatttgtgccaggcccagttctaggcactggggatatgtgaataaaacaaacaaaaatctcagccgtgctgcacttatcatctatggggaaaagacaggcagtaccttaagtcaacgatgtgatgttattgaaagtgtaggtgccataggaacaagttgaccagggtaaaggggtcaggagtgggggtggggtgatgtaaggataatgattttaagttagcagtaaggtgggtctggctgaaaagaggatgtgtgagcaaagacctgcatcaggggaaggaagtgctgtatggatgtctagggaatgccggtgccctgaggtgccaaggggtgtgaggtgctcagggacagggaggagaggccagtgtggctaaagtggaaaggcgagggggtgagatgggaaatgaagtctgggggtctagctcttgcagggtgtaggaggctatccatcctaaggatttaggtttttattcctggtgagtgcagattcacctgaacatgcctgccagaggtgtctgtgggtagcaggctgatgtgatggggatgcccccaaccctgcatatgggacccacgcaccttcttgggcagtgagctcttaaccttcacccaggtggtctgggatgggaggagcaaccatgtggagagggaaggcatctcccctgcagaaggggatgaggatctctggtttggatcgagtcgcactgttcactggctgtgtaactttgagcaagtaaactcattctgtggtctgtgaaatgggtataacggtacttcatattccacaagcggagatgctgtgaggactgacttggcttaggtatgaaaaagggtggagggacggagtgcagcagggcccattggcctcaggctctgctttgtgtccttgcaggcggccaacatgtctgggacatttggaggagccaacatgcccaacctgtaccctggggcccctggggctggctacccaccagtgccccctggcggctttgggcagcccccctctgcccagcagcctgttcctccctatgggatgtatccacccccaggaggaaacccaccctccaggatgccctcatatccgccatacccaggggcccctgtgccgggccagcccatgccaccccccggacagcagcccccaggggcctaccctgggcagccaccagtgacctaccctggtcagcctccagtgccactccctgggcagcagcagccagtgccgagctacccaggatacccggggtctgggactgtcacccccgctgtgcccccaacccaggtgagtgtcagcccactgcctcccttggtccaggcctgggccccaaaggctggagacacatggctcagtagatggggagacagggaaaggcgcaggcctccagctgcacttcttgttttaacaaatagtgtcggccgggtgcagtgactcatgcctgtaatcccagcactttgggaagctgaggtgggcagatcgcttgagcccaggagttcaagaccaacctgggcgaaatggtgaaaccctatctctactaaaaatagaaaaaaaattagctgggcatggtggtgcatacctgtaggcccagctactcgggaggctgaggtgggaggatcacctcagcccaggagacagaggttgcagtgagccgggatcatgccgctgcactcactccagcctaggtgacagagtaagacccagtttttaaaacaaaaacaaaaacaaaaaaagacaaacaaagagcgtcaccttcttgcagactccccacctctgggttgtgttgcttaaggcccaagggagctgtcctgtttctcctggtgtgatgagacgctccacatccgagttgggtcagaacacccctggcgagtactccttattcctctgtgtcatttactgcctgggctgtgtgttttgtaagaactgcccaggccacctgtctcaagactttgtgctcaacagctgtcttcggtcccttgatatgcaccacccccgccccccccggcacagacaggttttggaggattattaaaattccctttgggtagggagaatgttggcagttcctccagggttgatcttggctcattttggagaacagttcgtgtttgcagagcctagaattcgttgtcatggttctgtggcccaaccagccagcacaggggtagtggtatgtgctcaatgactatttttagacagagggtctcctttcctccttcccttccatacccacacgttcccccaccctgtgccatcctccagcctccctcccttatcttttccctgagctgccctcttaattgtgttataaccagtttgtaccagcccctaggaagacaatccactgggagacagtttagcctggaaagttccagtttgcgggtttgtgcagctatcagggtctggaggaagtccggcagatgctagtctagagaacagtgcgagggaaccagtgctagatcaagaggtcatcaggctgccatgcacagttgtggaggctcaatacctgcatccactggaggggacacatgggctagccagccctgttaggagtacccatgtgtgctcacatgtgctgtggaggccaggcatcgatgagagaggccacagcccctgctcccgagacctgcccttcatcaggagcctgagccccagccctggaggacctgggcactgggcagattttcagcatcaggactcagctataggtgagctcccagccactggagccaggaaaaagcttcagtactagaacacaaggccagataacagtcaagttaggtagacgcggcgtaaagtcctctgcattgttgactgtggactcctttagatactccaactcttagagaaagggctgttcccagagtctaggggtggagcagccttgaatgtggggaaggcggcatgcacgacatcttacctgagactgtttgtccgagtagtttggaagccgaggcaccatcactgatgctcccggctttgaccccctgcgagatgccgaggtcctgcggaaggccatgaaaggcttcggtaagagaccctgggtggctcaaatcctactccctgccccctatttcccaggcagtttcactgtggctctgtgggctggggtagctgggggacgctgacctggccccagtggtgatagaaggtggatgtgggggtatggctagcatgcccagaacagttgaggggcccaggccagggaagtctcagctgcagagcatctcatgacccctacccgacccacccctgctgcctcttcctccagggacggatgagcaggccatcattgactgcctggggagtcgctccaacaagcagcggcagcagatcctactttccttcaagacggcttacggcaaggcgagctgcggggtgggggcgcgggacagtgaggcgtgtcctgggctcagcacagccctgctctcccctgcttttccttgggtgggcccggatctcccggatggacagtaaggagcaggagggcatttccttctgcccatccagctggtggcatcgttgggaggtgaaggatgccaccgggtgctgaggtttgctgagaggctccagacatctatccctgggttctagcccttgctctgccacatctcactgaggttgtggccacatcattttccttcccctgccctcttcatgaccaccctggggggtttagctgatgtaagagctttgcagggaaaggctgtgagtgctgcccaagtacgaggggcgtgtatgagcatattttgaacttctggggttttgaatcttagaaagataaaaattcggtaaatattgattagattcgtgttctagcccagtgcttctcaaacttcattgtgtcaccgatcccctgggcatcttggtaaaatgtggtctctgatttgggaggtttggggcagggctgagagcaggcttttctctcaggcccctgggggatgtccatgctgctgttcctcaaatctgggatatggctcttattagtcacttcctgtggattttttaaatagacttgtttttttttttgttggttgtttgtttgaatatccaatcaggatttgatcaaagatctgaaatctgaactgtcaggaaactttgagaagacaatcttggctctgatgaagaccccagtcctctttgacatttatgagataaaggaagccatcaaggtgtgtacgtgtgtgtgtgtgtgtgtgtgtgtgtgtgtgtgcgcgcgtgtgtgcgcacgcgcgcatgcgtgtggacacacagcccagaaggaggcctggatggcgtgctgtgttctagcccactcattagctgctgttgtcagtatggctcccaggccttcctgggttggagtccacatgctatagaaaagggaactccctgtgatttccccaagaggcaaatgacgcaccagtcatcatcagggaggcttaagtctctctccatcttaaagaaaagggggagctcgggtttgaaggttgcgattctgtggtaagaagaggggtaggaggccatggttggtatcgttctcattctttaggactctgttactagcaaatgacagaaacacacttcggtttaagaacaacaaaagtggagaatcagtcatgtgggtaaagagggcccaggccagacgtctctctggtctctgtctctcctgagcgcccgcttttctgtcagtttctgtgcttctcctaccatggctgcttcatgtggggtgggagagggggcctgtcgaccactctccgcataactatgagacccagctccagaagagaccagcagggtctccaaacgggcaggttctgacgggcccggcttggactcactgttccctccagtcctgcgggttttgactgagggttgggtcctgtccattctgtgcagtcccacagctctgtgtgcaccctgcaggcaggggcaggcagctcccttggaaagggaatcccatgagtcaggctggagcccagaaggagcctgtcactcagaggcctgataagcacagtgaatgttccctccttcaggagaagcagagacttcagtgtggtggcctggaaaggagaggggtctccgctgaaacacatctacatgtgttattctagggagggggtcaggaggccatcaggcagggcgatggcccggggccccagggagtggacccagacatctccctggcccccgtcttcagccggagtcatgagctggtggttgtggagtgttagaaaccacacaggtttggggcagctgtcactcaccagctgtgtgtccttgagcacctgtgaaatggggacagtggatgctgtctcaggacatgctgggaatactgggtgaggggctaacgtgtagtaacccaatagtagctgtagcaggaaacagctgacacaatgtcgcacgtcctgcctgacaggccctaagtgctctacgtacattaactcacttaatcctcatgactttcctgtgaggtaggtcctagtatcactcccatcttacagacaaggaactggaagcacagagaggttaagtaatgtgcccgaggtcacacagctggtaagctgcagagccaggattcaaaccaacatacaagccaggctgcccagcctgtcctctatggtcttactgtccctggcgtggttgtccgattcatccttgttgttcctaccttttcctagttgttttcagacattccaccatcccctctaggaccagggtttcgtatgtccacttggatctctcttgctttttacccatttttttcagttgttgtcatctcgcttccggctgaactctgaataaagcaggcctcggtccacattttaacccaaccatttactgtgtggcctcggaccagccagtacccctctctgatgctcagttttctgatccatggggatgcccctttgtgtgagccctactcatcaccactgccactgtcattgtgcttgcccgggctgtggagaagagctgatgccctcgagcctgggagtggctggagggtgtgtctctgtgtcaggggcctctgttgctgggattaaggcagcagcgtagcccccacccttcttcccgagtgctggtgaggctgctggaacaagcacatggttggttgtattctctgcccctgcagggggttggcactgatgaagcctgcctgattgagatcctcgcttcccgcagcaatgagcacatccgagaattaaacagagcctacaaagcaggtgaggccgctccctctgccctctgccctctgccctctgcagatccctgtgctcttggggctgtggcctcattctctcctagggccttttactccttcctggccttcttatcaacccatcttctgccacccccaatactttgggctttgacccaagacccagcccttccttctgtttatacatggtgcaaatgactaatgtaagggagaggcagggaaaacctggatgtggtttgggccaaggctgactagaggccaggtcagcctggaggtcacaggcttgtatatccctggagggccatatgggctatttgttctcttgagcccgagccaagacctccagcctttttctccccagtacccacttttgatagtgttttgcaatgggcagctccataaagagagctacaggatggaccttccttgcttctccctttcagaattcaaaaagaccctggaagaggccattcgaagcgacacatcagggcacttccagcggctcctcatctctctctctcaggtacttttcccacgacagggctcggggcccccaagccatggaagtcaaagagatgggatccccgcaatgaggaaagggaaaataaatggggaaggagtgggcatgaccatacacctgcttcctttcagggaaaccgtgatgaaagcacaaacgtggacatgtcactcgcccagagagatgcccaggtgagtgtgatggccaagcccctggacttcctaaagcagggatgcaccccgctttcttgcttcctgagagaggtaccctagggtggaaagaacaatagataagcagtgggttgcagatgctgtgagtttcagacgcgctgaactgttcaactgtatgacctagaacaggtaatctgacctccagggcttcagcttccccacctataggagggaacatgtgagataattagtatttcgatagttgatagatcatggttttggacgtgggattttgtgtgacagcgtactttccccatgtttagttgcacatagcattatgtttgcaaaggggcaaaatttgcacttgcttattaagtttttgaggatttgagcctagaaaccagctgccacattagttgagcacccttagaattctgtcgttgtccctcttgtgagttgcagacaaaaggggaaaagtccaagcaaagtccaggcatctgagctactctctcgaaaagtttgggtttcccactaatgaatttcaaccgtagtattatggcagggcagagccattacttcctggtggggtggagttggccatacctctctgtctcccttcactgctcttgtcatccacggcagggcattcaccaggagctgccagtggtctaaattatctctaccatctgcgggattggaatgagacctcaaggaatgcccccttgttagggctggaggagagctactcctctggtctggtccttttgctggtcctccttttccggaggaggaaactgaggctcaaaaaggttgagcactgttcccaactgaaagctagaagcagagcccggacaagggcctatactcctggctcggtcttctgtgcccagtcagcacttgcctctgccctggtctcagacctgctgctcctgcagggtctgccttattcagtgtctctctggctggtaacatccattcccattctgggagtcagggctggacacgcctggggctcagggctctggcttttgctccagcgagagttttgcatgccacttttagcggggcaaaaattgtctcatgctctgccttctcagtccagagctgctttggcctcatcttgacctgtgggatctcagcccctgattgctgctttctgctctttttcagggctgctacctgaggcctagcaggcactttagaggccatctagttcagaggttgcaaattggcaaatactttaggctcaaaccttcagaagtttaccaggctctcctgggtgacctgggcctggggtctgggtgtggcctgtgccacatgtgcgtcttcctctctctccaggagctgtatgcggccggggagaaccgcctgggaacagacgagtccaagttcaatgcggttctgtgctcccggagccgggcccacctggtagcaggtaaggcaggctggggtccctcagaggccagttagatgagggcagtcaggggattgtggggaaacaaagctatgggaacacttggtcgttcctccctgcgtggggctttcgcctcctcaaaagagccccctggtgggaatttaaaagacactgtcagagggtttcctgagttctggcaaacatccagttctggaggttctaccggtgtagaaacctggtgtctttgtacgtgggaatgtggaacgtcagagttgggagggtccttcgggagcacccaatccagtgttttccaaagcctggcataagaaacagtcataacaataaaactgggtgccattcatttactcattcattcaacagatgtaaatcgcgctcccgcatgggtcagtctgtcaggtggtggagcaggtgtggggccacggtggggggcagggcactgcagagtgtgttccatgggctgcactttctcatttggggagacagacagtaaacaacaatgaaataaaatctgtatcagatgggaaatcctgtagaggaaaatcaagctggaaacaggtagggagtgatggtagggtccaccgggaggtgcttgggccagtccccactgaggtcgtgacatttgatttaaaaacctaaagggagatgcaggggcagaggcctgcctggggctcccagcacgactgagaacagtgaagggggaccatgtggagcaggtggagtgagcaagaggagtgggaggtgagggcagagaggggagagggccctgctgatgacttcccggagctgggtatttatcctgagcaaaagaggaagccagtggagggccctgagcagaggaggctgtgcagaatccctggctgtggtgccgagaatggagtgaagggtgcaaggccaagcagcgaagcctgtcgggaggctgctgcagggacccggggaggaatggtggtaataggggcttgtggtgaggaggtgtcaggttccggccatgtttgctgatgaattggacacgtgacgtgtgggagagagagggttcgaggattatacagggtttctttaggccaagcagtgggagaatggccctcaactgagacagggggactgtaggtggagctggctttaggtgcctgtagggtggagctgcagggaggctgctgggttgctgagtgtggaggtcaggagaggtctggcctggttgtggaaggtaagggagctatgggtagttgaagttatctgaggctctgggactgcaggaggtcccctcaggagggagactgtggggagcccaccggtgtgaggagactaagaaggagcagctagggagggaggaggacgcagaggaagggggtcctggaggccagtgtgaggtggcaggcaaggactgaggatggtgaccacacggagcaactggtgggctgtggccagggctgctccagtgggcagtgagggtgaaaacccagcgaccgctctgtgctgcacacagagacaggcgctgtggctctccccattcgcagctgtgaaagcaggcacagggtggtagaggaagtaggggtgcacagctagtaacagctgagctgggatttgaacccagaccacccgaccccagagcacactttttaacctctgcactatcctgtaatggagcctgagtgaaagcattttcatcttaatcattatttcttttaatgagtacagaacatgtaagtagtgcatcaagcccatggcttcacaaacattattacttaggagaaaagagtagctgattggaagaagatattaattgagacagatacacacagagcagaaatcacaactttaaaatgcaaatggtagctgagactcaggctggggaaggagagttttatgtcctgggtcagaactggagtcaggaccaaggtctccatcatgccacctgtctctctaggagccagccatccactcctgtgggtgcttagcgtgtcctaggtcgaggtgagcagcaagaagccaggctggctggggcaggctgggcctcagctcacaggcaggctgaggaagacagatggatgcatgaataaagccaaggaatggcagagactggaggtgtggaggatttgacaagagggaaaaaatgtcttggagtacataaaagtggccctggaggggtattaaggtgcgatttggttaagcagattggcagtcctgagaaagggaccacacagggagggacatcaggtggtgcatgtaacttgtgacgaagactctgacttccttgagcgctagcaggcctggggacgtgcagggtgtgggagcagagtggcaggtgggagattttggggcagaggccacctcatgtgagtcctctgttagtctgctcatgctgccatgacaaaataccacagactgggtggcttaagcagcagatactcattttgttacagttttgaaggccagatatccaagagtggggtgccggtttctcccgtggcctcttcgtgacaatcactgtgctcacatggtctttcctctgcatgtgcacatccctgggatctctgtgtgtgtcctaatcttctcttcttctaaggagaccaggcgaattggattagggtacaccctagcagcatgttttaacttaattacctctttaaagatcttatctccaaacacggttatattctgaagtcctgggagttgggacttccacatatgaactttggggagacacatttcagttcataatataagcctctgtcatccccatagttttcaatgagtaccagagaatgacaggccgggacattgagaagagcatctgccgggagatgtccggggacctggaggagggcatgctggccgtgggtaagtgtctcaggtttgccgcccacctgccaggggctaacgtgtatcgtgagtgttcaggctgctcgcctgtcctccagctgatgggtgacaccgtgaagggaccacaggatccaagatcgctcagcccagagtgtccagatgctgggaagtcatgctgcttcccggttccctgtgcagttgaacccctagctgtcctggaggtgtcttgtgtgtgtttgcggtgcagctctggagtagggaactgcagtgtgggtattagtgggagggcatccaactgcgctcccggaggagtatgactcatatcctgccacgtttcctctaaaaatacatccctgcaggcagttgtcagatgtttgtgatggaaacacgtggaaagatttttacttgcagcagcgaaacaggcccatgctgaggaaagctggcttggctccaggatggtggtgtgcctcttacattgcccatgtcctctagcagggccctcccactgtgcagagttgggtccctgccctgaggccctcacaacccctctttctactcacttgggaaaatcagtctgccccttttttcattatgctttttttggagctttctggatgggagagatggaaaatcctcatttccctgcctgtcccccatagtaggtctcatggcctgggaagcctagggagatgcacattccactcagccacggtttctccatgacggtcatggcctctccagtctgcccctcctgcctgagcagcagcacagttcctcatcaccatccacattgcttccctgtgtagctcctagccccactaagacccccgcccctctgactcttggtcctttcaccgcagtggttgccaggaaagagggtgggttggtttccaggctttgcgtgtttctgttccaaatagctggagccaagatcatgggatagttgagcctggaacagaaggaggaggagaaaagatggatgcagtgatgggtttgacatctgggcctctaagaggacacttgtagactccatgccctgcttgggctgagaattttctgcagatctggttatgccgagtttctctcttctagtgaaatgtctcaagaataccccagccttctttgcggagaggctcaacaaggccatgagggtatgtaacttccatgtgcaggttgcgatggaaccttagcctcgcctgtgcctgggaccaagggctgagggcagaaggcctggggagagctaaatctcagctgagagttccgaggacctgggtagggaggggactggagggcccagggcaggtgggaaggtgaggaggcctggtgctcatgctcttgggtggactctctttagggggcaggaacaaaggaccggaccctgattcgcatcatggtgtctcgcagcgagaccgacctcctggacatcagatcagagtataagcggatgtacggcaagtcgctgtaccacgacatctcggtacgggcctgctgcaggccaactgggctcccttttggcatctcagtcacctgtggaacctccctccttggagtggccatatgcttggcctctgtgctgtgtgtgggcatcttgattatggacctcggacttgttcatccccttgcccttaaacagattataaatttctgagggcaggtggatcatgaccttgctgtcgcccccaccttgcatcccccagcagcatcagagaacactcgggacctccccaaccttgaccgtgaccttcagcgttccgatcaccgtgtgattccttgatctgtcagtgagaactcatgtcccaaaggctctgtggagctctgctgtcactccctgacaaagcacttcctgcactcagctttatggcgtaggccacatagtaaggccgttcagagcgagggccctgggggtcacgccacttggagtccagcttttctacttgctaactgtgtgaccttgaatggctcccttaaatctccctgaaccccagctccattgtctttaagatgagaaaataatcgttccttcctgggaatgttgtgagtattgagtgaggcagtgcaggtcaagtgtctattaaacactagccacagttgtatcgctgtgtggcagagccagtctgacaaaatacattctcagctgtgtggtctaacgctcaaattctgaactcacatgagccttgcaattgcaccatggggaccacgtcctcccaccttagactcagtagcatttgatgatggtgggcatgtcatcacaggaaactcactgtgtttccttggctgtatgaatgaagctgttgttagagaattagtgattctaggctgggcacagtggctcacgcctgtaatcccagcactttgggaggctgaggcaggtggatcatttgaggtcaggagttcgagaccagcctggccaacaaggtaaaaccctgtctctactaaaaatacaaaattagctgggcttgcctgtaatcccagctaattaggtaggctgcggcaggagaattgcttgaacccgggagacagaggttgcagtgagctgggatcacgccattccacttcagtcttggtgacagagtgagacttcgtctcaaaaaaaaaaagagagttaataattcattacagagtatctcctgcatgccagcaagctatggacatctggaagaagccacatgccttgccctcaagttgcttagggtggaaggaaatgattagaaatgagccaagccgagcctgcactcttagagtaagtgtagtggcctcagacagaggagagatccctgggacctgggcagtctgagccttccactggacagtcatgtgtgaggagattgcatttcctgagcaggacactgtgttgcgttacattggtaaccccaatttaaggcagcataaatgcactgggaaaacagcaatattggttagccctgggaagtggtttttaggatgattataatttttttttgtgggtattcatttgatgtggatagctggggtgagtgctgctttccgtcttctgatgggggcctggagaaggctgaactgcattttttaaggtctgtgacgcctgctgcaggacctgcagtgggagaaaattccccagggtggggctttctccctataagggtgctcagggctgaatatcaggacccagaaggctgaaagtgactgtccctcccttaacggatgtcttccttgtttctgtggccagggagatacttcaggggattaccggaagattctgctgaagatctgtggtggcaatgactgaacagtgactggtggctcacttctgcccacctgccggcaacaccagtgccaggaaaaggccaaaagaatgtctgtttctaacaaatccacaaatagccccgagattcaccgtcctagagcttaggcctgtcttccacccctcctgacccgtatagtgtgccacaggacctgggtcggtctagaactctctcaggatgccttttctaccccatccctcacagcctcttgctgctaaaatagatgtttcatttttctgactcatgcaatcattcccctttgcctgtggctaagacttggcttcatttcgtcatgtaattgtatatttttatttggaggcatattttcttttcttacagtcattgccagacagaggcatacaagtctgtttgctgcatacacatttctggtgagggcgactgggtgggtgaagcaccgtgtcctcgctgaggagagaaagggaggcgtgcctgagaaggtagcctgtgcatctggtgagtgtgtcacgagctttgttactgccaaactcactcctttttagaaaaaacaaaaaaaaagggccagaaagtcattccttccatcttccttgcagaaaccacgagaacaaagccagttccctgtcagtgacagggcttcttgtaatttgtggtatgtgccttaaacctgaatgtctgtagccaaaacttgtttccacattaagagtcagccagctctggaatggtctggaaatgtcttcctggtaccaacttgttttcttctgcttgattctgccctgtggctcagaggtctggccttatcagccagtgaaagttcatgtaaccttacgtagagatttgtgtgcaggaaaccctgagcatacactagtttgcagggactcgtaaggacatgggaagggaggttcccgaaatccaggcaggaggcccagacacctgaaaggcaaagggatcttggttggttgcaggtgcagtgaagtccactgaaggtgtggtgcgaagaatgcagtccttcacccaggtcccaggagggaagaagggtgtgtgctaattcctggtgcccctcggcgggggccagagagaaggatggggacaacccagagagtcacaagaccagtgcctcccctcagggtgcctccaggctgaaaggggctcctggctctggtctctggggaccctgtgcccgttggttggtggtgtgagggaagagaatccataagagagtttctgagaattatggtgtcatgtccagaagctagagcttaccttgcatcaggggtctccacccactccttttccaacctcctgcgttgaggtttagaaaagagagaatcgactaggcactatggctcacgcctgtaatccaaggactttgggaagctgaggtgagaggatcacttgagctcaggagttcaagactagcctagccaacagcgagacccctgtctctactaaaaaatttggccaggcgtggtggctcacggctgtaatcccagcactttgggaggtgaggcgggcagatcacctgaggtcaggagttcgagacccagcctggccaacatggtgaaaccccatctctactaaaaatacaaaaattagccaggcatggtggcacattcctgtaatcccagctacacaggatgctgaggcaggagaatcacttgaacccaggaggcagaggttgtagtgagctgagatcacaccattgcacttcaacctgggtggacagagtgagactctgtctcaaaaaaaaaaaaaaatttacctggcattgtagtgcattccctatagtcggctactctggaggctgaggcaggaagatccttagagcccaagaaattgaggccgtagtaagctgtgattacaccactgcactccagcctggacaacagagcgagaccttgtctcaaatgagaaaaaaacaaaaagaaatgggagaatccagagagactaggctagatcaagcctgctgggtcctggcaggagccccagggagtagctcatctgcagacatttgcttgaggactaccccctaaacataaaggaagaatgacatccgaagggtgtggagcagccatgagctgagaactagcctggtctacctgagattgatggcaggtcctggtcaacacgtcagctctgcgtcagagtccatgcctcaagcccaagctgaagccccatccctgctgctctcccaagaactcctctgctaggccaggccccttgcccttgggtgccaggtgggacctgcctgatgggatggggtgcttggcatatacaacttgccatgaactcccgccgcaaaatgggggcctcctgaaatagtgaggggacactagaaccaatgtgctctgatgtgaccatattctgtgacattaccatgccctgtttactccaaagttcccagcctggtgcccagcaggcaatattgcacctacagacacatttactttggtttccaaagtgtttttagacatttgaatttgttgccaacatttaaacattgagagatttcatatttttaaaaatctggaattctggcttctcttgaaaactcagaaattctggcactatggggcttgcattcctgcatggctggagctgagttgcagctgcccctttaggcctgtactccttatttgctataggctccgtcttgtattacactaagcccatgtcacccatttggctcctgcaggcctttgggtttgagaccctggtctacacacttggagaccacctgttgtaaagtacatggatgtgctttggtcaaggaatagaccaaggtggatatccaggccagagtgactcagcgagtttaggtcacaggcgtatactccacttgttatataacctgcttgtgtaagttcatacttggctcaaagccactattgtttggaaaaggtataactgccctgctgacgctgtacagatgttcttgggctcggatgggcatggctccacgtggtgtgcactagcacccagagagagtgaagctattgacccctgtaagggagagtgaccatctggcagatagatagaggggagccaggacatggctcagcttgtgcccagagggagagttaagccgctgaccctgtagccagggagtgcacctgcaagcatgggggtggcaggagccacagagctggctgctgagaggagctgcagatctggagaagacagcctaggtaaaggtggacagtgtgagagctgctgatgagatagctgctgaataaaactacattttacctgcctatggcccgccaggttttctttcagctatcgcccatccacccagtcccctcgaacctcagcatgggctggaacctgaccctgggcatgacatttggcatagttgtggacctgacacctgtgtttgtcctagtcctgtttctccctgccttcctgttcctctcgctgccctcatggtcactcccaagagatccaacccatgttaagtatgggctggaggactgcatgaatgcctcatgatcttcccagaggcaaaggcacctactgccttccaaggtcagtgggaggttgggatcaacactgtttattatgcttaggacaaaaaagatagggagaaagatgtgcaaccttacaggtcatctttctgggatagaacacaatgggtcttctcctgcctcctggatatgttagtcaaggccagtccatgctacacatctagtctgacttctaaaatagaagcaccagatgaattcagccctgagagaattttcagcagctgtgggggcgctggaggaaacactattaaatagttttgcacctgagacagatagcctcactcgcctcaccctagtcctggtggcatttgtctcaggtgcaaaatttaagaaagaaaccttggagtgctcaccctgtggctgggtagatggtcctaaagtggtggttttcaagcctgagtgtgtatcaggatcatcaggggagcttgctaaagagcagttcctgcggtcagaccctcatgcattttgagcaggtgtggggactgggaaactgcatctgtaacctgctgtaatctaacgcttatctaaatactactgtgctcacacagagaacaccgcaaaagtagaggtgttcctccagagggcaggtgagcagatggcacagtctgcttggaattcagtcaggtgatgagagatgagatgaggcactcctagctttgggaagagggagctgaaagatgaacctttgcaggtgcccacggtcaaagtggtggtttaatgccatgccatgcccattttctgttggccttggcagggagttacagccctaccttaggacctggctccttatttctgctgtaggctctttcctgccctggccgagatggagtggaatgagacctagaaacatcaagctaaatacatgtcctcagaaagataaaggtttacattttcacccccatcaaatctgaaagctctctgcctgtgtttttctaagggatagggacatcattactcagtccacaacctggactcatgtagggtcccctgtcagtaaaggagtcagtcaagcccaccaggtataccaaggactcttaccctcagcccctactccttggaaagctgccccttggcctaatattggtgtttagcttgagcctgactccttctcaacactaagagctgatgaagtcctgaagcagaaagagctctgacctgagagtcaaacatccttattctgatctcagctcagcccctgatttgttgtgtgaccctggatatgtcacttcctgtctttttgactttttaaaatgaagggtagactagaggagagcttctaaaactttaatgtggtcaacgaaatggaataggaaattccacaagtctgtccttccacaaaagcagcaaataaggtggcaaaaactcaaatttatgggaactctggaaacgaattgaaagtttacagcaatcaggtgaatacctaagaataaaagctggatttagtaagagagctttgttgtgttttagcttaccctggccccatcccccactccccagcatggcagcagcatcaaaaacaatatccctcattccctgtataggttcctgtcactggaggtagcagatta

SEQ ID NO: 960 - DNA, 20110 bp, Homo sapiens
gcccagcatgccccccatcgggctggataacgtggccacctatgcggggcagttcaaccaggactatctctcgggaatggtgagtccagctctcctgctgaggcagccctggggccacacctgcgtggccagaggaatcaaagctgctggcctctggggctccagagttgtctgtgtgtgtgttgctgtggtttgtagtgtgttgagctgtaccttagaacagggttttcatcaggcttctgccacctgctctctgcccctctctgggtctcacttttcccatctgtaaaatgaggggaaggggaccagatgatctcacaggtccctttcagccctgaggggttagggttgggaaggtggcgagggtatctgcatgagtgtgcatgcacgtgctatgtatgagtatccacattcatatacctgcatgtgcatgtgtgtacatatggagggctcttctggttaggccttggtgggtgtgtggcaggtatcttgggcagacatgctactttttaaatttgttgtttcacttttaaaataatacattttatgatttgaaaacaaacatatgcttagtttatgatttgaaaacaaacgtatgcttagaggaaattatgcaaccaatacacaccctaatttgtgccaggcccagttctaggcactggggatatgtgaataaaacaaacaaaaatctcagccgtgctgcacttatcatctatggggaaaagacaggcagtaccttaagtcaacgatgtgatgttattgaaagtgtaggtgccataggaacaagttgaccagggtaaaggggtcaggagtgggggtggggtgatgtaaggataatgattttaagttagcagtaaggtgggtctggctgaaaagaggatgtgtgagcaaagacctgcatcaggggaaggaagtgctgtatggatgtctagggaatgccggtgccctgaggtgccaaggggtgtgaggtgctcagggacagggaggagaggccagtgtggctaaagtggaaaggcgagggggtgagatgggaaatgaagtctgggggtctagctcttgcagggtgtaggaggctatccatcctaaggatttaggtttttattcctggtgagtgcagattcacctgaacatgcctgccagaggtgtctgtgggtagcaggctgatgtgatggggatgcccccaaccctgcatatgggacccacgcaccttcttgggcagtgagctcttaaccttcacccaggtggtctgggatgggaggagcaaccatgtggagagggaaggcatctcccctgcagaaggggatgaggatctctggtttggatcgagtcgcactgttcactggctgtgtaactttgagcaagtaaactcattctgtggtctgtgaaatgggtataacggtacttcatattccacaagcggagatgctgtgaggactgacttggcttaggtatgaaaaagggtggagggacggagtgcagcagggcccattggcctcaggctctgctttgtgtccttgcaggcggccaacatgtctgggacatttggaggagccaacatgcccaacctgtaccctggggcccctggggctggctacccaccagtgccccctggcggctttgggcagcccccctctgcccagcagcctgttcctccctatgggatgtatccacccccaggaggaaacccaccctccaggatgccctcatatccgccatacccaggggcccctgtgccgggccagcccatgccaccccccggacagcagcccccaggggcctaccctgggcagccaccagtgacctaccctggtcagcctccagtgccactccctgggcagcagcagccagtgccgagctacccaggatacccggggtctgggactgtcacccccgctgtgcccccaacccaggtgagtgtcagcccactgcctcccttggtccaggcctgggccccaaaggctggagacacatggctcagtagatggggagacagggaaaggcgcaggcctccagctgcacttcttgttttaacaaatagtgtcggccgggtgcagtgactcatgcctgtaatcccagcactttgggaagctgaggtgggcagatcgcttgagcccaggagttcaagaccaacctgggcgaaatggtgaaaccctatctctactaaaaatagaaaaaaaattagctgggcatggtggtgcatacctgtaggcccagctactcgggaggctgaggtgggaggatcacctcagcccaggagacagaggttgcagtgagccgggatcatgccgctgcactcactccagcctaggtgacagagtaagacccagtttttaaaacaaaaacaaaaacaaaaaaagacaaacaaagagcgtcaccttcttgcagactccccacctctgggttgtgttgcttaaggcccaagggagctgtcctgtttctcctggtgtgatgagacgctccacatccgagttgggtcagaacacccctggcgagtactccttattcctctgtgtcatttactgcctgggctgtgtgttttgtaagaactgcccaggccacctgtctcaagactttgtgctcaacagctgtcttcggtcccttgatatgcaccacccccgccccccccggcacagacaggttttggaggattattaaaattccctttgggtagggagaatgttggcagttcctccagggttgatcttggctcattttggagaacagttcgtgtttgcagagcctagaattcgttgtcatggttctgtggcccaaccagccagcacaggggtagtggtatgtgctcaatgactatttttagacagagggtctcctttcctccttcccttccatacccacacgttcccccaccctgtgccatcctccagcctccctcccttatcttttccctgagctgccctcttaattgtgttataaccagtttgtaccagcccctaggaagacaatccactgggagacagtttagcctggaaagttccagtttgcgggtttgtgcagctatcagggtctggaggaagtccggcagatgctagtctagagaacagtgcgagggaaccagtgctagatcaagaggtcatcaggctgccatgcacagttgtggaggctcaatacctgcatccactggaggggacacatgggctagccagccctgttaggagtacccatgtgtgctcacatgtgctgtggaggccaggcatcgatgagagaggccacagcccctgctcccgagacctgcccttcatcaggagcctgagccccagccctggaggacctgggcactgggcagattttcagcatcaggactcagctataggtgagctcccagccactggagccaggaaaaagcttcagtactagaacacaaggccagataacagtcaagttaggtagacgcggcgtaaagtcctctgcattgttgactgtggactcctttagatactccaactcttagagaaagggctgttcccagagtctaggggtggagcagccttgaatgtggggaaggcggcatgcacgacatcttacctgagactgtttgtccgagtagtttggaagccgaggcaccatcactgatgctcccggctttgaccccctgcgagatgccgaggtcctgcggaaggccatgaaaggcttcggtaagagaccctgggtggctcaaatcctactccctgccccctatttcccaggcagtttcactgtggctctgtgggctggggtagctgggggacgctgacctggccccagtggtgatagaaggtggatgtgggggtatggctagcatgcccagaacagttgaggggcccaggccagggaagtctcagctgcagagcatctcatgacccctacccgacccacccctgctgcctcttcctccagggacggatgagcaggccatcattgactgcctggggagtcgctccaacaagcagcggcagcagatcctactttccttcaagacggcttacggcaaggcgagctgcggggtgggggcgcgggacagtgaggcgtgtcctgggctcagcacagccctgctctcccctgcttttccttgggtgggcccggatctcccggatggacagtaaggagcaggagggcatttccttctgcccatccagctggtggcatcgttgggaggtgaaggatgccaccgggtgctgaggtttgctgagaggctccagacatctatccctgggttctagcccttgctctgccacatctcactgaggttgtggccacatcattttccttcccctgccctcttcatgaccaccctggggggtttagctgatgtaagagctttgcagggaaaggctgtgagtgctgcccaagtacgaggggcgtgtatgagcatattttgaacttctggggttttgaatcttagaaagataaaaattcggtaaatattgattagattcgtgttctagcccagtgcttctcaaacttcattgtgtcaccgatcccctgggcatcttggtaaaatgtggtctctgatttgggaggtttggggcagggctgagagcaggcttttctctcaggcccctgggggatgtccatgctgctgttcctcaaatctgggatatggctcttattagtcacttcctgtggattttttaaatagacttgtttttttttttgttggttgtttgtttgaatatccaatcaggatttgatcaaagatctgaaatctgaactgtcaggaaactttgagaagacaatcttggctctgatgaagaccccagtcctctttgacatttatgagataaaggaagccatcaaggtgtgtacgtgtgtgtgtgtgtgtgtgtgtgtgtgtgtgtgcgcgcgtgtgtgcgcacgcgcgcatgcgtgtggacacacagcccagaaggaggcctggatggcgtgctgtgttctagcccactcattagctgctgttgtcagtatggctcccaggccttcctgggttggagtccacatgctatagaaaagggaactccctgtgatttccccaagaggcaaatgacgcaccagtcatcatcagggaggcttaagtctctctccatcttaaagaaaagggggagctcgggtttgaaggttgcgattctgtggtaagaagaggggtaggaggccatggttggtatcgttctcattctttaggactctgttactagcaaatgacagaaacacacttcggtttaagaacaacaaaagtggagaatcagtcatgtgggtaaagagggcccaggccagacgtctctctggtctctgtctctcctgagcgcccgcttttctgtcagtttctgtgcttctcctaccatggctgcttcatgtggggtgggagagggggcctgtcgaccactctccgcataactatgagacccagctccagaagagaccagcagggtctccaaacgggcaggttctgacgggcccggcttggactcactgttccctccagtcctgcgggttttgactgagggttgggtcctgtccattctgtgcagtcccacagctctgtgtgcaccctgcaggcaggggcaggcagctcccttggaaagggaatcccatgagtcaggctggagcccagaaggagcctgtcactcagaggcctgataagcacagtgaatgttccctccttcaggagaagcagagacttcagtgtggtggcctggaaaggagaggggtctccgctgaaacacatctacatgtgttattctagggagggggtcaggaggccatcaggcagggcgatggcccggggccccagggagtggacccagacatctccctggcccccgtcttcagccggagtcatgagctggtggttgtggagtgttagaaaccacacaggtttggggcagctgtcactcaccagctgtgtgtccttgagcacctgtgaaatggggacagtggatgctgtctcaggacatgctgggaatactgggtgaggggctaacgtgtagtaacccaatagtagctgtagcaggaaacagctgacacaatgtcgcacgtcctgcctgacaggccctaagtgctctacgtacattaactcacttaatcctcatgactttcctgtgaggtaggtcctagtatcactcccatcttacagacaaggaactggaagcacagagaggttaagtaatgtgcccgaggtcacacagctggtaagctgcagagccaggattcaaaccaacatacaagccaggctgcccagcctgtcctctatggtcttactgtccctggcgtggttgtccgattcatccttgttgttcctaccttttcctagttgttttcagacattccaccatcccctctaggaccagggtttcgtatgtccacttggatctctcttgctttttacccatttttttcagttgttgtcatctcgcttccggctgaactctgaataaagcaggcctcggtccacattttaacccaaccatttactgtgtggcctcggaccagccagtacccctctctgatgctcagttttctgatccatggggatgcccctttgtgtgagccctactcatcaccactgccactgtcattgtgcttgcccgggctgtggagaagagctgatgccctcgagcctgggagtggctggagggtgtgtctctgtgtcaggggcctctgttgctgggattaaggcagcagcgtagcccccacccttcttcccgagtgctggtgaggctgctggaacaagcacatggttggttgtattctctgcccctgcagggggttggcactgatgaagcctgcctgattgagatcctcgcttcccgcagcaatgagcacatccgagaattaaacagagcctacaaagcaggtgaggccgctccctctgccctctgccctctgccctctgcagatccctgtgctcttggggctgtggcctcattctctcctagggccttttactccttcctggccttcttatcaacccatcttctgccacccccaatactttgggctttgacccaagacccagcccttccttctgtttatacatggtgcaaatgactaatgtaagggagaggcagggaaaacctggatgtggtttgggccaaggctgactagaggccaggtcagcctggaggtcacaggcttgtatatccctggagggccatatgggctatttgttctcttgagcccgagccaagacctccagcctttttctccccagtacccacttttgatagtgttttgcaatgggcagctccataaagagagctacaggatggaccttccttgcttctccctttcagaattcaaaaagaccctggaagaggccattcgaagcgacacatcagggcacttccagcggctcctcatctctctctctcaggtacttttcccaccacagggctcggggcccccaagccatggaagtcaaagagatgggatccccgcaatgaggaaagggaaaataaatggggaaggagtgggcatgaccatacacctgcttcctttcagggaaaccgtgatgaaagcacaaacgtggacatgtcactcgcccagagagatgcccaggtgagtgtgatggccaagcccctggacttcctaaagcagggatgcaccccgctttcttgcttcctgagagaggtaccctagggtggaaagaacaatagataagcagtgggttgcagatgctgtgagtttcagacgcgctgaactgttcaactgtatgacctagaacaggtaatctgacctccagggcttcagcttccccacctataggagggaacatgtgagataattagtatttcgatagttgatagatcatggttttggacgtgggattttgtgtgacagcgtactttccccatgtttagttgcacatagcattatgtttgcaaaggggcaaaatttgcacttgcttattaagtttttgaggatttgagcctagaaaccagctgccacattagttgagcacccttagaattctgtcgttgtccctcttgtgagttgcagacaaaaggggaaaagtccaagcaaagtccaggcatctgagctactctctcgaaaagtttgggtttcccactaatgaatttcaaccgtagtattatggcagggcagagccattacttcctggtggggtggagttggccatacctctctgtctcccttcactgctcttgtcatccacggcagggcattcaccaggagctgccagtggtctaaattatctctaccatctgcgggattggaatgagacctcaaggaatgcccccttgttagggctggaggagagctactcctctggtctggtccttttgctggtcctccttttccggaggaggaaactgaggctcaaaaaggttgagcactgttcccaactgaaagctagaagcagagcccggacaagggcctatactcctggctcggtcttctgtgcccagtcagcacttgcctctgccctggtctcagacctgctgctcctgcagggtctgccttattcagtgtctctctggctggtaacatccattcccattctgggagtcagggctggacacgcctggggctcagggctctggcttttgctccagcgagagttttgcatgccacttttagcggggcaaaaattgtctcatgctctgccttctcagtccagagctgctttggcctcatcttgacctgtgggatctcagcccctgattgctgctttctgctctttttcagggctgctacctgaggcctagcaggcactttagaggccatctagttcagaggttgcaaattggcaaatactttaggctcaaaccttcagaagtttaccaggctctcctgggtgacctgggcctggggtctgggtgtggcctgtgccacatgtgcgtcttcctctctctccaggagctgtatgcggccggggagaaccgcctgggaacagacgagtccaagttcaatgcggttctgtgctcccggagccgggcccacctggtagcaggtaaggcaggctggggtccctcagaggccagttagatgagggcagtcaggggattgtggggaaacaaagctatgggaacacttggtcgttcctccctgcgtggggctttcgcctcctcaaaagagccccctggtgggaatttaaaagacactgtcagagggtttcctgagttctggcaaacatccagttctggaggttctaccggtgtagaaacctggtgtctttgtacgtgggaatgtggaacgtcagagttgggagggtccttcgggagcacccaatccagtgttttccaaagcctggcataagaaacagtcataacaataaaactgggtgccattcatttactcattcattcaacagatgtaaatcgcgctcccgcatgggtcagtctgtcaggtggtggagcaggtgtggggccacggtggggggcagggcactgcagagtgtgttccatgggctgcactttctcatttggggagacagacagtaaacaacaatgaaataaaatctgtatcagatgggaaatcctgtagaggaaaatcaagctggaaacaggtagggagtgatggtagggtccaccgggaggtgcttgggccagtccccactgaggtcgtgacatttgatttaaaaacctaaagggagatgcaggggcagaggcctgcctggggctcccagcacgactgagaacagtgaagggggaccatgtggagcaggtggagtgagcaagaggagtgggaggtgagggcagagaggggagagggccctgctgatgacttcccggagctgggtatttatcctgagcaaaagaggaagccagtggagggccctgagcagaggaggctgtgcagaatccctggctgtggtgccgagaatggagtgaagggtgcaaggccaagcagcgaagcctgtcgggaggctgctgcagggacccggggaggaatggtggtaataggggcttgtggtgaggaggtgtcaggttccggccatgtttgctgatgaattggacacgtgacgtgtgggagagagagggttcgaggattatacagggtttctttaggccaagcagtgggagaatggccctcaactgagacagggggactgtaggtggagctggctttaggtgcctgtagggtggagctgcagggaggctgctgggttgctgagtgtggaggtcaggagaggtctggcctggttgtggaaggtaagggagctatgggtagttgaagttatctgaggctctgggactgcaggaggtcccctcaggagggagactgtggggagcccaccggtgtgaggagactaagaaggagcagctagggagggaggaggacgcagaggaagggggtcctggaggccagtgtgaggtggcaggcaaggactgaggatggtgaccacacggagcaactggtgggctgtggccagggctgctccagtgggcagtgagggtgaaaacccagcgaccgctctgtgctgcacacagagacaggcgctgtggctctccccattcgcagctgtgaaagcaggcacagggtggtagaggaagtaggggtgcacagctagtaacagctgagctgggatttgaacccagaccacccgaccccagagcacactttttaacctctgcactatcctgtaatggagcctgagtgaaagcattttcatcttaatcattatttcttttaatgagtacagaacatgtaagtagtgcatcaagcccatggcttcacaaacattattacttaggagaaaagagtagctgattggaagaagatattaattgagacagatacacacagagcagaaatcacaactttaaaatgcaaatggtagctgagactcaggctggggaaggagagttttatgtcctgggtcagaactggagtcaggaccaaggtctccatcatgccacctgtctctctaggagccagccatccactcctgtgggtgcttagcgtgtcctaggtcgaggtgagcagcaagaagccaggctggctggggcaggctgggcctcagctcacaggcaggctgaggaagacagatggatgcatgaataaagccaaggaatggcagagactggaggtgtggaggatttgagaagaggggacactgtcttggagtacatgggagtgggccctggaggggtattaaggtgcgatttggttaagcagattggcagtcctgagaaagggaccacacagggagggacatcaggtggtgcatgtaacttgtgacgaagactctgacttccttgagcgctagcaggcctggggacgtgcagggtgtgggagcagagtggcaggtgggagattttggggcagaggccacctcatgtgagtcctctgttagtctgctcatgctgccatgacaaaataccacagactgggtggcttaagcagcagatactcattttgttacagttttgaaggccagatatccaagagtggggtgccggtttctcccgtggcctcttcgtgacaatcactgtgctcacatggtctttcctctgcatgtgcacatccctgggatctctgtgtgtgtcctaatcttctcttcttctaaggagaccaggcgaattggattagggtacaccctagcagcatgttttaacttaattacctctttaaagatcttatctccaaacacggttatattctgaagtcctgggagttgggacttccacatatgaactttggggagacacatttcagttcataatataagcctctgtcatccccatagttttcaatgagtaccagagaatgacaggccgggacattgagaagagcatctgccgggagatgtccggggacctggaggagggcatgctggccgtgggtaagtgtctcaggtttgccgcccacctgccaggggctaacgtgtatcgtgagtgttcaggctgctcgcctgtcctccagctgatgggtgacaccgtgaagggaccacaggatccaagatcgctcagcccagagtgtccagatgctgggaagtcatgctgcttcccggttccctgtgcagttgaacccctagctgtcctggaggtgtcttgtgtgtgtttgcggtgcagctctggagtagggaactgcagtgtgggtattagtgggagggcatccaactgcgctcccggaggagtatgactcatatcctgccacgtttcctctaaaaatacatccctgcaggcagttgtcagatgtttgtgatggaaacacgtggaaagatttttacttgcagcagcgaaacaggcccatgctgaggaaagctggcttggctccaggatggtggtgtgcctcttacattgcccatgtcctctagcagggccctcccactgtgcagagttgggtccctgccctgaggccctcacaacccctctttctactcacttgggaaaatcagtctgccccttttttcattatgctttttttggagctttctggatgggagagatggaaaatcctcatttccctgcctgtcccccatagtaggtctcatggcctgggaagcctagggagatgcacattccactcagccacggtttctccatgacggtcatggcctctccagtctgcccctcctgcctgagcagcagcacagttcctcatcaccatccacattgcttccctgtgtagctcctagccccactaagacccccgcccctctgactcttggtcctttcaccgcagtggttgccaggaaagagggtgggttggtttccaggctttgcgtgtttctgttccaaatagctggagccaagatcatgggatagttgagcctggaacagaaggaggaggagaaaagatggatgcagtgatgggtttgacatctgggcctctaagaggacacttgtagactccatgccctgcttgggctgagaattttctgcagatctggttatgccgagtttctctcttctagtgaaatgtctcaagaataccccagccttctttgcggagaggctcaacaaggccatgagggtatgtaacttccatgtgcaggttgcgatggaaccttagcctcgcctgtgcctgggaccaagggctgagggcagaaggcctggggagagctaaatctcagctgagagttccgaggacctgggtagggaggggactggagggcccagggcaggtgggaaggtgaggaggcctggtgctcatgctcttgggtggactctctttagggggcaggaacaaaggaccggaccctgattcgcatcatggtgtctcgcagcgagaccgacctcctggacatcagatcagagtataagcggatgtacggcaagtcgctgtaccacgacatctcggtacgggcctgctgcaggccaactgggctcccttttggcatctcagtcacctgtggaacctccctccttggagtggccatatgcttggcctctgtgctgtgtgtgggcatcttgattatggacctcggacttgttcatccccttgcccttaaacagattataaatttctgagggcaggtggatcatgaccttgctgtcgcccccaccttgcatcccccagcagcatcagagaacactcgggacctccccaaccttgaccgtgaccttcagcgttccgatcaccgtgtgattccttgatctgtcagtgagaactcatgtcccaaaggctctgtggagctctgctgtcactccctgacaaagcacttcctgcactcagctttatggcgtaggccacatagtaaggccgttcagagcgagggccctgggggtcacgccacttggagtccagcttttctacttgctaactgtgtgaccttgaatggctcccttaaatctccctgaaccccagctccattgtctttaagatgagaaaataatcgttccttcctgggaatgttgtgagtattgagtgaggcagtgcaggtcaagtgtctattaaacactagccacagttgtatcgctgtgtggcagagccagtctgacaaaatacattctcagctgtgtggtctaacgctcaaattctgaactcacatgagccttgcaattgcaccatggggaccacgtcctcccaccttagactcagtagcatttgatgatggtgggcatgtcatcacaggaaactcactgtgtttccttggctgtatgaatgaagctgttgttagagaattagtgattctaggctgggcacagtggctcacgcctgtaatcccagcactttgggaggctgaggcaggtggatcatttgaggtcaggagttcgagaccagcctggccaacaaggtaaaaccctgtctctactaaaaatacaaaattagctgggcttgcctgtaatcccagctaattaggtaggctgcggcaggagaattgcttgaacccgggagacagaggttgcagtgagctgggatcacgccattccacttcagtcttggtgacagagtgagacttcgtctcaaaaaaaaaaagagagttaataattcattacagagtatctcctgcatgccagcaagctatggacatctggaagaagccacatgccttgccctcaagttgcttagggtggaaggaaatgattagaaatgagccaagccgagcctgcactcttagagtaagtgtagtggcctcagacagaggagagatccctgggacctgggcagtctgagccttccactggacagtcatgtgtgaggagattgcatttcctgagcaggacactgtgttgcgttacattggtaaccccaatttaaggcagcataaatgcactgggaaaacagcaatattggttagccctgggaagtggtttttaggatgattataatttttttttgtgggtattcatttgatgtggatagctggggtgagtgctgctttccgtcttctgatgggggcctggagaaggctgaactgcattttttaaggtctgtgacgcctgctgcaggacctgcagtgggagaaaattccccagggtggggctttctccctataagggtgctcagggctgaatatcaggacccagaaggctgaaagtgactgtccctcccttaacggatgtcttccttgtttctgtggccagggagatacttcaggggattaccggaagattctgctgaagatctgtggtggcaatgactgaacagtgactggtggctcacttctgcccacctgccggcaacaccagtgccaggaaaaggccaaaagaatgtctgtttctaacaaatccacaaatagccccgagattcaccgtcctagagcttaggcctgtcttccacccctcctgacccgtatagtgtgccacaggacctgggtcggtctagaactctctcaggatgccttttctaccccatccctcacagcctcttgctgctaaaatagatgtttcatttttctgactcatgcaatcattcccctttgcctgtggctaagacttggcttcatttcgtcatgtaattgtatatttttatttggaggcatattttcttttcttacagtcattgccagacagaggcatacaagtctgtttgctgcatacacatttctggtgagggcgactgggtgggtgaagcaccgtgtcctcgctgaggagagaaagggaggcgtgcctgagaaggtagcctgtgcatctggtgagtgtgtcacgagctttgttactgccaaactcactcctttttagaaaaaacaaaaaaaaagggccagaaagtcattccttccatcttccttgcagaaaccacgagaacaaagccagttccctgtcagtgacagggcttcttgtaatttgtggtatgtgccttaaacctgaatgtctgtagccaaaacttgtttccacattaagagtcagccagctctggaatggtctggaaatgtcttcctggtaccaacttgttttcttctgcttgattctgccctgtggctcagaggtctggccttatcagccagtgaaagttcatgtaaccttacgtagagatttgtgtgcaggaaaccctgagcatacactagtttgcagggactcgtaaggacatgggaagggaggttcccgaaatccaggcaggaggcccagacacctgaaaggcaaagggatcttggttggttgcaggtgcagtgaagtccactgaaggtgtggtgcgaagaatgcagtccttcacccaggtcccaggagggaagaagggtgtgtgctaattcctggtgcccctcggcgggggccagagagaaggatggggacaacccagagagtcacaagaccagtgcctcccctcagggtgcctccaggctgaaaggggctcctggctctggtctctggggaccctgtgcccgttggttggtggtgtgagggaagagaatccataagagagtttctgagaattatggtgtcatgtccagaagctagagcttaccttgcatcaggggtctccacccactccttttccaacctcctgcgttgaggtttagaaaagagagaatcgactaggcactatggctcacgcctgtaatccaaggactttgggaagctgaggtgagaggatcacttgagctcaggagttcaagactagcctagccaacagcgagacccctgtctctactaaaaaatttggccaggcgtggtggctcacggctgtaatcccagcactttgggaggtgaggcgggcagatcacctgaggtcaggagttcgagacccagcctggccaacatggtgaaaccccatctctactaaaaatacaaaaattagccaggcatggtggcacattcctgtaatcccagctacacaggatgctgaggcaggagaatcacttgaacccaggaggcagaggttgtagtgagctgagatcacaccattgcacttcaacctgggtggacagagtgagactctgtctcaaaaaaaaaaaaaaatttacctggcattgtagtgcattccctatagtcggctactctggaggctgaggcaggaagatccttagagcccaagaaattgaggccgtagtaagctgtgattacaccactgcactccagcctggacaacagagcgagaccttgtctcaaatgagaaaaaaacaaaaagaaatgggagaatccagagagactaggctagatcaagcctgctgggtcctggcaggagccccagggagtagctcatctgcagacatttgcttgaggactaccccctaaacataaaggaagaatgacatccgaagggtgtggagcagccatgagctgagaactagcctggtctacctgagattgatggcaggtcctggtcaacacgtcagctctgcgtcagagtccatgcctcaagcccaagctgaagccccatccctgctgctctcccaagaactcctctgctagggcaggccccttgcccttgggtgccaggtgggacctgcctgatgggatggggtgcttggcatatacaacttgccatgaactcaaggtgaccctgggggcctcctgaattgtgatggggcctagaaccaatgtgctctgatgtgaccatattctgtgacattaccttgccctgtttactccaaagttcccagcctggtgcccagcaggcaatattgcacctacagacacatttactttggtttccaaagtgtttttagacatttgaatttgttgccaacatttaaacattgagagatttcatatttttaaaaatctggaattctggcttctcttgaaaactcagaaattctggcactatggggcttgcattcctgcatggctggagctgagttgcagctgcccctttaggcctgtactccttatttgctataggctccgtcttgtattacactaagcccatgtcacccatttggctcctgcaggcctttgggtttgagaccctggtctacacacttggagaccacctgttgtaaagtacatggatgtgctttggtcaaggaatagaccaaggtggatatccaggccagagtgactcagcgagtttaggtcacaggcgtatactccacttgttatataacctgcttgtgtaagttcatacttggctcaaagccactattgtttggaaaaggtataactgccctgctgacgctgtacagatgttcttgggctcggatgggcatggctccacgtggtgtgcactagcacccagagagagtgaagctattgacccctgtaagggagagtgaccatctggcagatagatagaggggagccaggacatggctcagcttgtgcccagagggagagttaagccgctgaccctgtagccagggagtgcacctgcaagcatgggggtggcaggagccacagagctggctgctgagaggagctgcagatctggagaagacagcctaggtaaaggtggacagtgtgagagctgctgatgagatagctgctgaataaaactacattttacctgcctatggcccgccaggttttctttcagctatcgcccatccacccagtcccctcgaacctcagcatgggctggaacctgaccctgggcatgacatttggcatagttgtggacctgacacctgtgtttgtcctagtcctgtttctccctgccttcctgttcctctcgctgccctcatggtcactcccaagagatccaacccatgttaagtatgggctggaggactgcatgaatgcctcatgatcttcccagaggcaaaggcacctactgccttccaaggtcagtgggaggttgggatcaacactgtttattatgcttaggacaaaaaagatagggagaaagatgtgcaaccttacaggtcatctttctgggatagaacacaatgggtcttctcctgcctcctggatatgttagtcaaggccagtccatgctacacatctagtctgacttctaaaatagaagcaccagatgaattcagccctgagagaattttcagcagctgtgggggcgctggaggaaacactattaaatagttttgcacctgagacagatagcctcactcgcctcaccctagtcctggtggcatttgtctcaggtgcaaaatttaagaaagaaaccttggagtgctcaccctgtggctgggtagatggtcctaaagtggtggttttcaagcctgagtgtgtatcaggatcatcaggggagcttgctaaagagcagttcctgcggtcagaccctcatgcattttgagcaggtgtggggactgggaaactgcatctgtaacctgctgtaatctaacgcttatctaaatactactgtgctcacacagagaacaccgcaaaagtagaggtgttcctccagagggcaggtgagcagatggcacagtctgcttggaattcagtcaggtgatgagagatgagatgaggcactcctagctttgggaagagggagctgaaagatgaacctttgcaggtgcccacggtcaaagtggtggtttaatgccatgccatgcccattttctgttggccttggcagggagttacagccctaccttaggacctggctccttatttctgctgtaggctctttcctgccctggccgagatggagtggaatgagacctagaaacatcaagctaaatacatgtcctcagaaagataaaggtttacattttcacccccatcaaatctgaaagctctctgcctgtgtttttctaagggatagggacatcattactcagtccacaacctggactcatgtagggtcccctgtcagtaaaggagtcagtcaagcccaccaggtataccaaggactcttaccctcagcccctactccttggaaagctgccccttggcctaatattggtgtttagcttgagcctgactccttctcaacactaagagctgatgaagtcctgaagcagaaagagctctgacctgagagtcaaacatccttattctgatctcagctcagcccctgatttgttgtgtgaccctggatatgtcacttcctgtctttttgactttttaaaatgaagggtagactagaggagagcttctaaaactttaatgtggtcaacgaaatggaataggaaattccacaagtctgtccttccacaaaagcagcaaataaggtggcaaaaactcaaatttatgggaactctggaaacgaattgaaagtttacagcaatcaggtgaatacctaagaataaaagctggatttagtaagagagctttgttgtgttttagcttaccctggccccatcccccactccccagcatggcagcagcatcaaaaacaatatccctcattccctgtataggttcctgtcactggaggtagcagatta

SEQ ID NO: 961 - DNA, 423 bp, Homo sapiens
gctgagcagcctctgagcagcaagagaggaggaggcaggaaatttagggaaggttcttcctggagggtctggagccctggagatgaagagccgatccgaagctgccatgtagaagaaagcatctaacaggccagaggccccatgatgatgtcgaatgcccatcgggcacccagctgagccctgcaggtgttaactcagtcttcgtcacagcagtctaggcatacactcaccattagcccatttgtaagctgaggaaacaagcctaaggagggtgaaagccttgccccagggcacataccggtcctgctggtttcagagcgggcttttcacctctgtttcttcctgtcctcttgtggactggtatctgtgtttaccatgacccagccccatgtccctccagcctcttatcctgcttctccctgc

SEQ ID NO: 962 - DNA, 974 bp, Homo sapiens
taatttggagctctcctaaagtgaagatggcagcctggaaagacgtttcaaggtcagtgtattagtggctcatgcctaggggaaggaataacatttggagcaaacaggagacaaattgaaaagcttcaggaggaaaggctaggaaataagattctttgggtgagaataaggactttaaagagattccacatattcctgggaatctgaaagaccatacacatgcctagggctgggcatgtgcttaaaaagacttgagagggccctatgctgtcacctctgcctgaccttcaggctccgtgcaagcaggaagtgaaggctaaggcatagttataaactgcatgggtgaaggttgaaaggtgtgtcccaacacagaacacatctgcaaatgctacgaggcattttgttgttccaagtgttcaaagaaatcttttgaatcactagctgaccactaagctaaccaaagacttagtggccacacctgacaaagaatacaaactaaaaaactaaaaatgtagttcaagaaaataacaggctgggcacagtggctcacatcggtaatcccagcactttgggaggctgaggcaggtggatcacttgaacccaggactttgagaccagcctgggcaacatggcaaaaccccatctctgcaaaaaatactaaaaatttgcagggcctggtggcacacacttatagtcccagctgcccaggaggctgaggtgggaggatcacctgaccctgggaggtccaggctgtagtgagccataatcctgccattgcactccagcctaggtgacacagtggaggaataattttatttccaaacttgccacattataaataatattcagaatgttcagttttcaacaaaaactatgaggtatgcgaagaaacaaagtatggctcatacatagaaaaaaaatctgttaatagaaactgaggaaagctcagacattggacttaacagacaagactt

SEQ ID NO: 963 - DNA, 974 bp, Homo sapiens; identical to SEQ ID NO: 962

SEQ ID NO: 964 - DNA, 423 bp, Homo sapiens; identical to SEQ ID NO: 961

SEQ ID NO: 965 - DNA, 2234 bp, Homo sapiens
caaccaatcacaaagtgtgggcattatttaaatcttgattcaaataaacaaactgaaatatataaatgacacttatgaaacaaaaatgtggccactgattgggtatttgactaaatcactgctcaattttattttgtgcgtgataatagcaatgtgcttatgtgttttatcttctagtgatacatactgaaatatttacagatgaaataatataatgccaattattttcttgaaattaatgtggatgtggaaagtagacagagatagagatttaacaagatggattatgagctgataattgttgaagttgagtgacaggcacataggggtttattataatatcccgtcttcttttgcatatgtttaattttccataataattttttaatgttctaaaaatttaaactttattttccaatcaaatggaagtctttagagattttattttgcaagtggcaatatgattaaaagggaaataggaaagataaattaagcaatgatttgcacattaattggcagttggggaagaccaaagaccaggagattagttaagagtctcttacagcatcccgatctacattggaaaaagtctgactgaggtaacattaatagaaatgaaaaggaaaaagtgacaggaatgattttgaggagcatcaaagttcgctgctacttgaatatgaaacactaagcagagaaagattaaaagaggacacaaaaatctcaaacctggcatattttaaaaatagtaatgtcatgaataaatataggccagtcaagatgacaaattgttgggtgatgaggtaacaaatttacttctagacatcaagtttgagaggatgaagtgaccacttgctattaaagtaaattattgtttacctacacatgcattaaaaaaaatcctttgtgctgtctcctgaaatgtgattatgtgtttaaaaatacagtgtcataaattaaacttagcataataaaataattgaataaaataaaactataagtcaaatttccttgttactgatattaaaatagcccaaacccttctttgataaaattctacttttttgtcatgttttaccatttgtttacattatttccctgcaaaaaatgttccttgatatcataagtagatctgtatatgtacttattttatatcactttccctgtctctatacatctaaacatataaagcaatgaacacatcataggtgcccaataaataccaagttttctggccaatatgctcacttattgcaagcagtactgagaagaataagattgtaacgctgccagataatttggaaagtcttctgaagcttccttaagtaagataacatcattattttattaagtagtatcattaattatcttaagtaacatcatcaatactgaaataatttcttctagtgacaaactatggaaatacatatagtagaaactgtgtctaagtcagacttttgaatttcatttatgacaaacttagttgtacactattaaaagtctataataaccacaatactgttcagtgcttagcatgtccatacccaaaagtttggaatttgtcatttttaatccctagcatcatacattcccatatcctttaccttagtaagtgattccttgtgaccaagtgaaccactctaattacctccataaaaagaaattgagaagatgtctcaaaaacaataaaaagcagaaatacattgttctcaaaaccctctgattcttgacagtttttgcttcctagatccaccagttcagcatgctacccaatactgacaactaatcccagactttctttgctacttgaagccaaggcaacatccaactacatcatctctcgctgtttgcttgaaaacaaatgtgaaactatttcattcgtttgcttgaacttaccaataaatacatggctagaggtcatttagtttggcagtattctgattcagcaaagcaataaaaccaacccaaactatttgaaatcccaatgtccaggaccctggagcaccatgtctcttgctgtcatagcacctgactgtgagtgtgtttcctcactcgcctctgaaagctggcggcaagacccttgaccatcaaacaggagaaaaatcctcatcatctatcaagggggccatagttggaatctttctctgttatgcacatagaatgttcctgcagaaacaaagatctttccatgaacagtaataagttccctcttgtttcaacaatgattggttggaatt

SEQ ID NO: 966 - DNA, 8985 bp, Homo sapiens
cttctcttcctgcaattgctctatcacttcttccctctcaagtcccgccctttcagctacctccaactgctgaggaaccggttgcctaaaaggagccggcaaaagcgcctacgtggagtccagaggagcggaagtagtcagatttgactgagagccgtaaagcgcggctggctctcgttttccggataacgactacagctccgactgtcagtgccggccttcctcgtgtgaggggatctgccggacccctgcaaattcaatttctttcccattccgggcccttccctatcgtcgcccccttcaccttggatcatgttcaagaagtaaggacatgctgtggcctccatcggctgctcacaaaggcggtggggtgggggtggggaagagggcgagagctaagatcctctttctctctcccccgcccctgccatcctgactccctaaggttttctatagtactatgctctcactcccaacttgaacacttctttaagctttccatccgtagtccttaattgggtttcagtccctccactcccattgttttttctccttacccctctttctcttttgccccctcccccaattctgtctccattcctagggttctaccaatcacatccgtgcactgtgatttagaggcatattctctgtagctgagaggggagccctgcgctcactgccatatgtttattagttatgaactgaataaaggaaggcttgacttcctgggtcatgggagtgaaggagtctgggtgacaggaagcaagcggcctgtcatgcctattgcctagctgccagattaaccttgccttgaaaataacgattgccccataggctattcagtgtaaggaagacaaaaattccttgggaacctactagtgggtttgccttccagatttggtagacgcaaaaagcaaagggggaacatgggcaaaggaaggtgggttttgtgcatgaaattttgagcaaaaacgaatagggatcttagaaatcattattatcatcacttaaaaaaaatctcagcagattacatagcctagcaggggccgattttctatgttatgcttgggttggtcttttgtatctcaagaattgagggttttgttttctgatctcaggttttattattggtgggagcctgtgtttcttcctgggtagaattgaataagattttccaggaaaggcatttgtgtagctaattacagattatggtgcaaagtatgtctcatattcctccccctaaccccagctaattgctgtatacttgacagtttatttcaatattgtattaagacattggttttgtgctggacagagtaaaagggagatggtatttttttttaaaagaacaatttatttcataattaagtatctaaatacttggttgggaataaatgactaattagaacagtacctttaggtattctgatacctctacttagaaatgccttttcttttcttgcaaaaattacttggcagatttgatgaaaaagaaaatgtgtccaactgcatccagttgaaaacttcagttattaagggtattaagaatcaattgatagagcaatttccaggtattgaaccatggcttaatcaaatcatgcctaagaaagatcctgtcaaaatagtccgatggtaagtctttgtttttgtctgtgtaaagctcggtatagctgaatatttaatgattagattgcactcatactaaatggaattattttcagattaactattgatagattaataatggggtagacacagaataactctaaaactccaatatttgtattttcaaagattttctatgtccctgaaaaaatgtggctttgtgtattgattgttctagtaaagagttaaatgttttagttcagagttggatttaatttatttcagtttgttgtttagagaattgttttattgaattacctaacaatggaattaataaaatgtgaaataaaattggttgtagcaggtaatatttttctttttttctctactggacttgcatgataggaaaaacaatgtaaacaatattttttggccaggatttttactgactttttaagaaagtttatcactgtatatgcgtgttttatattgtgaatttttgaaagaaaatatctaacttggtactttgtgacatttgtcttacagccatgaacatatagaaatccttacagtaaatggagaattactcttttttagacaaagagaagggcctttttatccaaccctaagattacttcacaaatgtaaggtttttttatttttattttttgaaattttactcctattgcaatattcaaatgtaaagtcttgtaagaaatatgcatttaatcagataagacactgctgggggagaaaaacagaaatatgcatttgggaatactgaaagacacaaaaagagtttagagtgacttctgataattgactcattatttattagtactaggtaataatggatgtaaaactaaaatgaatgcccatcttgtggtaaatctgaaaaatgcagattctctcatgcattccagaaagcccaagaaagatcatttattaattcattcaacaaatatttattgccgggcacggaggctcacgcctgtaatcccagcactttgggaggccaaggcgggtggatcacctgagatcaggagttcgagaccagcctggccaacatggtgaaaccccgtctctactaaacatacaaaagttagccgggcgtggtcacaggtgcctgtaatcccagctactcgggaggctgaggcaggagaatcacttcaacccgcgaggcggaggttgcagtgagcagagatcacgccattgcactctagcctggggaacaagagcgagacttagtctcaaaaaaaaaaaaaaaaaaaaaaagacaaatatttattgaacttactatgtgctaggcattcagctaggtgctgagaatacaatgggaagcaaagacattgtctctgtccttaagaaactaatagtctagtttggagaataaacaacaattagataattacgcaaatatgtatttacaaactgtgataagcattgtgagcattttcatcttttatatttgtatctatttgcctaatagagaaaagtctatatatgggaaagcattgactaagtgtccttccgtccaggtatttcctgtgatgtgtgtaaatgcatttttttttaaaattgggctctctgttacatagtttttaaaaattgatacgtcatagctgtacattgtctgctgttgtggtgcctgtatcccccaccacctatatatatttataatagttgtacatattttaggggtacatgtgatatttgatacctttatacagcgtgtaatgatcaaatcagggtaattagggtatctgtcacctcaaacgtttatctttgtgttgagaagattacaattcttctagctattttgaaatatagagtaaatcattgttaaatataatttccttattgtactctcgaatactagaacttatcgacctgtatttttataccccttaaccaacttctcctcatccccttgtagtttttttttaaattaacaggcttttattttttagagcagttttaggtttccagaaaaagtaagcagaaagaatagagttccctctccccagttcagattcccctatgaataacatcttgttttggaatgatacatttgtaacaattgaaccagcattgatacattattattaacgcaagtccttagtttacattagggtttactctttgtattctacagttttatggtttttcccaaatacatgtcaagtatctactgttaaagtatcatacagaatggttttactggcctaacatcctttgtgctccacctattcatccttcctccccccacttccccaaccccaggtaaccactgatctttttaatcgtttttttactctgcgtttttcacttaacattatatcacaaaaatttcccagggcatattaagtagtctccaaaaaccatagttttgaaattacggtttttggagaatacttgggatgctgaggcgggaagattgcatgagtccaagagttcaaggttattgtgaggtattgattgctccactgtactccagcctgggtggcagagcaagaccctgtctcaaaaaaacaaacaaaaaagattaccaatttggtaaacaaatgatagtgtttcagagttttcttttgtatctgtcagattaatttggggaaatactgttcagatcctttgcctttttctgttgagtcattagtcttattattaatatattgtatatcttttcttacagatccttttatcctgccacaccagcaggttgataaaggagccatcaaatttgtactcagtggagcaaatatcatgtgtccaggcttaacttctcctggagctaagctttaccctgctgcagtagataccattgttgtatccttcccaggctaaaactgctgaaaaatgtattcattgtgctcttatcattactgcgaaaggtgtaccatccaagagaacattagatgtacttttttgaaggttactgttactcttatctcatgcctttctggttacatttgaagttgtacaaagtaattttatttgttgctactaaattatctcatcttaggtcgtttcttagaagttaaatgagaacaagttacagaagagtctcagctgcatttcagcccagtcagggcctactgttatcagacttaggacacaatagggaattcttgattactaggggaaaggatatagatgatataattggatcagctttttggatatcaacttgccactgtaatgttcattttgacttactgacatacgttggagtgaaagctctcaaaagggaaaagaatttaggcaccaggtataggtatctcttaccaagcaacaattttgtgttaggagtgaatagtgggaaatattggcaacctccaacttttattttgaaaattaattatttgaaaagttgagtttgggggcctcagagcacgttttctcaaagagaaatgtcagagtcccagatggtccttaaagatcgattcaactcatgacatagctgaataattctgcattatttccatttctaccatgctgtttcagctattttctggattaaatagatttttgtgactattctggacaggagaacatcttctcctttatcatagctaaagtagccatttgcctcgggtatagaaaaggaatggtacttggtgggaatagggaaactacttttagagtgtgtttatcttattttagtttttgagatggagtctcgctctgtcgtccaagctggagtgcagtggcacgatcttgtctcactgcaacatctgcctcctgggttcaagcaattctcctgcctcagcccctcgagtagctgaggttacaggcacccactaccacgcccggctcatttttgtatttttagtagagacagggtttcaccatgttggtcaggctagtctcaaactcctgacctcaggtgatccacccgctttggcctcccaaagtgctgggattacaggtgtgagccaccacacctggccaggggtgtgtttaagaagaataagaaaaaaaaatgatattctctgttggggcagttatagcgaagaggtagtataagtagtatgtttatattctaggaacagcttatgttgacatgctttttgcctaataggtgctcacatatttggaacactgagtgaattgaaaatcaagggagaaaagtgaggacgggttttttgttgttgttgtttgtttttaatatttattaagtgttggtaaatttatagttctggagttaaccttaaatggaaaatttccttagtacctagtctttacttttaaaaataatttttattttgaaacagttacagatttagagaaagttgttaaagaaaatggtacagagaggtcttgtgtaccctgaatcttgactttttaaaatatgtactgcagtgtttaacattccagaaacttcatatgttaaccaagaccactctggtttttctagaaaggttgaaactgttatatcaggctcttaaagatagactgggaatttacctattattttaaaacagcctttacataaaaccaccattcaggccgggtgtggtggctcatgcctgtaatcccagcactttaggaggctgaggcgggcagatcacctgaggtcaggagttcgagacaagcctggccaacatgacgaaaccctgtctgtactaaaaatacaaaaattagctgggtggggtggcatgcgcctgtaatcccatctactagggaggttgaggcaggagaattgcttgaactcaggaggcagaagttgcagtgagctgagatcatgccactgcactccagccgggtgacaaagcaagactccatctcaaaaaaacaaacggccggctatggtggctcacgcctataatgccaccactttgggaggctgaggcaggcggatcatgaggtcaggagttcaagaccagcctggccaacatggtgaaatcccatctctactaaaaatacaaaaattagctgggtgtggtggcacacgcctgtagcaccagctactcgggaggctgaggcaggagaattgcttgaacccgggaggcagaggttgcaatgagccaagactgcgccattgcactccagcctgggcaacagagtgagactctgtctcaagaacaaacaaaaatccccactagtcagtgatcagaataattaatcagaacaattaatatttattgatttcacagtttttagtatttatgtgcaagaaattttactccttttttgtgtgacttattctggttttgttagcatggggttatagtattaacatttgacttgaaagaaaaggggttattagatttattcatttagcatttactgagtatttacagtgtacccacagactctgctaggtctctgctctcaaggagttaatggtctaggagaagacacaagaggggttccaagtggcttaactagtaacatgatcattatttgacacccttcccttgatggggaggccccaaggcattttgataaatagttttcttagctgtgttctttcaggctatcatggcagaaggaaaacagcatgctctatgtgttggagtcatgaagatgtctgcagaagacatgtaagtcttactttaggcccccttaacttttgatatatgggtaaccaacccaggaagcatcagaattacaggtgaaatttgctatcatgcataccacattacacaaatatccaagcacagaagcttcatttctgatatttcctaacacttaggaagccaatgaaacctattttgtcttcaggattgtagtctttcttaagcactgaaaagaacccatgtgccaacacagctgttttatatgtgtgtacgtggtactttaggaatcttatttagtatcatttaaattgggggaggagggaagatgttttactgctagcttcattttatttatttttatttttatttttttaagtttttttgagatggagtctcactctgttgcccaggctggagtgcagtggcgcgatcccgcctcactgcaacctctgcctcccaggttcaagcgattcttgtgcctcagccttccaagtagttgggattacaggtgtgcgccataatgtccagctaatttttgtatttttagtagagatggggtttcaccatgttggccaggccagtctcgaactcctgacctcaagtgatccacccacctcggcctcccaaagtgttgggattacaggtgtgagccactgcacctggtcattactgctagttttaaaaacagtgatatatctcaccaccacacagtatcttatatcctgacctggtaatacaagaaatgtagaatatttagagaactagtaaagatatattatcaaaacataggcagtatatttaaaaattttagaacccatttgatgaccaaattagtggtattaattttgtttcagggttaatgtagcactttgatattcccctagtcttgtgacattgttactctggttctatagacccactagttagatcactaaaatcacttttagatatgagctgccacagagtaatgtagtttaatataaacaacaatgtaattgtgatgtcaataagttctttacttgtggcttaataattaaaaaataacaatatactttgaattatatttatcacgagtaagactataaaaatgcataaaagtatgtttatgtgttttttttccttctacagtgagaaagtcaacaaaggaattggcattgaaaatatccattatttaaatgatgggctgtggcatatgaagacatataaatgagcctcagaaggaatgcacttgggctaaatatggatattgtgctgtatctgtgtttgtgtctgtgtgtgacagcatgaagataatgcctgtggttatgctgaataaattcaccagatgctaaaattctgttagcttcagaaattattttaagttttcttaaactcaagttaaaattgggtagcaaacttggacattaaaaggtatctggtaagtaagcaaactcatacaactaatgtcctttcttaggctaatgatataagagtgaagagcaggacttggtcaatggattgccattttatggtagacctctagagaaactgtctagttaaatggggctagaaactagactaggaattttattctattactccaggggacccagcagtgctcattctcgtgtgtgtgtgtgtgtgtgtgtgtgtatgtgtgtgtgtgtgtgtgtgtgtgttttgttgattgtttttttaaaaaaaacttcaatggaaaattctaaacatattaagaagtctggagaatagtataatggacctctccatatccatcacccagtttcagtttatggtcagtcttatttcatctatacctcaattatttctccccaccccccaattattttgaagcaaatcccagacatcctatcatttc

SEQ ID NO: 967 - DNA, 478 bp, Homo sapiens
ctcgaggccaggagttcaagatcagtctgggcaacttagtgagaccctgcctgtctctacaaaaaattaaaattcgccaggtgtggtagtgcatgcctgtagtaccaactactccggaggctgaggcgggagggtcacttgagcctgggaagttgcaactccaatgaaccgtgatcatgccactgcactccagcctaggtgacagagtgagatgctgtctctaaaacaaaaaacaaagtgaaactcttgattggcataattttgtttctctatcagctttatttttaaaaaaattacataagtaaaacatgtctctttagctattatctcttaaatcagattaccttctgtaataattctatgggaattattctacgggagcacagtcattcacgcttgtaaccccagcactttgggatgccaaggtgggaggactgcttgagcccaggactttgcaaccagcctgagcaacatagac

(The sequence listing continues in the following parts.)

1-32. (canceled)

33. An isolated nucleic acid molecule comprising a first polynucleotide sequence at least 95% identical to a second polynucleotide sequence selected from the group consisting of:
(a) a polynucleotide fragment of SEQ ID NO:X as referenced in Table 1A;
(b) a polynucleotide encoding a full length polypeptide of SEQ ID NO:Y or a full length polypeptide encoded by the cDNA Clone ID in ATCC Deposit No:Z corresponding to SEQ ID NO:Y as referenced in Table 1A;
(c) a polynucleotide encoding a polypeptide fragment of SEQ ID NO:Y or a polypeptide fragment encoded by the cDNA Clone ID in ATCC Deposit No:Z corresponding to SEQ ID NO:Y as referenced in Table 1A;
(d) a polynucleotide encoding a polypeptide fragment of SEQ ID NO:Y or a polypeptide fragment encoded by the cDNA Clone ID in ATCC Deposit No:Z corresponding to SEQ ID NO:Y as referenced in Table 1A, wherein said fragment has biological activity;
(e) a polynucleotide encoding a polypeptide domain of SEQ ID NO:Y as referenced in Table 1B;
(f) a polynucleotide encoding a polypeptide domain of SEQ ID NO:Y as referenced in Table 2;
(g) a polynucleotide encoding a predicted epitope of SEQ ID NO:Y as referenced in Table 1B; and
(h) a polynucleotide capable of hybridizing under stringent conditions to any one of the polynucleotides specified in (a)-(g), wherein said polynucleotide does not hybridize under stringent conditions to a nucleic acid molecule having a nucleotide sequence of only A residues or of only T residues.

34. The isolated nucleic acid molecule of claim 33, wherein the polynucleotide fragment comprises a nucleotide sequence encoding a secreted form of SEQ ID NO:Y or a secreted form of the polypeptide encoded by the cDNA Clone ID in ATCC Deposit No:Z corresponding to SEQ ID NO:Y, as referenced in Table 1A.

35. The isolated nucleic acid molecule of claim 33, wherein the polynucleotide fragment comprises a nucleotide sequence encoding the sequence identified as SEQ ID NO:Y or the polypeptide encoded by the cDNA sequence included in ATCC Deposit No:Z, which is hybridizable to SEQ ID NO:X, as referenced in Table 1A.

36. The isolated nucleic acid molecule of claim 33, wherein the polynucleotide fragment comprises the entire nucleotide sequence of SEQ ID NO:X or the cDNA sequence included in ATCC Deposit No:Z, which is hybridizable to SEQ ID NO:X, as referenced in Table 1A.

37. The isolated nucleic acid molecule of claim 34, wherein the nucleotide sequence comprises sequential nucleotide deletions from either the C-terminus or the N-terminus.

38. The isolated nucleic acid molecule of claim 35, wherein the nucleotide sequence comprises sequential nucleotide deletions from either the C-terminus or the N-terminus.

39. A recombinant vector comprising the isolated nucleic acid molecule of claim 33.

40. A method of making a recombinant host cell comprising the isolated nucleic acid molecule of claim 33.

41. A recombinant host cell produced by the method of claim 40.

42. The recombinant host cell of claim 41 comprising vector sequences.

43. A polypeptide comprising a first amino acid sequence at least 95% identical to a second amino acid sequence selected from the group consisting of:
(a) a full length polypeptide of SEQ ID NO:Y or a full length polypeptide encoded by the cDNA Clone ID in ATCC Deposit No:Z corresponding to SEQ ID NO:Y as referenced in Table IA;
(b) a secreted form of SEQ ID NO:Y or a secreted form of the polypeptide encoded by the cDNA Clone ID in ATCC Deposit No:Z corresponding to SEQ ID NO:Y as referenced in Table 1A;
(c) a polypeptide fragment of SEQ ID NO:Y or a polypeptide fragment encoded by the cDNA Clone ID in ATCC Deposit No:Z corresponding to SEQ ID NO:Y as referenced in Table 1A;
(d) a polypeptide fragment of SEQ ID NO:Y or a polypeptide fragment encoded by the cDNA Clone ID in ATCC Deposit No:Z corresponding to SEQ ID NO:Y as referenced in Table 1A, wherein said fragment has biological activity;
(e) a polypeptide domain of SEQ ID NO:Y as referenced in Table 1B;
(f) a polypeptide domain of SEQ ID NO:Y as referenced in Table 2; and
(g) a predicted epitope of SEQ ID NO:Y as referenced in Table 1B.

44. The polypeptide of claim 43, wherein said polypeptide comprises a heterologous amino acid sequence.

45. The isolated polypeptide of claim 43, wherein the secreted form or the full length protein comprises sequential amino acid deletions from either the C-terminus or the N-terminus.

46. An isolated antibody that binds specifically to the isolated polypeptide of claim 43.

47. A recombinant host cell that expresses the isolated polypeptide of claim 43.

48. A method of making an isolated polypeptide comprising:
(a) culturing the recombinant host cell of claim 47 under conditions such that said polypeptide is expressed; and
(b) recovering said polypeptide.

49. The polypeptide produced by claim 48.

50. A method for preventing, treating, or ameliorating cardiovascular disorder, comprising administering to a mammalian subject a therapeutically effective amount of the polypeptide of claim 43.

51. A method of diagnosing cardiovascular disorder in a subject comprising:
(a) determining the presence or absence of a mutation in the polynucleotide of claim 33; and
(b) diagnosing the cardiovascular disorder based on the presence or absence of said mutation.

52. A method of diagnosing cardiovascular disorder in a subject comprising:
(a) determining the presence or amount of expression of the polypeptide of claim 43 in a biological sample; and
(b) diagnosing the cardiovascular disorder based on the presence or amount of expression of the polypeptide.

53. A method for identifying a binding partner to the polypeptide of claim 43 comprising:
(a) contacting the polypeptide of claim 43 with a binding partner; and
(b) determining whether the binding partner effects an activity of the polypeptide.

54. The gene corresponding to the cDNA sequence of SEQ ID NO:X.

55. A method of identifying an activity in a biological assay, wherein the method comprises:
(a) expressing SEQ ID NO:X in a cell;
(b) isolating the supernatant;
(c) detecting an activity in a biological assay; and
(d) identifying the protein in the supernatant having the activity.

56. The product produced by the method of claim 53.
